United States Patent Application Publication US 2007/0214517 A1 - sequence listing, part 57

SEQ ID NO: 76056 - protein, 415 aa, Arabidopsis thaliana
  peptide (1)..(415): Ceres Seq. ID no. 7103822
  misc_feature (14)..(211): Pfam Name: Tubulin/FtsZ family, GTPase domain Pfam Description: Tubulin/FtsZ family, GTPase domain
  misc_feature (1)..(415): Homolog of NCBI NO: 16226462 NR Description: AT4g14960/dl3520c [Arabidopsis thaliana]
  misc_feature (1)..(415): Homolog of NCBI NO: 15233627 NR Description: tubulin alpha-6 chain (TUA6); protein id: supported by cDNA: gi_16226461, supported by cDNA: gi_16604479,
  misc_feature (1)..(415): Homolog of NCBI NO: 15220329 NR Description: tubulin alpha-2/alpha-4 chain; protein id:
  misc_feature (1)..(415): Homolog of NCBI NO: 17402471 NR Description: alpha-tubulin [Nicotiana tabacum]
  misc_feature (1)..(415): Homolog of NCBI NO: 17402469 NR Description: alpha-tubulin [Nicotiana tabacum]
  misc_feature (1)..(411): Homolog of NCBI NO: 464849 NR Description: TUBULIN ALPHA CHAIN >gi|486847|pir||S36232
  misc_feature (1)..(411): Homolog of NCBI NO: 1174592 NR Description: TUBULIN ALPHA-1 CHAIN >gi|2119270|pir||S60233
  misc_feature (1)..(415): Homolog of NCBI NO: 29124983 NR Description: alpha-tubulin 1 [Populus tremuloides]
  misc_feature (1)..(415): Homolog of NCBI NO: 15029368 NR Description: alpha tubulin subunit [Rosa hybrid cultivar]
  misc_feature (1)..(415): Homolog of NCBI NO: 25396550 NR Description: alpha tubulin [Physcomitrella patens]
MPGDKIVGGGDDAFNTFFSETGAGKHVPRAVFVDLEPTVIDEVRTGTYRQLFHPEQLISGKEDAANNFARGHYTIGKEIVDLCLDRIRKLADNCTGLQGFLVFNAVGGGTGSGLGSLLLERLSVDYGKKSKLGFTVYPSPQVSTSVVEPYNSVLSTHSLLEHTDVSILLDNEAIYDICRRSLNIERPTYTNLNRLVSQVISSLTASLRFDGALNVDVTEFQTNLVPYPRIHFMLSSYAPVISAEKAFHEQLSVAEITNSAFEPASMMAKCDPRHGKYMACCLMYRGDVVPKDVNAAVGTIKTKRTIQFVDWCPTGFKCGINYQPPTVVPGGDLAKVQRAVCMISNSTSVAEVFSRIDHKFDLMYAKRAFVHWYVGEGMEEGEFSEAREDLAALEKDYEEVGAEGGDEGGDEKKKY

SEQ ID NO: 76057 - DNA, 1440 bp, Arabidopsis thaliana
  misc_feature (1)..(1440): Ceres Seq. ID no. 7103849
  misc_feature: MA Experiment ID: 108434 Result: Down-regulated in Transcription
  misc_feature: MA Experiment 108434 PARAMETER Experiment Name: At_Root_Tips_cDNA_P Parameter: Tissue Value: Root Tips
  misc_feature: MA Experiment ID: 108461 Result: Up-regulated in Transcription
  misc_feature: MA Experiment 108461 PARAMETER Experiment Name: At_Germinating_Seeds_cDNA_P Parameter: Age (day) Value: 1 vs. 0
  misc_feature: MA Experiment 108461 PARAMETER Experiment Name: At_Germinating_Seeds_cDNA_P Parameter: Tissue Value: Germinating Seeds
  misc_feature: MA Experiment ID: 108462 Result: Up-regulated in Transcription
  misc_feature: MA Experiment 108462 PARAMETER Experiment Name: At_Germinating_Seeds_cDNA_P Parameter: Age (day) Value: 2 vs. 0
  misc_feature: MA Experiment 108462 PARAMETER Experiment Name: At_Germinating_Seeds_cDNA_P Parameter: Tissue Value: Germinating Seeds
  misc_feature: MA Experiment ID: 108463 Result: Up-regulated in Transcription
  misc_feature: MA Experiment 108463 PARAMETER Experiment Name: At_Germinating_Seeds_cDNA_P Parameter: Age (day) Value: 3 vs. 0
  misc_feature: MA Experiment 108463 PARAMETER Experiment Name: At_Germinating_Seeds_cDNA_P Parameter: Tissue Value: Germinating Seeds
  misc_feature: MA Experiment ID: 108464 Result: Up-regulated in Transcription
  misc_feature: MA Experiment 108464 PARAMETER Experiment Name: At_Germinating_Seeds_cDNA_P Parameter: Age (day) Value: 4 vs. 0
  misc_feature: MA Experiment 108464 PARAMETER Experiment Name: At_Germinating_Seeds_cDNA_P Parameter: Tissue Value: Germinating Seeds
  misc_feature: MA Experiment ID: 108488 Result: Down-regulated in Transcription
  misc_feature: MA Experiment ID: 108569 Result: Up-regulated in Transcription
  misc_feature: MA Experiment 108569 PARAMETER Experiment Name: At_0.001%_MeJA__cDNA_P Parameter: Timepoint (hr) Value: 6
  misc_feature: MA Experiment 108569 PARAMETER Experiment Name: At_0.001%_MeJA__cDNA_P Parameter: Tissue Value: Aerial
  misc_feature: MA Experiment 108569 PARAMETER Experiment Name: At_0.001%_MeJA__cDNA_P Parameter: Treatment Value: 0.001% MeJA vs. No Treatment
  misc_feature: MA Experiment ID: 20000072 Result: Down-regulated in Transcription
  misc_feature: MA Experiment 20000072 PARAMETER Experiment Name: At_100uM_ABA_Mutants_cDNA_P Parameter: Plant Line Value: CS8105
  misc_feature: MA Experiment 20000072 PARAMETER Experiment Name: At_100uM_ABA_Mutants_cDNA_P Parameter: Timepoint (hr) Value: 6
  misc_feature: MA Experiment 20000072 PARAMETER Experiment Name: At_100uM_ABA_Mutants_cDNA_P Parameter: Tissue Value: Aerial
  misc_feature: MA Experiment 20000072 PARAMETER Experiment Name: At_100uM_ABA_Mutants_cDNA_P Parameter: Treatment Value: 100uM ABA vs. No Treatment
  misc_feature: MA Experiment ID: 20000087 Result: Down-regulated in Transcription
  misc_feature: MA Experiment 20000087 PARAMETER Experiment Name: At_100uM_ABA_Mutants_cDNA_P Parameter: Plant Line Value: WS
  misc_feature: MA Experiment 20000087 PARAMETER Experiment Name: At_100uM_ABA_Mutants_cDNA_P Parameter: Timepoint (hr) Value: 6
  misc_feature: MA Experiment 20000087 PARAMETER Experiment Name: At_100uM_ABA_Mutants_cDNA_P Parameter: Tissue Value: Aerial
  misc_feature: MA Experiment 20000087 PARAMETER Experiment Name: At_100uM_ABA_Mutants_cDNA_P Parameter: Treatment Value: 100uM ABA vs. No Treatment
  misc_feature: MA Experiment ID: 20000180 Result: Up-regulated in Transcription
  misc_feature: MA Experiment 20000180 PARAMETER Experiment Name: At_Germinating_Seeds_P Parameter: Age (hr) Value: 24 vs. 0
  misc_feature: MA Experiment 20000180 PARAMETER Experiment Name: At_Germinating_Seeds_P Parameter: Tissue Value: Germinating Seeds
  misc_feature: MA Experiment ID: 20000211 Result: Up-regulated in Transcription
  misc_feature: MA Experiment 20000211 PARAMETER Experiment Name: At_0.001percent_MeJA__P Parameter: Age (day) Value: 14
  misc_feature: MA Experiment 20000211 PARAMETER Experiment Name: At_0.001percent_MeJA__P Parameter: Organism Value: A. thaliana
  misc_feature: MA Experiment 20000211 PARAMETER Experiment Name: At_0.001percent_MeJA__P Parameter: Plant Line Value: WS
  misc_feature: MA Experiment 20000211 PARAMETER Experiment Name: At_0.001percent_MeJA__P Parameter: Timepoint (hr) Value: 1
  misc_feature: MA Experiment 20000211 PARAMETER Experiment Name: At_0.001percent_MeJA__P Parameter: Tissue Value: Aerial
  misc_feature: MA Experiment 20000211 PARAMETER Experiment Name: At_0.001percent_MeJA__P Parameter: Treatment Value: 0.001percent MeJA vs. No Treatment
  misc_feature: MA Experiment ID: 20000527 Result: Down-regulated in Transcription
  misc_feature: MA Experiment 20000527 PARAMETER Experiment Name: At_10percent_PEG_P Parameter: Age (day) Value: 20
  misc_feature: MA Experiment 20000527 PARAMETER Experiment Name: At_10percent_PEG_P Parameter: Organism Value: A. thaliana
  misc_feature: MA Experiment 20000527 PARAMETER Experiment Name: At_10percent_PEG_P Parameter: Plant Line Value: WS
  misc_feature: MA Experiment 20000527 PARAMETER Experiment Name: At_10percent_PEG_P Parameter: Timepoint (day) Value: 20
  misc_feature: MA Experiment 20000527 PARAMETER Experiment Name: At_10percent_PEG_P Parameter: Tissue Value: Whole Plant
  misc_feature: MA Experiment 20000527 PARAMETER Experiment Name: At_10percent_PEG_P Parameter: Treatment Value: 10percent PEG vs. No Treatment
  misc_feature: MA Experiment ID: 20001555 Result: Down-regulated in Transcription
  misc_feature: MA Experiment 20001555 PARAMETER Experiment Name: At_Drought_Soil_Dry_P Parameter: Age (day) Value: 24
  misc_feature: MA Experiment 20001555 PARAMETER Experiment Name: At_Drought_Soil_Dry_P Parameter: Organism Value: A. thaliana
  misc_feature: MA Experiment 20001555 PARAMETER Experiment Name: At_Drought_Soil_Dry_P Parameter: Plant Line Value: WS
  misc_feature: MA Experiment 20001555 PARAMETER Experiment Name: At_Drought_Soil_Dry_P Parameter: Post Timepoint (hr) Value: None
  misc_feature: MA Experiment 20001555 PARAMETER Experiment Name: At_Drought_Soil_Dry_P Parameter: Post-Treatment Value: None
  misc_feature: MA Experiment 20001555 PARAMETER Experiment Name: At_Drought_Soil_Dry_P Parameter: Timepoint (day) Value: 10
  misc_feature: MA Experiment 20001555 PARAMETER Experiment Name: At_Drought_Soil_Dry_P Parameter: Treatment Value: Drought vs. No Drought
  misc_feature: MA Experiment ID: 20001559 Result: Down-regulated in Transcription
  misc_feature: MA Experiment 20001559 PARAMETER Experiment Name: At_Drought_Soil_Dry_P Parameter: Age (day) Value: 28
  misc_feature: MA Experiment 20001559 PARAMETER Experiment Name: At_Drought_Soil_Dry_P Parameter: Organism Value: A. thaliana
  misc_feature: MA Experiment 20001559 PARAMETER Experiment Name: At_Drought_Soil_Dry_P Parameter: Plant Line Value: WS
  misc_feature: MA Experiment 20001559 PARAMETER Experiment Name: At_Drought_Soil_Dry_P Parameter: Post Timepoint (hr) Value: 29
  misc_feature: MA Experiment 20001559 PARAMETER Experiment Name: At_Drought_Soil_Dry_P Parameter: Post-Treatment Value: Re-Water vs. No Drought
  misc_feature: MA Experiment 20001559 PARAMETER Experiment Name: At_Drought_Soil_Dry_P Parameter: Timepoint (day) Value: 14
  misc_feature: MA Experiment 20001559 PARAMETER Experiment Name: At_Drought_Soil_Dry_P Parameter: Treatment Value: Drought vs. No Drought
gcctatcattttgccaacgaacgttctttcttcttaatcacagctcagcctgacgcaaccgctcaggctgatctcttccaatttacagccatttcccagctcagatctctgatccggtgagatctctctcaaggaaaaggagttagagcatcatcaagatgaaggcactcattcttgttggaggcttcggcactcgcttgagaccattgactctcagtttcccaaagccccttgttgattttgctaataaacccatgatccttcatcagatagaggctcttaaggcagttggagttgatgaagtggttttggccatcaattatcagccagaggtgatgctgaacttcttgaaggactttgagaccaagctggaaatcaaaatcacttgctcacaagagaccgagccactaggtaccgctggtcctctggctctagcgagagacaaattgcttgatggatctggagagcccttctttgttcttaacagtgatgtgattagtgagtaccctcttaaagaaatgcttgagtttcacaaatctcacggtggggaagcctccataatggtaacaaaggtggatgaaccgtcgaaatatggagtggttgttatggaagaaagcactggaagagtggagaagtttgtggaaaagccaaaactgtatgtaggtaacaagatcaacgctgggatttatcttctgaacccatctgttcttgataagattgagctaagaccgacttcaatcgaaaaagagactttccctaagattgcagcagcgcaagggctctatgctatggtgctaccagggttttggatggacattgggcaaccccgtgactacataacgggtttgagactctacttagactcccttaggaagaaatctcctgccaaattaaccagtgggccacacatagttgggaatgttcttgttgacgaaaccgctacaattggggaaggatgtttgattggaccagacgttgccattggtccaggctgcattgttgagtcaggagtcagactctcccgatgcacggtcatgcgtggagtccgcatcaagaagcatgcgtgtatctcgagcagtatcatcgggtggcactcaacggttggtcaatgggccaggatcgagaacatgactatcctcggtgaggatgttcatgtgagcgatgagatctatagcaatggaggagttgttttgccacacaaggagatcaaatcaaacatcttgaagccagagatagtgatgtgaaaatgagatattatatgtgcaactttttttttttttttgtgtcctttcttcaactttgaaatcgctttcgtaattcttaatggcttttgaataagcatcaatcaaaacgctgtatatcttgttagggtcgtttgctgttttgtctctttttttgttttgtaatttataaaaaaatttattctcattcaaaaaaagg

SEQ ID NO: 76058 - protein, 361 aa, Arabidopsis thaliana; identical to SEQ ID NO: 24162
  peptide (1)..(361): Ceres Seq. ID no. 7103850
  misc_feature (2)..(236): Pfam Name: Nucleotidyl transferase Pfam Description: Nucleotidyl transferase
  misc_feature (1)..(361): Homolog of NCBI NO: 15225553 NR Description: GDP-mannose pyrophosphorylase; protein id: supported by cDNA: 37775., supported by cDNA: gi_13605662, by cDNA: gi_15982867, supported by cDNA: gi_16226304, supported
  misc_feature (1)..(361): Homolog of NCBI NO: 13509287 NR Description: GDP-mannose pyrophosphorylase [Arabidopsis
  misc_feature (1)..(361): Homolog of NCBI NO: 4103324 NR Description: GDP-mannose pyrophosphorylase [Solanum tuberosum]
  misc_feature (1)..(361): Homolog of NCBI NO: 34902046 NR Description: COG1208, GCD1, Nucleoside-diphosphate-sugar
  misc_feature (1)..(361): Homolog of NCBI NO: 14971013 NR Description: GDP-D-mannose pyrophosphorylase [Nicotiana
  misc_feature (1)..(361): Homolog of NCBI NO: 40253523 NR Description: putative GDP-mannose pyrophosphorylase [Oryza
  misc_feature (1)..(361): Homolog of NCBI NO: 34908274 NR Description: putative GDP-mannose pyrophosphorylase [Oryza
  misc_feature (1)..(361): Homolog of NCBI NO: 15233308 NR Description: mannose-1-phosphate guanylyltransferase-like
  misc_feature (1)..(345): Homolog of NCBI NO: 25317396 NR Description: GDP-mannose pyrophosphorylase like protein
  misc_feature (22)..(345): Homolog of NCBI NO: 15234771 NR Description: GDP-mannose pyrophosphorylase like protein;

SEQ ID NO: 76059 - protein, 329 aa, Arabidopsis thaliana; identical to SEQ ID NO: 24163
  peptide (1)..(329): Ceres Seq. ID no. 7103851
  misc_feature (1)..(204): Pfam Name: Nucleotidyl transferase Pfam Description: Nucleotidyl transferase
  misc_feature (1)..(329): Homolog of NCBI NO: 15225553 NR Description: GDP-mannose pyrophosphorylase; protein id: supported by cDNA: 37775., supported by cDNA: gi_13605662, by cDNA: gi_15982867, supported by cDNA: gi_16226304, supported
  misc_feature (1)..(329): Homolog of NCBI NO: 13509287 NR Description: GDP-mannose pyrophosphorylase [Arabidopsis
  misc_feature (1)..(329): Homolog of NCBI NO: 4103324 NR Description: GDP-mannose pyrophosphorylase [Solanum tuberosum]
  misc_feature (1)..(329): Homolog of NCBI NO: 34902046 NR Description: COG1208, GCD1, Nucleoside-diphosphate-sugar
  misc_feature (1)..(329): Homolog of NCBI NO: 14971013 NR Description: GDP-D-mannose pyrophosphorylase [Nicotiana
  misc_feature (1)..(329): Homolog of NCBI NO: 40253523 NR Description: putative GDP-mannose pyrophosphorylase [Oryza
  misc_feature (1)..(329): Homolog of NCBI NO: 34908274 NR Description: putative GDP-mannose pyrophosphorylase [Oryza
  misc_feature (1)..(329): Homolog of NCBI NO: 15233308 NR Description: mannose-1-phosphate guanylyltransferase-like
  misc_feature (1)..(313): Homolog of NCBI NO: 25317396 NR Description: GDP-mannose pyrophosphorylase like protein
  misc_feature (1)..(313): Homolog of NCBI NO: 15234771 NR Description: GDP-mannose pyrophosphorylase like protein;

SEQ ID NO: 76060 - protein, 302 aa, Arabidopsis thaliana; identical to SEQ ID NO: 24164
  peptide (1)..(302): Ceres Seq. ID no. 7103852
  misc_feature (1)..(177): Pfam Name: Nucleotidyl transferase Pfam Description: Nucleotidyl transferase
  misc_feature (1)..(302): Homolog of NCBI NO: 15225553 NR Description: GDP-mannose pyrophosphorylase; protein id: supported by cDNA: 37775., supported by cDNA: gi_13605662, by cDNA: gi_15982867, supported by cDNA: gi_16226304, supported
  misc_feature (1)..(302): Homolog of NCBI NO: 13509287 NR Description: GDP-mannose pyrophosphorylase [Arabidopsis
  misc_feature (1)..(302): Homolog of NCBI NO: 4103324 NR Description: GDP-mannose pyrophosphorylase [Solanum tuberosum]
  misc_feature (1)..(302): Homolog of NCBI NO: 34902046 NR Description: COG1208, GCD1, Nucleoside-diphosphate-sugar
  misc_feature (1)..(302): Homolog of NCBI NO: 14971013 NR Description: GDP-D-mannose pyrophosphorylase [Nicotiana
  misc_feature (1)..(302): Homolog of NCBI NO: 40253523 NR Description: putative GDP-mannose pyrophosphorylase [Oryza
  misc_feature (1)..(302): Homolog of NCBI NO: 34908274 NR Description: putative GDP-mannose pyrophosphorylase [Oryza
  misc_feature (1)..(302): Homolog of NCBI NO: 15233308 NR Description: mannose-1-phosphate guanylyltransferase-like
  misc_feature (1)..(286): Homolog of NCBI NO: 25317396 NR Description: GDP-mannose pyrophosphorylase like protein
  misc_feature (1)..(286): Homolog of NCBI NO: 15234771 NR Description: GDP-mannose pyrophosphorylase like protein;

SEQ ID NO: 76061 - DNA, 1611 bp, Arabidopsis thaliana
  misc_feature (1)..(1611): Ceres Seq. ID no. 7103950
  misc_feature: MA Experiment ID: 108569 Result: Up-regulated in Transcription
  misc_feature: MA Experiment 108569 PARAMETER Experiment Name: At_0.001%_MeJA__cDNA_P Parameter: Timepoint (hr) Value: 6
  misc_feature: MA Experiment 108569 PARAMETER Experiment Name: At_0.001%_MeJA__cDNA_P Parameter: Tissue Value: Aerial
  misc_feature: MA Experiment 108569 PARAMETER Experiment Name: At_0.001%_MeJA__cDNA_P Parameter: Treatment Value: 0.001% MeJA vs. No Treatment
  misc_feature: MA Experiment ID: 108574 Result: Up-regulated in Transcription
  misc_feature: MA Experiment 108574 PARAMETER Experiment Name: At_Wounding__cDNA_P Parameter: Timepoint (hr) Value: 1
  misc_feature: MA Experiment 108574 PARAMETER Experiment Name: At_Wounding__cDNA_P Parameter: Tissue Value: Aerial
  misc_feature: MA Experiment 108574 PARAMETER Experiment Name: At_Wounding__cDNA_P Parameter: Treatment Value: Wounding vs. No Wounding
  misc_feature: MA Experiment ID: 108576 Result: Down-regulated in Transcription
  misc_feature: MA Experiment 108576 PARAMETER Experiment Name: At_42deg_Heat_cDNA_P Parameter: Temperature (deg C) Value: 42 vs. 22
  misc_feature: MA Experiment 108576 PARAMETER Experiment Name: At_42deg_Heat_cDNA_P Parameter: Timepoint (hr) Value: 1
  misc_feature: MA Experiment 108576 PARAMETER Experiment Name: At_42deg_Heat_cDNA_P Parameter: Tissue Value: Aerial
  misc_feature: MA Experiment ID: 108577 Result: Down-regulated in Transcription
  misc_feature: MA Experiment 108577 PARAMETER Experiment Name: At_42deg_Heat_cDNA_P Parameter: Temperature (deg C) Value: 42 vs. 22
  misc_feature: MA Experiment 108577 PARAMETER Experiment Name: At_42deg_Heat_cDNA_P Parameter: Timepoint (hr) Value: 6
  misc_feature: MA Experiment 108577 PARAMETER Experiment Name: At_42deg_Heat_cDNA_P Parameter: Tissue Value: Aerial
  misc_feature: MA Experiment ID: 108579 Result: Up-regulated in Transcription
  misc_feature: MA Experiment 108579 PARAMETER Experiment Name: At_4deg_Cold_cDNA_P Parameter: Temperature (deg C) Value: 4 vs. 22
  misc_feature: MA Experiment 108579 PARAMETER Experiment Name: At_4deg_Cold_cDNA_P Parameter: Timepoint (hr) Value: 6
  misc_feature: MA Experiment 108579 PARAMETER Experiment Name: At_4deg_Cold_cDNA_P Parameter: Tissue Value: Aerial
  misc_feature: MA Experiment ID: 20000071 Result: Up-regulated in Transcription
  misc_feature: MA Experiment 20000071 PARAMETER Experiment Name: At_100uM_ABA_Mutants_cDNA_P Parameter: Plant Line Value: CS8104
  misc_feature: MA Experiment 20000071 PARAMETER Experiment Name: At_100uM_ABA_Mutants_cDNA_P Parameter: Timepoint (hr) Value: 6
  misc_feature: MA Experiment 20000071 PARAMETER Experiment Name: At_100uM_ABA_Mutants_cDNA_P Parameter: Tissue Value: Aerial
  misc_feature: MA Experiment 20000071 PARAMETER Experiment Name: At_100uM_ABA_Mutants_cDNA_P Parameter: Treatment Value: 100uM ABA vs. No Treatment
  misc_feature: MA Experiment ID: 20000088 Result: Up-regulated in Transcription
  misc_feature: MA Experiment 20000088 PARAMETER Experiment Name: At_100uM_ABA_Mutants_cDNA_P Parameter: Plant Line Value: Landsberg
  misc_feature: MA Experiment 20000088 PARAMETER Experiment Name: At_100uM_ABA_Mutants_cDNA_P Parameter: Timepoint (hr) Value: 6
  misc_feature: MA Experiment 20000088 PARAMETER Experiment Name: At_100uM_ABA_Mutants_cDNA_P Parameter: Tissue Value: Aerial
  misc_feature: MA Experiment 20000088 PARAMETER Experiment Name: At_100uM_ABA_Mutants_cDNA_P Parameter: Treatment Value: 100uM ABA vs. No Treatment
  misc_feature: MA Experiment ID: 20000166 Result: Up-regulated in Transcription
  misc_feature: MA Experiment 20000166 PARAMETER Experiment Name: At_100uM_ABA_P Parameter: Age (day) Value: 14
  misc_feature: MA Experiment 20000166 PARAMETER Experiment Name: At_100uM_ABA_P Parameter: Organism Value: A. thaliana
  misc_feature: MA Experiment 20000166 PARAMETER Experiment Name: At_100uM_ABA_P Parameter: Plant Line Value: WS
  misc_feature: MA Experiment 20000166 PARAMETER Experiment Name: At_100uM_ABA_P Parameter: Timepoint (hr) Value: 1
  misc_feature: MA Experiment 20000166 PARAMETER Experiment Name: At_100uM_ABA_P Parameter: Tissue Value: Aerial
  misc_feature: MA Experiment 20000166 PARAMETER Experiment Name: At_100uM_ABA_P Parameter: Treatment Value: 100uM ABA vs. No Treatment
  misc_feature: MA Experiment ID: 20000171 Result: Down-regulated in Transcription
  misc_feature: MA Experiment 20000171 PARAMETER Experiment Name: At_42deg_Heat_P Parameter: Age (day) Value: 14
  misc_feature: MA Experiment 20000171 PARAMETER Experiment Name: At_42deg_Heat_P Parameter: Organism Value: A. thaliana
  misc_feature: MA Experiment 20000171 PARAMETER Experiment Name: At_42deg_Heat_P Parameter: Plant Line Value: WS
  misc_feature: MA Experiment 20000171 PARAMETER Experiment Name: At_42deg_Heat_P Parameter: Temperature (deg C) Value: 42 vs. 22
  misc_feature: MA Experiment 20000171 PARAMETER Experiment Name: At_42deg_Heat_P Parameter: Timepoint (hr) Value: 1
  misc_feature: MA Experiment 20000171 PARAMETER Experiment Name: At_42deg_Heat_P Parameter: Tissue Value: Aerial
  misc_feature: MA Experiment ID: 20000180 Result: Up-regulated in Transcription
  misc_feature: MA Experiment 20000180 PARAMETER Experiment Name: At_Germinating_Seeds_P Parameter: Age (hr) Value: 24 vs. 0
  misc_feature: MA Experiment 20000180 PARAMETER Experiment Name: At_Germinating_Seeds_P Parameter: Tissue Value: Germinating Seeds
  misc_feature: MA Experiment ID: 20000184 Result: Down-regulated in Transcription
  misc_feature: MA Experiment 20000184 PARAMETER Experiment Name: At_Shoots__P Parameter: Age (day) Value: 7
  misc_feature: MA Experiment 20000184 PARAMETER Experiment Name: At_Shoots__P Parameter: Tissue Value: Shoots vs. Whole Plant
  misc_feature: MA Experiment ID: 20000185 Result: Down-regulated in Transcription
  misc_feature: MA Experiment 20000185 PARAMETER Experiment Name: At_Roots__P Parameter: Age (day) Value: 7 vs. 21
  misc_feature: MA Experiment 20000185 PARAMETER Experiment Name: At_Roots__P Parameter: Organism Value: A. thaliana
  misc_feature: MA Experiment 20000185 PARAMETER Experiment Name: At_Roots__P Parameter: Tissue Value: Roots vs. Whole Plant
  misc_feature: MA Experiment ID: 20000211 Result: Up-regulated in Transcription
  misc_feature: MA Experiment 20000211 PARAMETER Experiment Name: At_0.001percent_MeJA__P Parameter: Age (day) Value: 14
  misc_feature: MA Experiment 20000211 PARAMETER Experiment Name: At_0.001percent_MeJA__P Parameter: Organism Value: A. thaliana
  misc_feature: MA Experiment 20000211 PARAMETER Experiment Name: At_0.001percent_MeJA__P Parameter: Plant Line Value: WS
  misc_feature: MA Experiment 20000211 PARAMETER Experiment Name: At_0.001percent_MeJA__P Parameter: Timepoint (hr) Value: 1
  misc_feature: MA Experiment 20000211 PARAMETER Experiment Name: At_0.001percent_MeJA__P Parameter: Tissue Value: Aerial
  misc_feature: MA Experiment 20000211 PARAMETER Experiment Name: At_0.001percent_MeJA__P Parameter: Treatment Value: 0.001percent MeJA vs. No Treatment
  misc_feature: MA Experiment ID: 20000227 Result: Down-regulated in Transcription
  misc_feature: MA Experiment 20000227 PARAMETER Experiment Name: At_Root-Tips-vs-Tops_P Parameter: Tissue Value: Root Tips vs. Root Tops
  misc_feature: MA Experiment ID: 20000234 Result: Up-regulated in Transcription
  misc_feature: MA Experiment 20000234 PARAMETER Experiment Name: At_Siliques_P Parameter: Age (day) Value: 21
  misc_feature: MA Experiment 20000234 PARAMETER Experiment Name: At_Siliques_P Parameter: Organism Value: A. thaliana
  misc_feature: MA Experiment 20000234 PARAMETER Experiment Name: At_Siliques_P Parameter: Plant Line Value: WS
  misc_feature: MA Experiment 20000234 PARAMETER Experiment Name: At_Siliques_P Parameter: Tissue Value: Less Than 5mm Siliques vs. Whole Plant
  misc_feature: MA Experiment ID: 20000264 Result: Up-regulated in Transcription
  misc_feature: MA Experiment 20000264 PARAMETER Experiment Name: At_Open_Flower_P Parameter: Age (day) Value: 21
  misc_feature: MA Experiment 20000264 PARAMETER Experiment Name: At_Open_Flower_P Parameter: Plant Line Value: WS
  misc_feature: MA Experiment 20000264 PARAMETER Experiment Name: At_Open_Flower_P Parameter: Tissue Value: Open Flower vs. Whole Plant
  misc_feature: MA Experiment ID: 20000265 Result: Up-regulated in Transcription
  misc_feature: MA Experiment 20000265 PARAMETER Experiment Name: At_Open_Flower_P Parameter: Age (day) Value: 21
  misc_feature: MA Experiment 20000265 PARAMETER Experiment Name: At_Open_Flower_P Parameter: Plant Line Value: WS
  misc_feature: MA Experiment 20000265 PARAMETER Experiment Name: At_Open_Flower_P Parameter: Tissue Value: Closed Flower vs. Whole Plant
  misc_feature: MA Experiment ID: 20000268 Result: Up-regulated in Transcription
  misc_feature: MA Experiment 20000268 PARAMETER Experiment Name: At_100mM_NaCl__P Parameter: Age (day) Value: 14
  misc_feature: MA Experiment 20000268 PARAMETER Experiment Name: At_100mM_NaCl__P Parameter: Organism Value: A. thaliana
  misc_feature: MA Experiment 20000268 PARAMETER Experiment Name: At_100mM_NaCl__P Parameter: Plant Line Value: WS
  misc_feature: MA Experiment 20000268 PARAMETER Experiment Name: At_100mM_NaCl__P Parameter: Timepoint (hr) Value: 6
  misc_feature: MA Experiment 20000268 PARAMETER Experiment Name: At_100mM_NaCl__P Parameter: Tissue Value: Whole Plant
  misc_feature: MA Experiment 20000268 PARAMETER Experiment Name: At_100mM_NaCl__P Parameter: Treatment Value: 100mM NaCl vs. No Treatment
  misc_feature: MA Experiment ID: 20000286 Result: Up-regulated in Transcription
  misc_feature: MA Experiment 20000286 PARAMETER Experiment Name: At_Open_Flower_P Parameter: Age (day) Value: 21
  misc_feature: MA Experiment 20000286 PARAMETER Experiment Name: At_Open_Flower_P Parameter: Plant Line Value: WS
  misc_feature: MA Experiment 20000286 PARAMETER Experiment Name: At_Open_Flower_P Parameter: Tissue Value: Half Open vs. Whole Plant
  misc_feature: MA Experiment ID: 20000308 Result: Up-regulated in Transcription
  misc_feature: MA Experiment 20000308 PARAMETER Experiment Name: At_100mM_NaCl__P Parameter: Age (day) Value: 17
  misc_feature: MA Experiment 20000308 PARAMETER Experiment Name: At_100mM_NaCl__P Parameter: Organism Value: A. thaliana
  misc_feature: MA Experiment 20000308 PARAMETER Experiment Name: At_100mM_NaCl__P Parameter: Plant Line Value: WS
  misc_feature: MA Experiment 20000308 PARAMETER Experiment Name: At_100mM_NaCl__P Parameter: Timepoint (hr) Value: 72
  misc_feature: MA Experiment 20000308 PARAMETER Experiment Name: At_100mM_NaCl__P Parameter: Tissue Value: Whole Plant
  misc_feature: MA Experiment 20000308 PARAMETER Experiment Name: At_100mM_NaCl__P Parameter: Treatment Value: 100mM NaCl vs. No Treatment
  misc_feature: MA Experiment ID: 20000438 Result: Down-regulated in Transcription
  misc_feature: MA Experiment 20000438 PARAMETER Experiment Name: At_Shoots__P Parameter: Age (day) Value: 14
  misc_feature: MA Experiment 20000438 PARAMETER Experiment Name: At_Shoots__P Parameter: Tissue Value: Shoots vs. Whole Plant
  misc_feature: MA Experiment ID: 20000451 Result: Up-regulated in Transcription
  misc_feature: MA Experiment 20000451 PARAMETER Experiment Name: At_CS6879_Shoots-Roots_P Parameter: Age (day) Value: 14
  misc_feature: MA Experiment 20000451 PARAMETER Experiment Name: At_CS6879_Shoots-Roots_P Parameter: Organism Value: A. thaliana
  misc_feature: MA Experiment 20000451 PARAMETER Experiment Name: At_CS6879_Shoots-Roots_P Parameter: Plant Line Value: CS6879 vs. WS
  misc_feature: MA Experiment 20000451 PARAMETER Experiment Name: At_CS6879_Shoots-Roots_P Parameter: Tissue Value: Roots
  misc_feature: MA Experiment ID: 20000495 Result: Down-regulated in Transcription
  misc_feature: MA Experiment 20000495 PARAMETER Experiment Name: At_Guard_Cells_P Parameter: Harvest Date Value: 8/2/2002
  misc_feature: MA Experiment 20000495 PARAMETER Experiment Name: At_Guard_Cells_P Parameter: Organism Value: A. thaliana
  misc_feature: MA Experiment 20000495 PARAMETER Experiment Name: At_Guard_Cells_P Parameter: Tissue Value: Guard Cells vs. Leaves
  misc_feature: MA Experiment ID: 20000527 Result: Down-regulated in Transcription
  misc_feature: MA Experiment 20000527 PARAMETER Experiment Name: At_10percent_PEG_P Parameter: Age (day) Value: 20
  misc_feature: MA Experiment 20000527 PARAMETER Experiment Name: At_10percent_PEG_P Parameter: Organism Value: A. thaliana
  misc_feature: MA Experiment 20000527 PARAMETER Experiment Name: At_10percent_PEG_P Parameter: Plant Line Value: WS
  misc_feature: MA Experiment 20000527 PARAMETER Experiment Name: At_10percent_PEG_P Parameter: Timepoint (day) Value: 20
  misc_feature: MA Experiment 20000527 PARAMETER Experiment Name: At_10percent_PEG_P Parameter: Tissue Value: Whole Plant
  misc_feature: MA Experiment 20000527 PARAMETER Experiment Name: At_10percent_PEG_P Parameter: Treatment Value: 10percent PEG vs. No Treatment
  misc_feature: MA Experiment ID: 20000573 Result: Down-regulated in Transcription
  misc_feature: MA Experiment 20000573 PARAMETER Experiment Name: At_100uM_ABA_Mutants__P Parameter: Organism Value: A. thaliana
  misc_feature: MA Experiment 20000573 PARAMETER Experiment Name: At_100uM_ABA_Mutants__P Parameter: Plant Line Value: CS22 vs. Ler wt
  misc_feature: MA Experiment 20000573 PARAMETER Experiment Name: At_100uM_ABA_Mutants__P Parameter: Timepoint (hr) Value: N/A
  misc_feature: MA Experiment 20000573 PARAMETER Experiment Name: At_100uM_ABA_Mutants__P Parameter: Tissue Value: Whole Plant
  misc_feature: MA Experiment 20000573 PARAMETER Experiment Name: At_100uM_ABA_Mutants__P Parameter: Treatment Value: None
  misc_feature: MA Experiment ID: 20000574 Result: Down-regulated in Transcription
  misc_feature: MA Experiment 20000574 PARAMETER Experiment Name: At_100uM_ABA_Mutants__P Parameter: Organism Value: A. thaliana
  misc_feature: MA Experiment 20000574 PARAMETER Experiment Name: At_100uM_ABA_Mutants__P Parameter: Plant Line Value: CS23 vs. Ler wt
  misc_feature: MA Experiment 20000574 PARAMETER Experiment Name: At_100uM_ABA_Mutants__P Parameter: Timepoint (hr) Value: N/A
  misc_feature: MA Experiment 20000574 PARAMETER Experiment Name: At_100uM_ABA_Mutants__P Parameter: Tissue Value: Whole Plant
  misc_feature: MA Experiment 20000574 PARAMETER Experiment Name: At_100uM_ABA_Mutants__P Parameter: Treatment Value: None
  misc_feature: MA Experiment ID: 20001248 Result: Down-regulated in Transcription
  misc_feature: MA Experiment 20001248 PARAMETER Experiment Name: At_Far-red-induction_P Parameter: Age (day) Value: 7
  misc_feature: MA Experiment 20001248 PARAMETER Experiment Name: At_Far-red-induction_P Parameter: Light Value: Far-red vs. White
  misc_feature: MA Experiment 20001248 PARAMETER Experiment Name: At_Far-red-induction_P Parameter: Organism Value: A. thaliana
  misc_feature: MA Experiment 20001248 PARAMETER Experiment Name: At_Far-red-induction_P Parameter: Plant Line Value: Columbia
  misc_feature: MA Experiment 20001248 PARAMETER Experiment Name: At_Far-red-induction_P Parameter: Timepoint (hr) Value: 4
  misc_feature: MA Experiment 20001248 PARAMETER Experiment Name: At_Far-red-induction_P Parameter: Tissue Value: Whole Plant
  misc_feature: MA Experiment ID: 20001450 Result: Down-regulated in Transcription
  misc_feature: MA Experiment 20001450 PARAMETER Experiment Name: At_Far-red-induction_P Parameter: Age (day) Value: 7
  misc_feature: MA Experiment 20001450 PARAMETER Experiment Name: At_Far-red-induction_P Parameter: Light Value: Far-red vs. White
  misc_feature: MA Experiment 20001450 PARAMETER Experiment Name: At_Far-red-induction_P Parameter: Organism Value: A. thaliana
  misc_feature: MA Experiment 20001450 PARAMETER Experiment Name: At_Far-red-induction_P Parameter: Plant Line Value: Columbia
  misc_feature: MA Experiment 20001450 PARAMETER Experiment Name: At_Far-red-induction_P Parameter: Timepoint (hr) Value: 8
  misc_feature: MA Experiment 20001450 PARAMETER Experiment Name: At_Far-red-induction_P Parameter: Tissue Value: Whole Plant
  misc_feature: MA Experiment ID: 20001451 Result: Down-regulated in Transcription
  misc_feature: MA Experiment 20001451 PARAMETER Experiment Name: At_Far-red-induction_P Parameter: Age (day) Value: 7
  misc_feature: MA Experiment 20001451 PARAMETER Experiment Name: At_Far-red-induction_P Parameter: Light Value: Far-red vs. White
  misc_feature: MA Experiment 20001451 PARAMETER Experiment Name: At_Far-red-induction_P Parameter: Organism Value: A. thaliana
  misc_feature: MA Experiment 20001451 PARAMETER Experiment Name: At_Far-red-induction_P Parameter: Plant Line Value: Columbia
  misc_feature: MA Experiment 20001451 PARAMETER Experiment Name: At_Far-red-induction_P Parameter: Timepoint (hr) Value: 24
  misc_feature: MA Experiment 20001451 PARAMETER Experiment Name: At_Far-red-induction_P Parameter: Tissue Value: Whole Plant
  misc_feature: MA Experiment ID: 20001503 Result: Up-regulated in Transcription
  misc_feature: MA Experiment 20001503 PARAMETER Experiment Name: At_Far-red-enriched_P Parameter: Age (day) Value: 7
  misc_feature: MA Experiment 20001503 PARAMETER Experiment Name: At_Far-red-enriched_P Parameter: Light Value: Far-red enriched vs. White
  misc_feature: MA Experiment 20001503 PARAMETER Experiment Name: At_Far-red-enriched_P Parameter: Organism Value: A. thaliana
  misc_feature: MA Experiment 20001503 PARAMETER Experiment Name: At_Far-red-enriched_P Parameter: Plant Line Value: Columbia
  misc_feature: MA Experiment 20001503 PARAMETER Experiment Name: At_Far-red-enriched_P Parameter: Timepoint (day) Value: 3
  misc_feature: MA Experiment 20001503 PARAMETER Experiment Name: At_Far-red-enriched_P Parameter: Tissue Value: Whole Plant
  misc_feature: MA Experiment ID: 20001557 Result: Up-regulated in Transcription
  misc_feature: MA Experiment 20001557 PARAMETER Experiment Name: At_Drought_Soil_Dry_P Parameter: Age (day) Value: 27
  misc_feature: MA Experiment 20001557 PARAMETER Experiment Name: At_Drought_Soil_Dry_P Parameter: Organism Value: A. thaliana
  misc_feature: MA Experiment 20001557 PARAMETER Experiment Name: At_Drought_Soil_Dry_P Parameter: Plant Line Value: WS
  misc_feature: MA Experiment 20001557 PARAMETER Experiment Name: At_Drought_Soil_Dry_P Parameter: Post Timepoint (hr) Value: 3
  misc_feature: MA Experiment 20001557 PARAMETER Experiment Name: At_Drought_Soil_Dry_P Parameter: Post-Treatment Value: Re-Water vs. No Drought
  misc_feature: MA Experiment 20001557 PARAMETER Experiment Name: At_Drought_Soil_Dry_P Parameter: Timepoint (day) Value: 13
  misc_feature: MA Experiment 20001557 PARAMETER Experiment Name: At_Drought_Soil_Dry_P Parameter: Treatment Value: Drought vs. No Drought
  misc_feature: MA Experiment ID: 20001559 Result: Up-regulated in Transcription
  misc_feature: MA Experiment 20001559 PARAMETER Experiment Name: At_Drought_Soil_Dry_P Parameter: Age (day) Value: 28
  misc_feature: MA Experiment 20001559 PARAMETER Experiment Name: At_Drought_Soil_Dry_P Parameter: Organism Value: A. thaliana
  misc_feature: MA Experiment 20001559 PARAMETER Experiment Name: At_Drought_Soil_Dry_P Parameter: Plant Line Value: WS
  misc_feature: MA Experiment 20001559 PARAMETER Experiment Name: At_Drought_Soil_Dry_P Parameter: Post Timepoint (hr) Value: 29
  misc_feature: MA Experiment 20001559 PARAMETER Experiment Name: At_Drought_Soil_Dry_P Parameter: Post-Treatment Value: Re-Water vs. No Drought
  misc_feature: MA Experiment 20001559 PARAMETER Experiment Name: At_Drought_Soil_Dry_P Parameter: Timepoint (day) Value: 14
  misc_feature: MA Experiment 20001559 PARAMETER Experiment Name: At_Drought_Soil_Dry_P Parameter: Treatment Value: Drought vs. No Drought
  misc_feature: Pfam Name: UDPGT Pfam Description: UDP-glucoronosyl and UDP-glucosyl transferase
aaagcataatagagatacaaagaaacaagaaaacgaaaggaaaaaatacagaaatgggtggtttgaagtttcatgtacttatgtatccatggttcgcaacaggccatatgaccccgttcctttttcttgccaacaaattggctgagaaaggtcatacggtcacttttttgattcccaagaaagctctgaaacagttggaaaatctcaatctgtttccacacaacattgcctttcgctctgtcaccgtccctcatgtggatggtctccccgttggcacagagacagtctctgagatccccgtgacatcagctgatctcttgatgtctgctatggatctcacacgtgatcaagttgaaggtgtggtccgagccgtggaaccggacctgatcttctttgacttcgctcattggattccagaggtagctagagactttggccttaagactgtaaagtacgtcgtggtatctgcatcgactatagctagtatgcttgttccaggtggtgagttaggtgttcctccgccgggatatccttcatcgaaggtgctgcttcgtaaacaagatgcttacaccatgaagaatctggagtctacaaatacaatcaatgtcggaccaaacttattggaaagagtcactacaagtcttatgaactctgatgtcattgcgataaggacagccagagaaatcgaaggaaacttttgcgactatatcgaaaaacattgcaggaaaaaggttctcttgacaggtccggtgttccctgagccagacaagactagagagctagaggaacgatgggttaagtggctaagtgggtatgaaccagactcagtggtgttttgtgcgttgggctcacaagtcattttagagaaagatcaattccaagaactctgcttaggaatggagctaacaggttcaccgtttcttgtagcggttaagccacctagaggctcatcaacgattcaagaagcacttcctgaaggattcgaggagagggttaaaggaagaggagttgtttggggagaatgggttcaacaaccattgctattgtctcatccatcagtcgggtgctttgtgagccattgtgggtttggatcaatgtgggagtctttgctgagtgattgtcagatagtcttggtaccacagttgggtgatcaggtcctcaacacaagattgctgagtgacgaactcaaggtttcggttgaagtggcaagagaggaaacaggatggttctcgaaagagagcttgttcgatgctatcaatagtgtgatgaaaagggacagtgagatcgggaatctggtgaagaagaatcacaccaagtggagggagacactaactagtcctggacttgtgaccggttatgtcgagggggtgagagagtcaaaagcaggatcttgtctctgtgaccaaccatgtttcgaagtagaagggagtgatcaataaggttggtacaaaccaaactatatatcttgaagtgcttctgtttccaagtgtgtttttgtttgtttgtatcatgtttctaagtagcagtaggggatttataaggttttataaaccaaaccttacttgaagtacctctgttttccctagttggctttataataatgtgtttcgt

SEQ ID NO: 76062 - protein, 478 aa, Arabidopsis thaliana
  peptide (1)..(478): Ceres Seq. ID no. 7103951
  misc_feature: Pfam Name: UDPGT Pfam Description: UDP-glucoronosyl and UDP-glucosyl transferase
  misc_feature (18)..(478): Homolog of NCBI NO: 15982889 NR Description: AT4g27560/T29A15_50 [Arabidopsis thaliana]
  misc_feature (18)..(459): Homolog of NCBI NO: 15234195 NR Description: UDP rhamnose-anthocyanidin-3-glucoside
  misc_feature (27)..(459): Homolog of NCBI NO: 21593514 NR Description: UDP rhamnose-anthocyanidin-3-glucoside
  misc_feature (18)..(459): Homolog of NCBI NO: 15234196 NR Description: UDP rhamnose--anthocyanidin-3-glucoside
  misc_feature (20)..(454): Homolog of NCBI NO: 15239523 NR Description: flavonol 3-O-glucosyltransferase-like protein; id: At5g53990.1, supported by cDNA: gi_17529305, supported by gi_20465446 [Arabidopsis thaliana] >gi|10177261|dbj|BAB10729.1|
  misc_feature (20)..(454): Homolog of NCBI NO: 15217796 NR Description: anthocyanidin-3-glucoside rhamnosyltransferase, protein id: At1g64920.1 [Arabidopsis thaliana]
  misc_feature (22)..(459): Homolog of NCBI NO: 15233903 NR Description: putative protein; protein id: At4g09500.1
  misc_feature (20)..(454): Homolog of NCBI NO: 15217773 NR Description: rhamnosyltransferase, putative; protein id:
  misc_feature (20)..(453): Homolog of NCBI NO: 15239525 NR Description: flavonol 3-O-glucosyltransferase-like protein;
  misc_feature (23)..(454): Homolog of NCBI NO: 15227766 NR Description: putative flavonol 3-O-glucosyltransferase;
SIIEIQRNKKTKGKNTEMGGLKFHVLMYPWFATGHMTPFLFLANKLAEKGHTVTFLIPKKALKQLENLNLFPHNIAFRSVTVPHVDGLPVGTETVSEIPVTSADLLMSAMDLTRDQVEGVVRAVEPDLIFFDFAHWIPEVARDFGLKTVKYVVVSASTIASMLVPGGELGVPPPGYPSSKVLLRKQDAYTMKNLESTNTINVGPNLLERVTTSLMNSDVIAIRTAREIEGNFCDYIEKHCRKKVLLTGPVFPEPDKTRELEERWVKWLSGYEPDSVVFCALGSQVILEKDQFQELCLGMELTGSPFLVAVKPPRGSSTIQEALPEGFEERVKGRGVVWGEWVQQPLLLSHPSVGCFVSHCGFGSMWESLLSDCQIVLVPQLGDQVLNTRLLSDELKVSVEVAREETGWFSKESLFDAINSVMKRDSEIGNLVKKNHTKWRETLTSPGLVTGYVEGVRESKAGSCLCDQPCFEVEGSDQ

SEQ ID NO: 76063 - protein, 461 aa, Arabidopsis thaliana
  peptide (1)..(461): Ceres Seq. ID no. 7103952
  misc_feature: Pfam Name: UDPGT Pfam Description: UDP-glucoronosyl and UDP-glucosyl transferase
  misc_feature (1)..(461): Homolog of NCBI NO: 15982889 NR Description: AT4g27560/T29A15_50 [Arabidopsis thaliana]
  misc_feature (1)..(442): Homolog of NCBI NO: 15234195 NR Description: UDP rhamnose-anthocyanidin-3-glucoside
  misc_feature (10)..(442): Homolog of NCBI NO: 21593514 NR Description: UDP rhamnose-anthocyanidin-3-glucoside
  misc_feature (1)..(442): Homolog of NCBI NO: 15234196 NR Description: UDP rhamnose--anthocyanidin-3-glucoside
  misc_feature (3)..(437): Homolog of NCBI NO: 15239523 NR Description: flavonol 3-O-glucosyltransferase-like protein; id: At5g53990.1, supported by cDNA: gi_17529305, supported by gi_20465446 [Arabidopsis thaliana] >gi|10177261|dbj|BAB10729.1|
  misc_feature (3)..(437): Homolog of NCBI NO: 15217796 NR Description: anthocyanidin-3-glucoside rhamnosyltransferase, protein id: At1g64920.1 [Arabidopsis thaliana]
  misc_feature (5)..(442): Homolog of NCBI NO: 15233903 NR Description: putative protein; protein id: At4g09500.1
  misc_feature (3)..(437): Homolog of NCBI NO: 15217773 NR Description: rhamnosyltransferase, putative; protein id:
  misc_feature (3)..(436): Homolog of NCBI NO: 15239525 NR Description: flavonol 3-O-glucosyltransferase-like protein;
  misc_feature (6)..(437): Homolog of NCBI NO: 15227766 NR Description: putative flavonol 3-O-glucosyltransferase;
MGGLKFHVLMYPWFATGHMTPFLFLANKLAEKGHTVTFLIPKKALKQLENLNLFPHNIAFRSVTVPHVDGLPVGTETVSEIPVTSADLLMSAMDLTRDQVEGVVRAVEPDLIFFDFAHWIPEVARDFGLKTVKYVVVSASTIASMLVPGGELGVPPPGYPSSKVLLRKQDAYTMKNLESTNTINVGPNLLERVTTSLMNSDVIAIRTAREIEGNFCDYIEKHCRKKVLLTGPVFPEPDKTRELEERWVKWLSGYEPDSVVFCALGSQVILEKDQFQELCLGMELTGSPFLVAVKPPRGSSTIQEALPEGFEERVKGRGVVWGEWVQQPLLLSHPSVGCFVSHCGFGSMWESLLSDCQIVLVPQLGDQVLNTRLLSDELKVSVEVAREETGWFSKESLFDAINSVMKRDSEIGNLVKKNHTKWRETLTSPGLVTGYVEGVRESKAGSCLCDQPCFEVEGSDQ

SEQ ID NO: 76064 - protein, 452 aa, Arabidopsis thaliana
  peptide (1)..(452): Ceres Seq. ID no. 7103953
  misc_feature: Pfam Name: UDPGT Pfam Description: UDP-glucoronosyl and UDP-glucosyl transferase
  misc_feature (1)..(452): Homolog of NCBI NO: 15982889 NR Description: AT4g27560/T29A15_50 [Arabidopsis thaliana]
  misc_feature (1)..(433): Homolog of NCBI NO: 15234195 NR Description: UDP rhamnose-anthocyanidin-3-glucoside
  misc_feature (1)..(433): Homolog of NCBI NO: 21593514 NR Description: UDP rhamnose-anthocyanidin-3-glucoside
  misc_feature (1)..(433): Homolog of NCBI NO: 15234196 NR Description: UDP rhamnose--anthocyanidin-3-glucoside
  misc_feature (1)..(428): Homolog of NCBI NO: 15239523 NR Description: flavonol 3-O-glucosyltransferase-like protein; id: At5g53990.1, supported by cDNA: gi_17529305, supported by gi_20465446 [Arabidopsis thaliana] >gi|10177261|dbj|BAB10729.1|
  misc_feature (1)..(428): Homolog of NCBI NO: 15217796 NR Description: anthocyanidin-3-glucoside rhamnosyltransferase, protein id: At1g64920.1 [Arabidopsis thaliana]
  misc_feature (1)..(433): Homolog of NCBI NO: 15233903 NR Description: putative protein; protein id: At4g09500.1
  misc_feature (1)..(428): Homolog of NCBI NO: 15217773 NR Description: rhamnosyltransferase, putative; protein id:
  misc_feature (1)..(427): Homolog of NCBI NO: 15239525 NR Description: flavonol 3-O-glucosyltransferase-like protein;
  misc_feature (1)..(428): Homolog of NCBI NO: 15227766 NR Description: putative flavonol 3-O-glucosyltransferase;
MYPWFATGHMTPFLFLANKLAEKGHTVTFLIPKKALKQLENLNLFPHNIAFRSVTVPHVDGLPVGTETVSEIPVTSADLLMSAMDLTRDQVEGVVRAVEPDLIFFDFAHWIPEVARDFGLKTVKYVVVSASTIASMLVPGGELGVPPPGYPSSKVLLRKQDAYTMKNLESTNTINVGPNLLERVTTSLMNSDVIAIRTAREIEGNFCDYIEKHCRKKVLLTGPVFPEPDKTRELEERWVKWLSGYEPDSVVFCALGSQVILEKDQFQELCLGMELTGSPFLVAVKPPRGSSTIQEALPEGFEERVKGRGVVWGEWVQQPLLLSHPSVGCFVSHCGFGSMWESLLSDCQIVLVPQLGDQVLNTRLLSDELKVSVEVAREETGWFSKESLFDAINSVMKRDSEIGNLVKKNHTKWRETLTSPGLVTGYVEGVRESKAGSCLCDQPCFEVEGSDQ

SEQ ID NO: 76065 - DNA, 1048 bp, Arabidopsis thaliana
  misc_feature (1)..(1048): Ceres Seq. ID no. 7104730
  misc_feature: MA Experiment ID: 20000169 Result: Up-regulated in Transcription
  misc_feature: MA Experiment 20000169 PARAMETER Experiment Name: At_100uM_ABA_P Parameter: Age (day) Value: 14
  misc_feature: MA Experiment 20000169 PARAMETER Experiment Name: At_100uM_ABA_P Parameter: Organism Value: A. thaliana
  misc_feature: MA Experiment 20000169 PARAMETER Experiment Name: At_100uM_ABA_P Parameter: Plant Line Value: WS
  misc_feature: MA Experiment 20000169 PARAMETER Experiment Name: At_100uM_ABA_P Parameter: Timepoint (hr) Value: 6
  misc_feature: MA Experiment 20000169 PARAMETER Experiment Name: At_100uM_ABA_P Parameter: Tissue Value: Aerial
  misc_feature: MA Experiment 20000169 PARAMETER Experiment Name: At_100uM_ABA_P Parameter: Treatment Value: 100uM ABA vs. No Treatment
  misc_feature: MA Experiment ID: 20000267 Result: Up-regulated in Transcription
  misc_feature: MA Experiment 20000267 PARAMETER Experiment Name: At_Drought_P Parameter: Age (day) Value: 7
  misc_feature: MA Experiment 20000267 PARAMETER Experiment Name: At_Drought_P Parameter: Organism Value: A. thaliana
  misc_feature: MA Experiment 20000267 PARAMETER Experiment Name: At_Drought_P Parameter: Plant Line Value: WS
  misc_feature: MA Experiment 20000267 PARAMETER Experiment Name: At_Drought_P Parameter: Timepoint (hr) Value: 6
  misc_feature: MA Experiment 20000267 PARAMETER Experiment Name: At_Drought_P Parameter: Tissue Value: Whole Plant
  misc_feature: MA Experiment 20000267 PARAMETER Experiment Name: At_Drought_P Parameter: Treatment Value: Drought vs. No Drought
  misc_feature: MA Experiment ID: 20000436 Result: Up-regulated in Transcription
  misc_feature: MA Experiment 20000436 PARAMETER Experiment Name: At_Drought_P Parameter: Age (day) Value: 7
  misc_feature: MA Experiment 20000436 PARAMETER Experiment Name: At_Drought_P Parameter: Organism Value: A. thaliana
  misc_feature: MA Experiment 20000436 PARAMETER Experiment Name: At_Drought_P Parameter: Plant Line Value: WS
  misc_feature: MA Experiment 20000436 PARAMETER Experiment Name: At_Drought_P Parameter: Timepoint (hr) Value: 12
  misc_feature: MA Experiment 20000436 PARAMETER Experiment Name: At_Drought_P Parameter: Tissue Value: Whole Plant
  misc_feature: MA Experiment 20000436 PARAMETER Experiment Name: At_Drought_P Parameter: Treatment Value: Drought vs. No Drought
  misc_feature: MA Experiment ID: 20000437 Result: Up-regulated in Transcription
  misc_feature: MA Experiment 20000437 PARAMETER Experiment Name: At_Drought_P Parameter: Age (day) Value: 8
  misc_feature: MA Experiment 20000437 PARAMETER Experiment Name: At_Drought_P Parameter: Organism Value: A. thaliana
  misc_feature: MA Experiment 20000437 PARAMETER Experiment Name: At_Drought_P Parameter: Plant Line Value: WS
  misc_feature: MA Experiment 20000437 PARAMETER Experiment Name: At_Drought_P Parameter: Timepoint (hr) Value: 24
  misc_feature: MA Experiment 20000437 PARAMETER Experiment Name: At_Drought_P Parameter: Tissue Value: Whole Plant
  misc_feature: MA Experiment 20000437 PARAMETER Experiment Name: At_Drought_P Parameter: Treatment Value: Drought vs. No Drought
  misc_feature: MA Experiment ID: 20000438 Result: Down-regulated in Transcription
  misc_feature: MA Experiment 20000438 PARAMETER Experiment Name: At_Shoots__P Parameter: Age (day) Value: 14
  misc_feature: MA Experiment 20000438 PARAMETER Experiment Name: At_Shoots__P Parameter: Tissue Value: Shoots vs. Whole Plant
  misc_feature: MA Experiment ID: 20000439 Result: Up-regulated in Transcription
  misc_feature: MA Experiment 20000439 PARAMETER Experiment Name: At_Roots__P Parameter: Age (day) Value: 14 vs. 21
  misc_feature: MA Experiment 20000439 PARAMETER Experiment Name: At_Roots__P Parameter: Organism Value: A. thaliana
  misc_feature: MA Experiment 20000439 PARAMETER Experiment Name: At_Roots__P Parameter: Tissue Value: Roots vs. Whole Plant
  misc_feature: MA Experiment ID: 20000441 Result: Down-regulated in Transcription
  misc_feature: MA Experiment 20000441 PARAMETER Experiment Name: At_1uM_BR-BRZ__P Parameter: Tissue Value: Shoot Apices
  misc_feature: MA Experiment 20000441 PARAMETER Experiment Name: At_1uM_BR-BRZ__P Parameter: Treatment Value: 1uM BR vs. No Treatment
  misc_feature: MA Experiment ID: 20000443 Result: Down-regulated in Transcription
  misc_feature: MA Experiment 20000443 PARAMETER Experiment Name: At_1uM_BR-BRZ__P Parameter: Tissue Value: Shoot Apices
  misc_feature: MA Experiment 20000443 PARAMETER Experiment Name: At_1uM_BR-BRZ__P Parameter: Treatment Value: 1uM BRZ vs. No Treatment
  misc_feature: MA Experiment ID: 20000453 Result: Up-regulated in Transcription
  misc_feature: MA Experiment 20000453 PARAMETER Experiment Name: At_100uM_ABA_P Parameter: Age (day) Value: 15
  misc_feature: MA Experiment 20000453 PARAMETER Experiment Name: At_100uM_ABA_P Parameter: Organism Value: A. thaliana
  misc_feature: MA Experiment 20000453 PARAMETER Experiment Name: At_100uM_ABA_P Parameter: Plant Line Value: WS
  misc_feature: MA Experiment 20000453 PARAMETER Experiment Name: At_100uM_ABA_P Parameter: Timepoint (hr) Value: 24
  misc_feature: MA Experiment 20000453 PARAMETER Experiment Name: At_100uM_ABA_P Parameter: Tissue Value: Aerial
  misc_feature: MA Experiment 20000453 PARAMETER Experiment Name: At_100uM_ABA_P Parameter: Treatment Value: 100uM ABA vs. No Treatment
  misc_feature: MA Experiment ID: 20000794 Result: Up-regulated in Transcription
  misc_feature: MA Experiment 20000794 PARAMETER Experiment Name: At_Petals_P Parameter: Age (day) Value: 23-25 days
  misc_feature: MA Experiment 20000794 PARAMETER Experiment Name: At_Petals_P Parameter: Plant Line Value: WS
  misc_feature: MA Experiment 20000794 PARAMETER Experiment Name: At_Petals_P Parameter: Tissue Value: Petals vs. Whole plant
  misc_feature: MA Experiment ID: 20001554 Result: Up-regulated in Transcription
  misc_feature: MA Experiment 20001554 PARAMETER Experiment Name: At_Drought_Soil_Dry_P Parameter: Age (day) Value: 21
  misc_feature: MA Experiment 20001554 PARAMETER Experiment Name: At_Drought_Soil_Dry_P Parameter: Organism Value: A. thaliana
  misc_feature: MA Experiment 20001554 PARAMETER Experiment Name: At_Drought_Soil_Dry_P Parameter: Plant Line Value: WS
  misc_feature: MA Experiment 20001554 PARAMETER Experiment Name: At_Drought_Soil_Dry_P Parameter: Post Timepoint (hr) Value: None
  misc_feature: MA Experiment 20001554 PARAMETER Experiment Name: At_Drought_Soil_Dry_P Parameter: Post-Treatment Value: None
  misc_feature: MA Experiment 20001554 PARAMETER Experiment Name: At_Drought_Soil_Dry_P Parameter: Timepoint (day) Value: 7
  misc_feature: MA Experiment 20001554 PARAMETER Experiment Name: At_Drought_Soil_Dry_P Parameter: Treatment Value: Drought vs. No Drought
  misc_feature: MA Experiment ID: 20001556 Result: Up-regulated in Transcription
  misc_feature: MA Experiment 20001556 PARAMETER Experiment Name: At_Drought_Soil_Dry_P Parameter: Age (day) Value: 26
  misc_feature: MA Experiment 20001556 PARAMETER Experiment Name: At_Drought_Soil_Dry_P Parameter: Organism Value: A. thaliana
  misc_feature: MA Experiment 20001556 PARAMETER Experiment Name: At_Drought_Soil_Dry_P Parameter: Plant Line Value: WS
  misc_feature: MA Experiment 20001556 PARAMETER Experiment Name: At_Drought_Soil_Dry_P Parameter: Post Timepoint (hr) Value: None
  misc_feature: MA Experiment 20001556 PARAMETER Experiment Name: At_Drought_Soil_Dry_P Parameter: Post-Treatment Value: None
  misc_feature: MA Experiment 20001556 PARAMETER Experiment Name: At_Drought_Soil_Dry_P Parameter: Timepoint (day) Value: 12
  misc_feature: MA Experiment 20001556 PARAMETER Experiment Name: At_Drought_Soil_Dry_P Parameter: Treatment Value: Drought vs. No Drought
  misc_feature: MA Experiment ID: 20001904 Result: Up-regulated in Transcription
  misc_feature: MA Experiment 20001904 PARAMETER Experiment Name: At_Drought_Reproduction_P Parameter: Age (day) Value: 37
  misc_feature: MA Experiment 20001904 PARAMETER Experiment Name: At_Drought_Reproduction_P Parameter: Organism Value: A. thaliana
  misc_feature: MA Experiment 20001904 PARAMETER Experiment Name: At_Drought_Reproduction_P Parameter: Plant Line Value: WS
  misc_feature: MA Experiment 20001904 PARAMETER Experiment Name: At_Drought_Reproduction_P Parameter: Timepoint (day) Value: 7
  misc_feature: MA Experiment 20001904 PARAMETER Experiment Name: At_Drought_Reproduction_P Parameter: Tissue Value: Rosettes
  misc_feature: MA Experiment 20001904 PARAMETER Experiment Name: At_Drought_Reproduction_P Parameter: Treatment Value: Drought vs. No Drought
  misc_feature: MA Experiment ID: 20001906 Result: Up-regulated in Transcription
  misc_feature: MA Experiment 20001906 PARAMETER Experiment Name: At_Drought_Reproduction_P Parameter: Age (day) Value: 35
  misc_feature: MA Experiment 20001906 PARAMETER Experiment Name: At_Drought_Reproduction_P Parameter: Organism Value: A. thaliana
  misc_feature: MA Experiment 20001906 PARAMETER Experiment Name: At_Drought_Reproduction_P Parameter: Plant Line Value: WS
  misc_feature: MA Experiment 20001906 PARAMETER Experiment Name: At_Drought_Reproduction_P Parameter: Timepoint (day) Value: 5
  misc_feature: MA Experiment 20001906 PARAMETER Experiment Name: At_Drought_Reproduction_P Parameter: Tissue Value: Siliques
  misc_feature: MA Experiment 20001906 PARAMETER Experiment Name: At_Drought_Reproduction_P Parameter: Treatment Value: Drought vs. No Drought
tcgattggccaaatcggccctcgagatttattttcacgacggacgcacaatcttgaacaatattatggaggagaaggaatcaaatgataggataaagaagctagaatctgacatagtgattcacattgggaaacaagaagcagaacttgcattgaaagtaaacagtgcagctttccaaggagatttttaccagcttaagagcttaatccgatctggagccgatcctaacaaaaccgattacgatggaagatcaccgcttcatcttgcagcatgtagaggctatgaagacattacattattccttattcaggaaggtgttgatgtcaatctaaaagataagttcggacacacaccattgtttgaggctgtgaaagcaggacaagaaggagtgattggtttgcttgtcaaagaaggagcctcctttaatttagaagattcaggaaacttcctttgcacgacagttgctaaaggcgactctgattttctcaagagattgctttcaagcggtatgaacccaaacagtgaagattatgatcacagaacgccgcttcatgtcgcggcttctgaagggttattcttgatggctaaaatgttggttgaagctggagcaagcgttatttctaaagaccgatgggggaattctccgcttgatgaagcccgattgtgcggaaacaagaaactgattaagttactcgaagatgtgaaaaatgctcagtcgtctatctacccgtcaagcttgcgtgaattacaagaggagagaattgagagacggaaatgcacggtgtttccattccacccgcaagaggcgaaagaagagcgtagtagaaagcacggagttgtggtttggatcccaagcaatctcgagaaactcatagtaaccgctgcgaaagagctagggctatcggatggagcctcatttgtactattatcagaagaccaaggtcgtatcacagacattgatatgattagtgatggacacaaattgtatatgatcagtgatactactgatcaaacataatgatggactcttcgatttttccgatgatcc

SEQ ID NO: 76066 - protein, 338 aa, Arabidopsis thaliana
  peptide (1)..(338): Ceres Seq. ID no. 7104731
  misc_feature (81)..(113): Pfam Name: Ankyrin repeat Pfam Description: Ankyrin repeat
  misc_feature (7)..(338): Homolog of NCBI NO: 30693099 NR Description: guard cell outward rectifying K+ channel (GORK)
  misc_feature (7)..(338): Homolog of NCBI NO: 11414742 NR Description: guard cell outward rectifying K+ channel
  misc_feature (22)..(338): Homolog of NCBI NO: 15146306 NR Description: AT5g37500/mpa22_p_30 [Arabidopsis thaliana]
  misc_feature (7)..(334): Homolog of NCBI NO: 15232991 NR Description: stelar K+ outward rectifying channel (SKOR); id: At3g02850.1 [Arabidopsis thaliana] stelar K+ outward rectifying channel (SKOR) [Arabidopsis
  misc_feature (7)..(334): Homolog of NCBI NO: 3810676 NR Description: SKOR [Arabidopsis thaliana]
  misc_feature (7)..(334): Homolog of NCBI NO: 25295800 NR Description: potassium channel protein SKOR [validated] - thaliana >gi|3641845|emb|CAA11281.1| stelar K+ outward rectifying
  misc_feature (7)..(336): Homolog of NCBI NO: 27651624 NR Description: shaker-like potassium channel [Vitis vinifera]
  misc_feature (7)..(327): Homolog of NCBI NO: 10443349 NR Description: outwardly rectifying potassium channel [Samanea
  misc_feature (7)..(333): Homolog of NCBI NO: 9955728 NR Description: outward rectifying potassium channel [Populus
  misc_feature (5)..(240): Homolog of NCBI NO: 38344540 NR Description: OSJNBa0027P08.8 [Oryza sativa (japonica
RLAKSALEIYFHDGRTILNNIMEEKESNDRIKKLESDIVIHIGKQEAELALKVNSAAFQGDFYQLKSLIRSGADPNKTDYDGRSPLHLAACRGYEDITLFLIQEGVDVNLKDKFGHTPLFEAVKAGQEGVIGLLVKEGASFNLEDSGNFLCTTVAKGDSDFLKRLLSSGMNPNSEDYDHRTPLHVAASEGLFLMAKMLVEAGASVISKDRWGNSPLDEARLCGNKKLIKLLEDVKNAQSSIYPSSLRELQEERIERRKCTVFPFHPQEAKEERSRKHGVVVWIPSNLEKLIVTAAKELGLSDGASFVLLSEDQGRITDIDMISDGHKLYMISDTTDQT

SEQ ID NO: 76067 - protein, 317 aa, Arabidopsis thaliana
  peptide (1)..(317): Ceres Seq. ID no. 7104732
  misc_feature (60)..(92): Pfam Name: Ankyrin repeat Pfam Description: Ankyrin repeat
  misc_feature (1)..(317): Homolog of NCBI NO: 30693099 NR Description: guard cell outward rectifying K+ channel (GORK)
  misc_feature (1)..(317): Homolog of NCBI NO: 11414742 NR Description: guard cell outward rectifying K+ channel
  misc_feature (1)..(317): Homolog of NCBI NO: 15146306 NR Description: AT5g37500/mpa22_p_30 [Arabidopsis thaliana]
  misc_feature (1)..(313): Homolog of NCBI NO: 15232991 NR Description: stelar K+ outward rectifying channel (SKOR); id: At3g02850.1 [Arabidopsis thaliana] stelar K+ outward rectifying channel (SKOR) [Arabidopsis
  misc_feature (1)..(313): Homolog of NCBI NO: 3810676 NR Description: SKOR [Arabidopsis thaliana]
  misc_feature (1)..(313): Homolog of NCBI NO: 25295800 NR Description: potassium channel protein SKOR [validated] - thaliana >gi|3641845|emb|CAA11281.1| stelar K+ outward rectifying
  misc_feature (1)..(315): Homolog of NCBI NO: 27651624 NR Description: shaker-like potassium channel [Vitis vinifera]
  misc_feature (1)..(306): Homolog of NCBI NO: 10443349 NR Description: outwardly rectifying potassium channel [Samanea
  misc_feature (1)..(312): Homolog of NCBI NO: 9955728 NR Description: outward rectifying potassium channel [Populus
  misc_feature (1)..(219): Homolog of NCBI NO: 38344540 NR Description: OSJNBa0027P08.8 [Oryza sativa (japonica
MEEKESNDRIKKLESDIVIHIGKQEAELALKVNSAAFQGDFYQLKSLIRSGADPNKTDYDGRSPLHLAACRGYEDITLFLIQEGVDVNLKDKFGHTPLFEAVKAGQEGVIGLLVKEGASFNLEDSGNFLCTTVAKGDSDFLKRLLSSGMNPNSEDYDHRTPLHVAASEGLFLMAKMLVEAGASVISKDRWGNSPLDEARLCGNKKLIKLLEDVKNAQSSIYPSSLRELQEERIERRKCTVFPFHPQEAKEERSRKHGVVVWIPSNLEKLIVTAAKELGLSDGASFVLLSEDQGRITDIDMISDGHKLYMISDTTDQT

SEQ ID NO: 76068 - protein, 169 aa, Arabidopsis thaliana
  peptide (1)..(169): Ceres Seq. ID no. 7104733
  misc_feature (1)..(169): Homolog of NCBI NO: 30693099 NR Description: guard cell outward rectifying K+ channel (GORK)
  misc_feature (1)..(169): Homolog of NCBI NO: 11414742 NR Description: guard cell outward rectifying K+ channel
  misc_feature (1)..(169): Homolog of NCBI NO: 15146306 NR Description: AT5g37500/mpa22_p_30 [Arabidopsis thaliana]
  misc_feature (1)..(165): Homolog of NCBI NO: 15232991 NR Description: stelar K+ outward rectifying channel (SKOR); id: At3g02850.1 [Arabidopsis thaliana] stelar K+ outward rectifying channel (SKOR) [Arabidopsis
  misc_feature (1)..(165): Homolog of NCBI NO: 3810676 NR Description: SKOR [Arabidopsis thaliana]
  misc_feature (1)..(165): Homolog of NCBI NO: 25295800 NR Description: potassium channel protein SKOR [validated] - thaliana >gi|3641845|emb|CAA11281.1| stelar K+ outward rectifying
  misc_feature (1)..(167): Homolog of NCBI NO: 27651624 NR Description: shaker-like potassium channel [Vitis vinifera]
  misc_feature (1)..(158): Homolog of NCBI NO: 10443349 NR Description: outwardly rectifying potassium channel [Samanea
  misc_feature (1)..(164): Homolog of NCBI NO: 9955728 NR Description: outward rectifying potassium channel [Populus
  misc_feature (1)..(71): Homolog of NCBI NO: 38344540 NR Description: OSJNBa0027P08.8 [Oryza sativa (japonica
MNPNSEDYDHRTPLHVAASEGLFLMAKMLVEAGASVISKDRWGNSPLDEARLCGNKKLIKLLEDVKNAQSSIYPSSLRELQEERIERRKCTVFPFHPQEAKEERSRKHGVVVWIPSNLEKLIVTAAKELGLSDGASFVLLSEDQGRITDIDMISDGHKLYMISDTTDQT

SEQ ID NO: 76069 - DNA, 1412 bp, Arabidopsis thaliana
  misc_feature (1)..(1412): Ceres Seq. ID no. 7104734
  misc_feature: MA Experiment ID: 108434 Result: Up-regulated in Transcription
  misc_feature: MA Experiment 108434 PARAMETER Experiment Name: At_Root_Tips_cDNA_P Parameter: Tissue Value: Root Tips
  misc_feature: MA Experiment ID: 108461 Result: Up-regulated in Transcription
  misc_feature: MA Experiment 108461 PARAMETER Experiment Name: At_Germinating_Seeds_cDNA_P Parameter: Age (day) Value: 1 vs. 0
  misc_feature: MA Experiment 108461 PARAMETER Experiment Name: At_Germinating_Seeds_cDNA_P Parameter: Tissue Value: Germinating Seeds
  misc_feature: MA Experiment ID: 108462 Result: Up-regulated in Transcription
  misc_feature: MA Experiment 108462 PARAMETER Experiment Name: At_Germinating_Seeds_cDNA_P Parameter: Age (day) Value: 2 vs. 0
  misc_feature: MA Experiment 108462 PARAMETER Experiment Name: At_Germinating_Seeds_cDNA_P Parameter: Tissue Value: Germinating Seeds
  misc_feature: MA Experiment ID: 108573 Result: Up-regulated in Transcription
  misc_feature: MA Experiment 108573 PARAMETER Experiment Name: At_Drought_cDNA_P Parameter: Timepoint (hr) Value: 6
  misc_feature: MA Experiment 108573 PARAMETER Experiment Name: At_Drought_cDNA_P Parameter: Tissue Value: Aerial
  misc_feature: MA Experiment 108573 PARAMETER Experiment Name: At_Drought_cDNA_P Parameter: Treatment Value: Drought vs. No Drought
  misc_feature: MA Experiment ID: 108595 Result: Down-regulated in Transcription
  misc_feature: MA Experiment 108595 PARAMETER Experiment Name: At_Ler-pi_Ovule_cDNA_P Parameter: Plant Line Value: null
  misc_feature: MA Experiment ID: 20000069 Result: Down-regulated in Transcription
  misc_feature: MA Experiment 20000069 PARAMETER Experiment Name: At_100uM_ABA_Mutants_cDNA_P Parameter: Plant Line Value: CS23
  misc_feature: MA Experiment 20000069 PARAMETER Experiment Name: At_100uM_ABA_Mutants_cDNA_P Parameter: Timepoint (hr) Value: 6
  misc_feature: MA Experiment 20000069 PARAMETER Experiment Name: At_100uM_ABA_Mutants_cDNA_P Parameter: Tissue Value: Aerial
  misc_feature: MA Experiment 20000069 PARAMETER Experiment Name: At_100uM_ABA_Mutants_cDNA_P Parameter: Treatment Value: 100uM ABA vs. No Treatment
  misc_feature: MA Experiment ID: 20000087 Result: Down-regulated in Transcription
  misc_feature: MA Experiment 20000087 PARAMETER Experiment Name: At_100uM_ABA_Mutants_cDNA_P Parameter: Plant Line Value: WS
  misc_feature: MA Experiment 20000087 PARAMETER Experiment Name: At_100uM_ABA_Mutants_cDNA_P Parameter: Timepoint (hr) Value: 6
  misc_feature: MA Experiment 20000087 PARAMETER Experiment Name: At_100uM_ABA_Mutants_cDNA_P Parameter: Tissue Value: Aerial
  misc_feature: MA Experiment 20000087 PARAMETER Experiment Name: At_100uM_ABA_Mutants_cDNA_P Parameter: Treatment Value: 100uM ABA vs. No Treatment
  misc_feature: MA Experiment ID: 20000089 Result: Down-regulated in Transcription
  misc_feature: MA Experiment ID: 20000117 Result: Down-regulated in Transcription
  misc_feature: MA Experiment 20000117 PARAMETER Experiment Name: At_100uM_ABA_Mutants_cDNA_P Parameter: Plant Line Value: Columbia
  misc_feature: MA Experiment 20000117 PARAMETER Experiment Name: At_100uM_ABA_Mutants_cDNA_P Parameter: Timepoint (hr) Value: 6
  misc_feature: MA Experiment 20000117 PARAMETER Experiment Name: At_100uM_ABA_Mutants_cDNA_P Parameter: Tissue Value: Aerial
  misc_feature: MA Experiment 20000117 PARAMETER Experiment Name: At_100uM_ABA_Mutants_cDNA_P Parameter: Treatment Value: 100uM ABA vs. No Treatment
  misc_feature: MA Experiment ID: 20000224 Result: Down-regulated in Transcription
tcgattggccaaatcggccctcgagagtagaaaatggctgatggtgaagatattcaaccccttgtctgtgacaatggaactggaatggttaaggctggttttgctggggatgatgcaccgagggctgtgtttccaagtattgttggccgtcctcgccacactggagtgatggttggaatgggacagaaggatgcatatgttggcgatgaagctcaatccaagcgtggtattcttacccttaaataccctattgagcacggtattgtcaacaattgggatgatatggaaaaaatctggcatcatactttctacaatgagctccgtgttgctcccgaggagcatcctattctgctcactgaagcgcctcttaacccaaaggctaaccgtgagaagatgactcagatcatgtttgaaacctttaacgctccggctatgtatgtcgccattcaagctgtcctgtcgctttatgctagtggtcgtactactggtattgtgcttgactctggagatggtgtgagtcacacggtccctatctatgagggttacgctctcccgcatgcaatcctacgtcttgatcttgcaggtcgtgacctcacagatgctctgatgaagatcctcactgagcgtggttactctttcaccacaacagctgagcgtgaaattgtcagagacatcaaggagaagctttgctacattgctcttgactatgagcaggagcttgagacggctaaaaccagctcttctgtagagaagaactatgagttacctgatgggcaagtgatcaccattggatctgagcgtttccgttgccctgaggttctttaccagccatctatgatcggtatggagaatgctggtatccatgaaaccacctacaactccataatgaaatgtgatgttgacatcagaaaggacttgtatggtaacattgtgctcagtggtggaacaactatgttccctggaattgctgacagaatgagcaaagagatcactgctttggcaccgagcagcatgaagatcaaagtcgttgcacctcctgagaggaaatactctgtctggattggaggatccatcttggcctccctcagtaccttccagcagatgtggatcgcaaaggcagaatatgatgagtcaggcccgtcgattgttcaccggaaatgcttttgagcttgaagttaagtctgcttccggagaagccctgggggtttttccagtttgtccttactgggtttttatcttcgttctctgctcttctttgtttttcttcttcaatattttcagattctggcctaagacattttgaagaatttacattatctgtttgtagtgttggttaaactgttgtcttgttccttttatttattttggatgacacaactgtgtttgagtgaataagaactcctgatttttcc

SEQ ID NO: 76070 - protein, 377 aa, Arabidopsis thaliana; identical to SEQ ID NO: 36003
  peptide (1)..(377): Ceres Seq. ID no. 7104735
  misc_feature (1)..(377): Pfam Name: Actin Pfam Description: Actin
  misc_feature (1)..(362): Homolog of NCBI NO: 11276980 NR Description: actin (ACT3) - Arabidopsis thaliana
  misc_feature (1)..(377): Homolog of NCBI NO: 18409908 NR Description: actin (ACT3); protein id: At3g53750.1, supported cDNA: 25785., supported by cDNA: gi_15146303 [Arabidopsis >gi|22326216|ref|NP_565867.2| actin 3; protein id: At2g37620.1,
  misc_feature (1)..(377): Homolog of NCBI NO: 71633 NR Description: actin - Arabidopsis thaliana
  misc_feature (1)..(377): Homolog of NCBI NO: 11276975 NR Description: actin [imported] - upland cotton
  misc_feature (1)..(377): Homolog of NCBI NO: 11276977 NR Description: actin [imported] - Striga asiatica
  misc_feature (1)..(377): Homolog of NCBI NO: 231503 NR Description: ACTIN 97 >gi|100417|pir||S20098 actin 97 - potato
  misc_feature (1)..(377): Homolog of NCBI NO: 11276978 NR Description: actin ACT2 [imported] - Striga asiatica
  misc_feature (1)..(377): Homolog of NCBI NO: 23092520 NR Description: actin [Phalaenopsis hybrid cultivar]
  misc_feature (1)..(377): Homolog of NCBI NO: 15231447 NR Description: actin 12; protein id: At3g46520.1 [Arabidopsis
  misc_feature (1)..(377): Homolog of NCBI NO: 37813314 NR Description: skeletal muscle actin mutant [Cyprinus carpio]

SEQ ID NO: 76071 - protein, 360 aa, Arabidopsis thaliana; identical to SEQ ID NO: 36004
  peptide (1)..(360): Ceres Seq. ID no. 7104736
  misc_feature (1)..(360): Pfam Name: Actin Pfam Description: Actin
  misc_feature (1)..(345): Homolog of NCBI NO: 11276980 NR Description: actin (ACT3) - Arabidopsis thaliana
  misc_feature (1)..(360): Homolog of NCBI NO: 18409908 NR Description: actin (ACT3); protein id: At3g53750.1, supported cDNA: 25785., supported by cDNA: gi_15146303 [Arabidopsis >gi|22326216|ref|NP_565867.2| actin 3; protein id: At2g37620.1,
  misc_feature (1)..(360): Homolog of NCBI NO: 71633 NR Description: actin - Arabidopsis thaliana
  misc_feature (1)..(360): Homolog of NCBI NO: 11276975 NR Description: actin [imported] - upland cotton
  misc_feature (1)..(360): Homolog of NCBI NO: 11276977 NR Description: actin [imported] - Striga asiatica
  misc_feature (1)..(360): Homolog of NCBI NO: 231503 NR Description: ACTIN 97 >gi|100417|pir||S20098 actin 97 - potato
  misc_feature (1)..(360): Homolog of NCBI NO: 11276978 NR Description: actin ACT2 [imported] - Striga asiatica
  misc_feature (1)..(360): Homolog of NCBI NO: 23092520 NR Description: actin [Phalaenopsis hybrid cultivar]
  misc_feature (1)..(360): Homolog of NCBI NO: 15231447 NR Description: actin 12; protein id: At3g46520.1 [Arabidopsis
  misc_feature (1)..(360): Homolog of NCBI NO: 37813314 NR Description: skeletal muscle actin mutant [Cyprinus carpio]

SEQ ID NO: 76072 - protein, 332 aa, Arabidopsis thaliana; identical to SEQ ID NO: 36005
  peptide (1)..(332): Ceres Seq. ID no. 7104737
  misc_feature (1)..(332): Pfam Name: Actin Pfam Description: Actin
  misc_feature (1)..(317): Homolog of NCBI NO: 11276980 NR Description: actin (ACT3) - Arabidopsis thaliana
  misc_feature (1)..(332): Homolog of NCBI NO: 18409908 NR Description: actin (ACT3); protein id: At3g53750.1, supported cDNA: 25785., supported by cDNA: gi_15146303 [Arabidopsis >gi|22326216|ref|NP_565867.2| actin 3; protein id: At2g37620.1,
  misc_feature (1)..(332): Homolog of NCBI NO: 71633 NR Description: actin - Arabidopsis thaliana
  misc_feature (1)..(332): Homolog of NCBI NO: 11276975 NR Description: actin [imported] - upland cotton
  misc_feature (1)..(332): Homolog of NCBI NO: 11276977 NR Description: actin [imported] - Striga asiatica
  misc_feature (1)..(332): Homolog of NCBI NO: 231503 NR Description: ACTIN 97 >gi|100417|pir||S20098 actin 97 - potato
  misc_feature (1)..(332): Homolog of NCBI NO: 11276978 NR Description: actin ACT2 [imported] - Striga asiatica
  misc_feature (1)..(332): Homolog of NCBI NO: 23092520 NR Description: actin [Phalaenopsis hybrid cultivar]
  misc_feature (1)..(332): Homolog of NCBI NO: 15231447 NR Description: actin 12; protein id: At3g46520.1 [Arabidopsis
  misc_feature (1)..(332): Homolog of NCBI NO: 37813314 NR Description: skeletal muscle actin mutant [Cyprinus carpio]

SEQ ID NO: 76073 - DNA, 2728 bp, Arabidopsis thaliana
  misc_feature (1)..(2728): Ceres Seq. ID no. 7104918
  misc_feature: MA Experiment ID: 108569 Result: Up-regulated in Transcription
  misc_feature: MA Experiment 108569 PARAMETER Experiment Name: At_0.001%_MeJA__cDNA_P Parameter: Timepoint (hr) Value: 6
  misc_feature: MA Experiment 108569 PARAMETER Experiment Name: At_0.001%_MeJA__cDNA_P Parameter: Tissue Value: Aerial
  misc_feature: MA Experiment 108569 PARAMETER Experiment Name: At_0.001%_MeJA__cDNA_P Parameter: Treatment Value: 0.001% MeJA vs. No Treatment
  misc_feature: MA Experiment ID: 108573 Result: Up-regulated in Transcription
  misc_feature: MA Experiment 108573 PARAMETER Experiment Name: At_Drought_cDNA_P Parameter: Timepoint (hr) Value: 6
  misc_feature: MA Experiment 108573 PARAMETER Experiment Name: At_Drought_cDNA_P Parameter: Tissue Value: Aerial
  misc_feature: MA Experiment 108573 PARAMETER Experiment Name: At_Drought_cDNA_P Parameter: Treatment Value: Drought vs. No Drought
  misc_feature: MA Experiment ID: 108595 Result: Down-regulated in Transcription
  misc_feature: MA Experiment 108595 PARAMETER Experiment Name: At_Ler-pi_Ovule_cDNA_P Parameter: Plant Line Value: null
  misc_feature: MA Experiment ID: 20000314 Result: Up-regulated in Transcription
  misc_feature: MA Experiment 20000314 PARAMETER Experiment Name: At_14day_Shoots-Roots_Sub_P Parameter: Age (day) Value: 14
  misc_feature: MA Experiment 20000314 PARAMETER Experiment Name: At_14day_Shoots-Roots_Sub_P Parameter: Organism Value: A. thaliana
  misc_feature: MA Experiment 20000314 PARAMETER Experiment Name: At_14day_Shoots-Roots_Sub_P Parameter: Plant Line Value: WS
  misc_feature: MA Experiment 20000314 PARAMETER Experiment Name: At_14day_Shoots-Roots_Sub_P Parameter: Tissue Value: Roots vs. Whole Plant
  misc_feature: MA Experiment ID: 20000315 Result: Up-regulated in Transcription
  misc_feature: MA Experiment 20000315 PARAMETER Experiment Name: At_14day_Shoots-Roots_Sub_P Parameter: Age (day) Value: 14
  misc_feature: MA Experiment 20000315 PARAMETER Experiment Name: At_14day_Shoots-Roots_Sub_P Parameter: Organism Value: A. thaliana
  misc_feature: MA Experiment 20000315 PARAMETER Experiment Name: At_14day_Shoots-Roots_Sub_P Parameter: Plant Line Value: WS
  misc_feature: MA Experiment 20000315 PARAMETER Experiment Name: At_14day_Shoots-Roots_Sub_P Parameter: Tissue Value: Shoots vs. Whole Plant
tatagacgcaatcaccgccgattctctctctctctctctcgagtctctcgacggtcgcatatcaaaagtccatttctttcttctctttggaggatcagcaactatggatgaagagtacgaagtcatagttctgggtactggtctcaaggagtgcatccttagtggtcttctctccgtcgatggtcttaaggtacttcacatggacaggaatgactactacggtggagagtcaacttctcttaatctcaatcagctgtggaagaagttcaggggagaagagaaggctcctgctcatttaggttctagcagagactacaatgttgacatgatgccaaagtttatgatggctaacggaaagcttgttcgtgtccttattcatacggatgtgaccaagtacttgtcttttaaagctgttgatggaagctatgtttttgtccaaggcaaggtccaaaaagtgccagcaactcccatggaggccctcaaatctcctcttatgggtatttttgagaaacgtcgagctggaaagtttttcagctatgttcaagaatacgacgagaaggacccaaaaacacatgatggaatggatttgaggagagttacaactaaggatttgattgcgaaattcggtcttaaagaagatactattgactttattggtcatgcagtggcacttcactgtaatgacaatcatctccatcaacctgcctatgatactgtaatgagaatgaagctctacgcagagtcccttgcacgttttcaaggaggttcaccatatatctatcctctctatgggttgggagaattgcctcaggcatttgcacgacttagtgctgtctatggtgggacgtatatgttgaacaaacctgagtgcaaggtagagtttgacgaggagggtaaggtttctggtgttacatctgagggagagactgccaaatgcaagaaagttgtctgcgatccttcttacctaaccaacaaggtcaggaagattggcagggttgctcgggcgattgccattatgagccaccctattccaaacaccaatgattctcagtcggtgcaagtcattctaccccaaaaacaattgggccgcaaatcagacatgtatgtcttctgttgttcatattcacacaacgttgctcccaagggaaagttcatagcatttgtgtcaacagacgctgaaactgataaccctcaaaccgagctccagcctggaatcgaccttcttggtcctgttgatgagctgttcttcgacatctatgatagatatgagcctgtcaacgaacccactttggacaactgcttcatatcaacgagttatgatgctacaacacactttgacacaactgttgttgatgtgttgaacatgtataaattgatcaccggaaaggaactggatctaagtgtggatcttaacgcagctagtgctgcagaggaggaatgatggaaaatattgcaagctctgtctctctctgttagtcaccaaatgatgtaaccggttctctttctccctcttcttaaaagttgtctcaccaaatgttctgttaaaatactaaatcaaaccgatctcatcatgcgtacctattcccggttatcgcagtctgtttttttcttctcaaaaaactaaaatgttggatttcgtggtttttgtttggagtgtctaatataccaaaaaaaaaaaaaaaagagctcttggatccgtggttaaggaacgaaccgccgtaccaaactggaacataatcggctttgtggagttcattaaatccggtcagaaacaagatgacatggtcttggtcgtaccgcagggttcctccgccgttagactaggcaacgaagcctcaatctcccagaaaatatccgtcctacctggccgtctgtactcaataacgttcagcgccgctcgaacctgcgctcaagacgagaggctcaatatatccgtgacgcatgagtcaggtgtgatccctatccagacgatgtacggcagcgatggttgggactcatactcatgggcttttaaagctggtggtcccgaaatcgagatccggttccataaccctggtgttgaagagcacccggcttgcggacctttgatcgacgccgtggctatcaaggctttgttccctcccagattctctggatataatctgataaagaatgggaatttcgaagaaggaccttacgtgtttcccacggcaaaatggggagtactgatcccaccgttcatcgaggacgataacagcccattgcccggttggatgatcgagtctctcaaagccgttaagtacgtagacaaagcacacttcgctgtccccgaaggacaccgagccatcgagcttgttggaggcaaagagagcgccatttctcagatagtgaggacgtcactgaacaaattctacgccctcacgttcaacgtgggagacgccagagacggttgtgagggaccaatgattgtggaagcgttcgctggacagggcaaggtcatggtggactacgcttctaaaggaaaaggcgggtttagacgtgggaggcttgtgttcaaggcagtgtcggccaggacacgtgtcactttcttgagcacgttttaccacatgaaaagcgatcactctggctcgctatgtggtccggtgatcgatgatgttaggctggtagcggttgggaaactccgaggatgaaagttggggtcgttgactcattcggttgaatatactacattaatggataattgtaattc

SEQ ID NO: 76074 - protein, 479 aa, Arabidopsis thaliana
  peptide (1)..(479): Ceres Seq. ID no. 7104919
  misc_feature (35)..(472): Pfam Name: GDP dissociation inhibitor Pfam Description: GDP dissociation inhibitor
  misc_feature (35)..(479): Homolog of NCBI NO: 15224814 NR Description: GDP dissociation inhibitor; protein id: supported by cDNA: 29536., supported by cDNA: gi_13605640, by cDNA: gi_15215777, supported by cDNA: gi_1655423, supported by
  misc_feature (35)..(479): Homolog of NCBI NO: 1550740 NR Description: GDP-associated inhibitor [Arabidopsis thaliana]
  misc_feature (35)..(479): Homolog of NCBI NO: 17473582 NR Description: GDP dissociation inhibitor [Arabidopsis thaliana]
  misc_feature (35)..(479): Homolog of NCBI NO: 21592535 NR Description: GDP dissociation inhibitor [Arabidopsis thaliana]
  misc_feature (35)..(478): Homolog of NCBI NO: 15232210 NR Description: Rab GDP dissociation inhibitor; protein id: supported by cDNA: gi_19698844, supported by cDNA: gi_2446980
  misc_feature (35)..(478): Homolog of NCBI NO: 3175990 NR Description: GDP dissociation inhibitor [Cicer arietinum]
  misc_feature (35)..(478): Homolog of NCBI NO: 7489478 NR Description: GDP dissociation inhibitor protein - rice
  misc_feature (35)..(478): Homolog of NCBI NO: 7489133 NR Description: GDP dissociation inhibitor - common tobacco
  misc_feature (35)..(478): Homolog of NCBI NO: 7489479 NR Description: GDP dissociation inhibitor protein - rice
  misc_feature (34)..(466): Homolog of NCBI NO: 6320983 NR Description: Regulates vesicle traffic in secretory pathway by
IDAITADSLSLSLESLDGRISKVHFFLLFGGSATMDEEYEVIVLGTGLKECILSGLLSVDGLKVLHMDRNDYYGGESTSLNLNQLWKKFRGEEKAPAHLGSSRDYNVDMMPKFMMANGKLVRVLIHTDVTKYLSFKAVDGSYVFVQGKVQKVPATPMEALKSPLMGIFEKRRAGKFFSYVQEYDEKDPKTHDGMDLRRVTTKDLIAKFGLKEDTIDFIGHAVALHCNDNHLHQPAYDTVMRMKLYAESLARFQGGSPYIYPLYGLGELPQAFARLSAVYGGTYMLNKPECKVEFDEEGKVSGVTSEGETAKCKKVVCDPSYLTNKVRKIGRVARAIAIMSHPIPNTNDSQSVQVILPQKQLGRKSDMYVFCCSYSHNVAPKGKFIAFVSTDAETDNPQTELQPGIDLLGPVDELFFDIYDRYEPVNEPTLDNCFISTSYDATTHFDTTVVDVLNMYKLITGKELDLSVDLNAASAAEEE

SEQ ID NO: 76075 - protein, 445 aa, Arabidopsis thaliana; identical to SEQ ID NO: 21269
  peptide (1)..(445): Ceres Seq. ID no. 7104920
  misc_feature (1)..(438): Pfam Name: GDP dissociation inhibitor Pfam Description: GDP dissociation inhibitor
  misc_feature (1)..(445): Homolog of NCBI NO: 15224814 NR Description: GDP dissociation inhibitor; protein id: supported by cDNA: 29536., supported by cDNA: gi_13605640, by cDNA: gi_15215777, supported by cDNA: gi_1655423, supported by
  misc_feature (1)..(445): Homolog of NCBI NO: 1550740 NR Description: GDP-associated inhibitor [Arabidopsis thaliana]
  misc_feature (1)..(445): Homolog of NCBI NO: 17473582 NR Description: GDP dissociation inhibitor [Arabidopsis thaliana]
  misc_feature (1)..(445): Homolog of NCBI NO: 21592535 NR Description: GDP dissociation inhibitor [Arabidopsis thaliana]
  misc_feature (1)..(444): Homolog of NCBI NO: 15232210 NR Description: Rab GDP dissociation inhibitor; protein id: supported by cDNA: gi_19698844, supported by cDNA: gi_2446980
  misc_feature (1)..(444): Homolog of NCBI NO: 3175990 NR Description: GDP dissociation inhibitor [Cicer arietinum]
  misc_feature (1)..(444): Homolog of NCBI NO: 7489478 NR Description: GDP dissociation inhibitor protein - rice
  misc_feature (1)..(444): Homolog of NCBI NO: 7489133 NR Description: GDP dissociation inhibitor - common tobacco
  misc_feature (1)..(444): Homolog of NCBI NO: 7489479 NR Description: GDP dissociation inhibitor protein - rice
  misc_feature (1)..(432): Homolog of NCBI NO: 6320983 NR Description: Regulates vesicle traffic in secretory pathway by

SEQ ID NO: 76076 - protein, 413 aa, Arabidopsis thaliana; identical to SEQ ID NO: 21270
  peptide (1)..(413): Ceres Seq. ID no. 7104921
  misc_feature (1)..(406): Pfam Name: GDP dissociation inhibitor Pfam Description: GDP dissociation inhibitor
  misc_feature (1)..(413): Homolog of NCBI NO: 15224814 NR Description: GDP dissociation inhibitor; protein id: supported by cDNA: 29536., supported by cDNA: gi_13605640, by cDNA: gi_15215777, supported by cDNA: gi_1655423, supported by
  misc_feature (1)..(413): Homolog of NCBI NO: 1550740 NR Description: GDP-associated inhibitor [Arabidopsis thaliana]
  misc_feature (1)..(413): Homolog of NCBI NO: 17473582 NR Description: GDP dissociation inhibitor [Arabidopsis thaliana]
  misc_feature (1)..(413): Homolog of NCBI NO: 21592535 NR Description: GDP dissociation inhibitor [Arabidopsis thaliana]
  misc_feature (1)..(412): Homolog of NCBI NO: 15232210 NR Description: Rab GDP dissociation inhibitor; protein id: supported by cDNA: gi_19698844, supported by cDNA: gi_2446980
  misc_feature (1)..(412): Homolog of NCBI NO: 3175990 NR Description: GDP dissociation inhibitor [Cicer arietinum]
  misc_feature (1)..(412): Homolog of NCBI NO: 7489478 NR Description: GDP dissociation inhibitor protein - rice
  misc_feature (1)..(412): Homolog of NCBI NO: 7489133 NR Description: GDP dissociation inhibitor - common tobacco
  misc_feature (1)..(412): Homolog of NCBI NO: 7489479 NR Description: GDP dissociation inhibitor protein - rice
  misc_feature (1)..(400): Homolog of NCBI NO: 6320983 NR Description: Regulates vesicle traffic in secretory pathway by

SEQ ID NO: 76077 - DNA, 1018 bp, Arabidopsis thaliana
  misc_feature (1)..(1018): Ceres Seq. ID no. 7104949
  misc_feature: MA Experiment ID: 20000179 Result: Up-regulated in Transcription
  misc_feature: MA Experiment 20000179 PARAMETER Experiment Name: At_Germinating_Seeds_P Parameter: Age (hr) Value: 6 vs. 0
  misc_feature: MA Experiment 20000179 PARAMETER Experiment Name: At_Germinating_Seeds_P Parameter: Tissue Value: Germinating Seeds
  misc_feature: MA Experiment ID: 20000180 Result: Up-regulated in Transcription
  misc_feature: MA Experiment 20000180 PARAMETER Experiment Name: At_Germinating_Seeds_P Parameter: Age (hr) Value: 24 vs. 0
  misc_feature: MA Experiment 20000180 PARAMETER Experiment Name: At_Germinating_Seeds_P Parameter: Tissue Value: Germinating Seeds
  misc_feature: MA Experiment ID: 20000234 Result: Down-regulated in Transcription
  misc_feature: MA Experiment 20000234 PARAMETER Experiment Name: At_Siliques_P Parameter: Age (day) Value: 21
  misc_feature: MA Experiment 20000234 PARAMETER Experiment Name: At_Siliques_P Parameter: Organism Value: A. thaliana
  misc_feature: MA Experiment 20000234 PARAMETER Experiment Name: At_Siliques_P Parameter: Plant Line Value: WS
  misc_feature: MA Experiment 20000234 PARAMETER Experiment Name: At_Siliques_P Parameter: Tissue Value: Less Than 5mm Siliques vs. Whole Plant
  misc_feature: MA Experiment ID: 20000235 Result: Down-regulated in Transcription
  misc_feature: MA Experiment 20000235 PARAMETER Experiment Name: At_Siliques_P Parameter: Age (day) Value: 21
  misc_feature: MA Experiment 20000235 PARAMETER Experiment Name: At_Siliques_P Parameter: Organism Value: A. thaliana
  misc_feature: MA Experiment 20000235 PARAMETER Experiment Name: At_Siliques_P Parameter: Plant Line Value: WS
  misc_feature: MA Experiment 20000235 PARAMETER Experiment Name: At_Siliques_P Parameter: Tissue Value: 5-10mm Siliques vs. Whole Plant
  misc_feature: MA Experiment ID: 20000264 Result: Down-regulated in Transcription
  misc_feature: MA Experiment 20000264 PARAMETER Experiment Name: At_Open_Flower_P Parameter: Age (day) Value: 21
  misc_feature: MA Experiment 20000264 PARAMETER Experiment Name: At_Open_Flower_P Parameter: Plant Line Value: WS
  misc_feature: MA Experiment 20000264 PARAMETER Experiment Name: At_Open_Flower_P Parameter: Tissue Value: Open Flower vs. Whole Plant
  misc_feature: MA Experiment ID: 20000265 Result: Down-regulated in Transcription
  misc_feature: MA Experiment 20000265 PARAMETER Experiment Name: At_Open_Flower_P Parameter: Age (day) Value: 21
  misc_feature: MA Experiment 20000265 PARAMETER Experiment Name: At_Open_Flower_P Parameter: Plant Line Value: WS
  misc_feature: MA Experiment 20000265 PARAMETER Experiment Name: At_Open_Flower_P Parameter: Tissue Value: Closed Flower vs. Whole Plant
  misc_feature: MA Experiment ID: 20000286 Result: Down-regulated in Transcription
  misc_feature: MA Experiment 20000286 PARAMETER Experiment Name: At_Open_Flower_P Parameter: Age (day) Value: 21
  misc_feature: MA Experiment 20000286 PARAMETER Experiment Name: At_Open_Flower_P Parameter: Plant Line Value: WS
  misc_feature: MA Experiment 20000286 PARAMETER Experiment Name: At_Open_Flower_P Parameter: Tissue Value: Half Open vs. Whole Plant
  misc_feature: MA Experiment ID: 20000439 Result: Down-regulated in Transcription
  misc_feature: MA Experiment 20000439 PARAMETER Experiment Name: At_Roots__P Parameter: Age (day) Value: 14 vs. 21
  misc_feature: MA Experiment 20000439 PARAMETER Experiment Name: At_Roots__P Parameter: Organism Value: A. thaliana
  misc_feature: MA Experiment 20000439 PARAMETER Experiment Name: At_Roots__P Parameter: Tissue Value: Roots vs. Whole Plant
  misc_feature: MA Experiment ID: 20000794 Result: Down-regulated in Transcription
  misc_feature: MA Experiment 20000794 PARAMETER Experiment Name: At_Petals_P Parameter: Age (day) Value: 23-25 days
  misc_feature: MA Experiment 20000794 PARAMETER Experiment Name: At_Petals_P Parameter: Plant Line Value: WS
  misc_feature: MA Experiment 20000794 PARAMETER Experiment Name: At_Petals_P Parameter: Tissue Value: Petals vs. Whole plant
  misc_feature: MA Experiment ID: 20001248 Result: Up-regulated in Transcription
  misc_feature: MA Experiment 20001248 PARAMETER Experiment Name: At_Far-red-induction_P Parameter: Age (day) Value: 7
  misc_feature: MA Experiment 20001248 PARAMETER Experiment Name: At_Far-red-induction_P Parameter: Light Value: Far-red vs. White
  misc_feature: MA Experiment 20001248 PARAMETER Experiment Name: At_Far-red-induction_P Parameter: Organism Value: A. thaliana
  misc_feature: MA Experiment 20001248 PARAMETER Experiment Name: At_Far-red-induction_P Parameter: Plant Line Value: Columbia
  misc_feature: MA Experiment 20001248 PARAMETER Experiment Name: At_Far-red-induction_P Parameter: Timepoint (hr) Value: 4
  misc_feature: MA Experiment 20001248 PARAMETER Experiment Name: At_Far-red-induction_P Parameter: Tissue Value: Whole Plant
  misc_feature: Pfam Name: Usp Pfam Description: Universal stress protein family
tttgtttcgattatcgattattatatcttatatcgtgttcgttttttttttttttagaacataaaaagagccagatgctcattacacactcatgtaagtaaacaacacacatcgcaggacgtacatacataaaaagcacaatacaacgaccgaatgcgactgcgttacaaaccctcattatttttatttaatatgtatacacgattgttcgaagcttaacggccaccaccgggaagcttttccttgatcttgtccatcatccccttcttctcgtggtgctcaccaccgtagccaccagcatcatatccggatccaaataacgaagagtcgcagaggaagcttgaggacgatttcgacattgtcactaataagaaagcgagcgacgttgctcagcctttggttgaggcggatattccgtttaagatccatatcgtcaaggatcacgatatgaaggagaggctttgtttggaggtggagaggttagggctaagtactttgattatgggtagtagaggatttggtgctacgaagaggagtagtaaagggagattagggagtgtcagtgattactcagttcaccattgtgcttgtccggtggttgttgttagatttcctgatgataaggatggagaagatgagaaatccggcgacagtggtggggagaatctgatggacagtgataaacttcatacagtgcctgaggtggctgaagaagagggagataaggatgagtaccatgatgcttcggataagcagtagcagcaaggctttcatgttgcagaaggagacctccctaaggagacttagaaagaaaagaaagcgttcctttgcccttggtttgtgttcttgagtgtgcttaattgtgttgtttttggggtttggggtattctagatctcttttgtaagtattctcttgtttcttggttttgttttaaactctatggaatttgggatgagtggattcgatgtcttttgtttgtctttgaaaaagcagtgaaaagaatttcagtggtcttgt

SEQ ID NO: 76078 - protein, 103 aa, Arabidopsis thaliana
  peptide (1)..(103): Ceres Seq. ID no. 7104950
  misc_feature: Pfam Name: Usp Pfam Description: Universal stress protein family
  misc_feature (1)..(103): Homolog of NCBI NO: 25402657 NR Description: protein T23J18.3 [imported] - Arabidopsis >gi|6554203|gb|AAF16649.1|AC011661_27 T23J18.3 [Arabidopsis
  misc_feature (1)..(103): Homolog of NCBI NO: 30682187 NR Description: expressed protein [Arabidopsis thaliana]
  misc_feature (1)..(103): Homolog of NCBI NO: 15215774 NR Description: At1g11360/T23J18_35 [Arabidopsis thaliana]
  misc_feature (1)..(103): Homolog of NCBI NO: 34910112 NR Description: B1100D10.31 [Oryza sativa (japonica
  misc_feature (1)..(102): Homolog of NCBI NO: 28971968 NR Description: OSJNBb0041B22.10 [Oryza sativa (japonica
  misc_feature (1)..(102): Homolog of NCBI NO: 33146953 NR Description: CHP-rich zinc finger protein-like [Oryza sativa
  misc_feature (1)..(99): Homolog of NCBI NO: 7486798 NR Description: hypothetical protein M4I22.130 - Arabidopsis >gi|3269293|emb|CAA19726.1| putative protein [Arabidopsis >gi|7269585|emb|CAB79587.1| putative protein [Arabidopsis
  misc_feature (1)..(99): Homolog of NCBI NO: 18416966 NR Description: putative protein; protein id: At4g27320.1, by cDNA: 10313. [Arabidopsis thaliana] unknown [Arabidopsis thaliana] >gi|21703134|gb|AAM74507.1|
  misc_feature (1)..(95): Homolog of NCBI NO: 18423628 NR Description: putative protein; protein id: At5g54430.1, by cDNA: 37617., supported by cDNA: gi_17979328 [Arabidopsis >gi|17979329|gb|AAL49890.1| unknown protein [Arabidopsis
  misc_feature (1)..(81): Homolog of NCBI NO: 8885586 NR Description: gene_id:F24B18.5~pir||T05756~similar to unknown
MKERLCLEVERLGLSTLIMGSRGFGATKRSSKGRLGSVSDYSVHHCACPVVVVRFPDDKDGEDEKSGDSGGENLMDSDKLHTVPEVAEEEGDKDEYHDASDKQ

SEQ ID NO: 76079 - protein, 85 aa, Arabidopsis thaliana
  peptide (1)..(85): Ceres Seq. ID no. 7104951
  misc_feature: Pfam Name: Usp Pfam Description: Universal stress protein family
  misc_feature (1)..(85): Homolog of NCBI NO: 25402657 NR Description: protein T23J18.3 [imported] - Arabidopsis >gi|6554203|gb|AAF16649.1|AC011661_27 T23J18.3 [Arabidopsis
  misc_feature (1)..(85): Homolog of NCBI NO: 30682187 NR Description: expressed protein [Arabidopsis thaliana]
  misc_feature (1)..(85): Homolog of NCBI NO: 15215774 NR Description: At1g11360/T23J18_35 [Arabidopsis thaliana]
  misc_feature (1)..(85): Homolog of NCBI NO: 34910112 NR Description: B1100D10.31 [Oryza sativa (japonica
  misc_feature (1)..(84): Homolog of NCBI NO: 28971968 NR Description: OSJNBb0041B22.10 [Oryza sativa (japonica
  misc_feature (1)..(84): Homolog of NCBI NO: 33146953 NR Description: CHP-rich zinc finger protein-like [Oryza sativa
  misc_feature (1)..(81): Homolog of NCBI NO: 7486798 NR Description: hypothetical protein M4I22.130 - Arabidopsis >gi|3269293|emb|CAA19726.1| putative protein [Arabidopsis >gi|7269585|emb|CAB79587.1| putative protein [Arabidopsis
  misc_feature (1)..(81): Homolog of NCBI NO: 18416966 NR Description: putative protein; protein id: At4g27320.1, by cDNA: 10313. [Arabidopsis thaliana] unknown [Arabidopsis thaliana] >gi|21703134|gb|AAM74507.1|
  misc_feature (1)..(77): Homolog of NCBI NO: 18423628 NR Description: putative protein; protein id: At5g54430.1, by cDNA: 37617., supported by cDNA: gi_17979328 [Arabidopsis >gi|17979329|gb|AAL49890.1| unknown protein [Arabidopsis
  misc_feature (1)..(63): Homolog of NCBI NO: 8885586 NR Description: gene_id:F24B18.5~pir||T05756~similar to unknown
MGSRGFGATKRSSKGRLGSVSDYSVHHCACPVVVVRFPDDKDGEDEKSGDSGGENLMDSDKLHTVPEVAEEEGDKDEYHDASDKQ

SEQ ID NO: 76080 - DNA, 2871 bp, Arabidopsis thaliana
  misc_feature (1)..(2871): Ceres Seq. ID no. 7104967
  misc_feature: MA Experiment ID: 20000173 Result: Down-regulated in Transcription
  misc_feature: MA Experiment 20000173 PARAMETER Experiment Name: At_42deg_Heat_P Parameter: Age (day) Value: 14
  misc_feature: MA Experiment 20000173 PARAMETER Experiment Name: At_42deg_Heat_P Parameter: Organism Value: A. thaliana
  misc_feature: MA Experiment 20000173 PARAMETER Experiment Name: At_42deg_Heat_P Parameter: Plant Line Value: WS
  misc_feature: MA Experiment 20000173 PARAMETER Experiment Name: At_42deg_Heat_P Parameter: Temperature (deg C) Value: 42 vs. 22
  misc_feature: MA Experiment 20000173 PARAMETER Experiment Name: At_42deg_Heat_P Parameter: Timepoint (hr) Value: 6
  misc_feature: MA Experiment 20000173 PARAMETER Experiment Name: At_42deg_Heat_P Parameter: Tissue Value: Aerial
  misc_feature: MA Experiment ID: 20000234 Result: Up-regulated in Transcription
  misc_feature: MA Experiment 20000234 PARAMETER Experiment Name: At_Siliques_P Parameter: Age (day) Value: 21
  misc_feature: MA Experiment 20000234 PARAMETER Experiment Name: At_Siliques_P Parameter: Organism Value: A. thaliana
  misc_feature: MA Experiment 20000234 PARAMETER Experiment Name: At_Siliques_P Parameter: Plant Line Value: WS
  misc_feature: MA Experiment 20000234 PARAMETER Experiment Name: At_Siliques_P Parameter: Tissue Value: Less Than 5mm Siliques vs. Whole Plant
  misc_feature: MA Experiment ID: 20000286 Result: Up-regulated in Transcription
  misc_feature: MA Experiment 20000286 PARAMETER Experiment Name: At_Open_Flower_P Parameter: Age (day) Value: 21
  misc_feature: MA Experiment 20000286 PARAMETER Experiment Name: At_Open_Flower_P Parameter: Plant Line Value: WS
  misc_feature: MA Experiment 20000286 PARAMETER Experiment Name: At_Open_Flower_P Parameter: Tissue Value: Half Open vs. Whole Plant
  misc_feature: MA Experiment ID: 20001451 Result: Down-regulated in Transcription
  misc_feature: MA Experiment 20001451 PARAMETER Experiment Name: At_Far-red-induction_P Parameter: Age (day) Value: 7
  misc_feature: MA Experiment 20001451 PARAMETER Experiment Name: At_Far-red-induction_P Parameter: Light Value: Far-red vs. White
  misc_feature: MA Experiment 20001451 PARAMETER Experiment Name: At_Far-red-induction_P Parameter: Organism Value: A. thaliana
  misc_feature: MA Experiment 20001451 PARAMETER Experiment Name: At_Far-red-induction_P Parameter: Plant Line Value: Columbia
  misc_feature: MA Experiment 20001451 PARAMETER Experiment Name: At_Far-red-induction_P Parameter: Timepoint (hr) Value: 24
  misc_feature: MA Experiment 20001451 PARAMETER Experiment Name: At_Far-red-induction_P Parameter: Tissue Value: Whole Plant
  misc_feature: MA Experiment ID: 20001911 Result: Down-regulated in Transcription
  misc_feature: MA Experiment 20001911 PARAMETER Experiment Name: At_Drought_Reproduction_P Parameter: Age (day) Value: 40
  misc_feature: MA Experiment 20001911 PARAMETER Experiment Name: At_Drought_Reproduction_P Parameter: Organism Value: A. thaliana
  misc_feature: MA Experiment 20001911 PARAMETER Experiment Name: At_Drought_Reproduction_P Parameter: Plant Line Value: WS
  misc_feature: MA Experiment 20001911 PARAMETER Experiment Name: At_Drought_Reproduction_P Parameter: Timepoint (day) Value: 10
  misc_feature: MA Experiment 20001911 PARAMETER Experiment Name: At_Drought_Reproduction_P Parameter: Tissue Value: Flowers
  misc_feature: MA Experiment 20001911 PARAMETER Experiment Name: At_Drought_Reproduction_P Parameter: Treatment Value: Drought vs. No Drought
gtcgcgcatttagcgttgttttgaagctctctctttcaaattctgttcgtctctcgcgatctctctctctctctcagatagctccgaaactttcacgcagagttaagtgaagcaggatgggattgtcattcgccaagctttttagcaggctttttgccaagaaggagatgagaattctgatggttggtcttgatgctgctggtaagaccaccattttgtacaagctcaagctcggagagattgtaaccaccattcccactattgggttcaatgtggagactgtggagtacaagaacatcagtttcacagtgtgggatgtcggcggtcaggataagatccgtcccttgtggaggcattacttccagaacacccaaggtcttatctttgtggtggacagcaatgacagagaccgtgttgttgaggctagagatgaattgcaccgaatgttgaatgaggacgagctgcgtgatgctgttctgctcgtatttgctaacaagcaggatctcccaaatgctatgaatgcagctgagatcacggataagcttggtctccactctctccgtcagcgtcactggtacatccagagcacatgtgccacttcaggcgaggggctttacgaaggtcttgactggttgtccaacaacattgccggcaaggcgtagagggaaagttcgtggtggagttgatttgctgagcaaatctggatgcaggggcaaacattatctgaattttttttttggtttccgttttcgttattgttctgctttttttttgggatatgtcgatggattttgtgattgtacgtagaacttagaaaaaaactaccttttatatagttttggtaaaactgtaatcgaagatttcacctaaaagaaaaaaaaaaaaaaaagagctcttggatccgattcaatctggctcttgaaagtggcaacatcagtgtggctgttgcatccgctacacagattaacgagaaagaccactggtatagacttggagtggaggctcttcgccaaggtaattctggaattgttgagtttgcataccagcagacaaagaactttgagaggttatcttttctttatctcattactggaaatttggacaagctttcaaagttgatgaagattgcagaagtgaagaacaacgtaatgggacagtttcacaatgctctctacctaggagatgttaaagagcgtgttaagatactggagaatgctggtcatttgcctctagcttatatcacagcttcggttcatggtttaaatgacattgctgagcgactggcaactgagttaggagacaacgtgccctcattgcctgaaggaaaaactccatcgcttctaatgccaccgacacccatcatgtgtggtggtgattggcctcttcttagagtgatgaaaggaatatttgaaggaggacttgagagtgcagacagaggaggtactgttgatgaagaagatgttgaaggggattggggtgaggaacttgacattaatgttgatggaatggagaacagagatattgaagacattttggcggctgcagaagcaggtgaagaagaaaacgatgaggaaggtggatggggacttgaagacttggtgctcccaccagagcttgacactcctaaagcctctgctaatgcacgttcatctgtttttgtgacacctccccaaggtatgcccgtaagtcagagctggagccagaaatcttctcttgctgctgagcaagccgcagcgggaagcttcgacactgcaatgcgtctgctccacagacagcttggtatcaagaactttacacctttgaaatcgatgtttctagatctgttcaatggcagccatagctatctgcgtgctttttcttcatgtcctgtggttccacttgccattgagcgtggatggagcgagtcttccagtcccaacgtccgtagcccaccagctcttgtttatgatttctctcagctagacgagaagctcaaatccggctacaaagctacaacaactgggaaattcactgaggctctccgtctcttcctttctatcctgcacaccatccctctagtggtagtcgagacaagaagagaagtggatgaggtcaaggaattaatcgttatcgttaaagaatatgtccttggtcttcaaatggagctcaagaggagagagatgaaagatgatccggtgaggcagcaagagctcgctgcttacttcactcactgcaacctccaaacacctcacttacggcttgcgctgcttagtgcaatgggtgtctgctacaaggcaaagaacctcgccactgcttctaatttcgccagaagactgttggaaacaagcccagttgatagccaagccaagatggctagacaagttgtgcaagccgctgaacgtaacatgaccgatgaaacaaagcttaactacgacttcaggaacccttttgtggtatgtggttccacatatgtcccgatctacagaggacagaaagacgtctcatgtccttactgcaccgcccggtttgtaccaaaccaggaaggaaacatctgcacggtctgtgatctagcagtgattggcgcagacgcatctggtttgttatgctctccatctcaagtccggtgatcaatttcagatttcataatcaatacagggatgctctattaacagaataagagtgttgaacttttggtgtttttgtgattgtgtacttaccaatcaggtttgaggatttttctcgttgcaggtttttattactcttttaaaagttgtttcttatcttttagtacacatgagaactttagcttcttgctttataatttctctttttgatgcatagtagcactggataacttgtaatttcaatttcggaaattatggtttacttgcg

SEQ ID NO: 76081 - protein, 495 aa, Arabidopsis thaliana
  peptide (1)..(495): Ceres Seq. ID no. 7104968
  misc_feature (1)..(63): Pfam Name: Coatomer WD associated region Pfam Description: Coatomer WD associated region
  misc_feature (1)..(495): Homolog of NCBI NO: 15220684 NR Description: coatomer alpha subunit, putative; protein id: [Arabidopsis thaliana] >gi|7444289|pir||T02146 coatomer complex
  misc_feature (1)..(495): Homolog of NCBI NO: 15226538 NR Description: coatomer alpha subunit; protein id: At2g21390.1
  misc_feature (1)..(495): Homolog of NCBI NO: 15215742 NR Description: At1g62020/F8K4_21 [Arabidopsis thaliana]
  misc_feature (1)..(495): Homolog of NCBI NO: 33945873 NR Description: coatomer alpha subunit-like protein [Lotus
  misc_feature (1)..(495): Homolog of NCBI NO: 13324786 NR Description: putative alpha-coat protein [Oryza sativa]
  misc_feature (1)..(495): Homolog of NCBI NO: 13324789 NR Description: putative alpha-coat protein [Oryza sativa]
  misc_feature (1)..(493): Homolog of NCBI NO: 9957141 NR Description: COP alpha homolog [Triticum aestivum]
  misc_feature (1)..(495): Homolog of NCBI NO: 23958509 NR Description: coatomer protein complex subunit alpha [Mus >gi|28704039|gb|AAH47429.1| coatomer protein complex subunit
  misc_feature (1)..(495): Homolog of NCBI NO: 2494888 NR Description: Coatomer alpha subunit (Alpha-coat protein)
  misc_feature (1)..(495): Homolog of NCBI NO: 19483892 NR Description: Unknown (protein for IMAGE:5012563) [Mus musculus]
MKIAEVKNNVMGQFHNALYLGDVKERVKILENAGHLPLAYITASVHGLNDIAERLATELGDNVPSLPEGKTPSLLMPPTPIMCGGDWPLLRVMKGIFEGGLESADRGGTVDEEDVEGDWGEELDINVDGMENRDIEDILAAAEAGEEENDEEGGWGLEDLVLPPELDTPKASANARSSVFVTPPQGMPVSQSWSQKSSLAAEQAAAGSFDTAMRLLHRQLGIKNFTPLKSMFLDLFNGSHSYLRAFSSCPVVPLAIERGWSESSSPNVRSPPALVYDFSQLDEKLKSGYKATTTGKFTEALRLFLSILHTIPLVVVETRREVDEVKELIVIVKEYVLGLQMELKRREMKDDPVRQQELAAYFTHCNLQTPHLRLALLSAMGVCYKAKNLATASNFARRLLETSPVDSQAKMARQVVQAAERNMTDETKLNYDFRNPFVVCGSTYVPIYRGQKDVSCPYCTARFVPNQEGNICTVCDLAVIGADASGLLCSPSQVR

SEQ ID NO: 76082 - protein, 485 aa, Arabidopsis thaliana
  peptide (1)..(485): Ceres Seq. ID no. 7104969
  misc_feature (1)..(53): Pfam Name: Coatomer WD associated region Pfam Description: Coatomer WD associated region
  misc_feature (1)..(485): Homolog of NCBI NO: 15220684 NR Description: coatomer alpha subunit, putative; protein id: [Arabidopsis thaliana] >gi|7444289|pir||T02146 coatomer complex
  misc_feature (1)..(485): Homolog of NCBI NO: 15226538 NR Description: coatomer alpha subunit; protein id: At2g21390.1
  misc_feature (1)..(485): Homolog of NCBI NO: 15215742 NR Description: At1g62020/F8K4_21 [Arabidopsis thaliana]
  misc_feature (1)..(485): Homolog of NCBI NO: 33945873 NR Description: coatomer alpha subunit-like protein [Lotus
  misc_feature (1)..(485): Homolog of NCBI NO: 13324786 NR Description: putative alpha-coat protein [Oryza sativa]
  misc_feature (1)..(485): Homolog of NCBI NO: 13324789 NR Description: putative alpha-coat protein [Oryza sativa]
  misc_feature (1)..(483): Homolog of NCBI NO: 9957141 NR Description: COP alpha homolog [Triticum aestivum]
  misc_feature (1)..(485): Homolog of NCBI NO: 23958509 NR Description: coatomer protein complex subunit alpha [Mus >gi|28704039|gb|AAH47429.1| coatomer protein complex subunit
  misc_feature (1)..(485): Homolog of NCBI NO: 2494888 NR Description: Coatomer alpha subunit (Alpha-coat protein)
  misc_feature (1)..(485): Homolog of NCBI NO: 19483892 NR Description: Unknown (protein for IMAGE:5012563) [Mus musculus]
MGQFHNALYLGDVKERVKILENAGHLPLAYITASVHGLNDIAERLATELGDNVPSLPEGKTPSLLMPPTPIMCGGDWPLLRVMKGIFEGGLESADRGGTVDEEDVEGDWGEELDINVDGMENRDIEDILAAAEAGEEENDEEGGWGLEDLVLPPELDTPKASANARSSVFVTPPQGMPVSQSWSQKSSLAAEQAAAGSFDTAMRLLHRQLGIKNFTPLKSMFLDLFNGSHSYLRAFSSCPVVPLAIERGWSESSSPNVRSPPALVYDFSQLDEKLKSGYKATTTGKFTEALRLFLSILHTIPLVVVETRREVDEVKELIVIVKEYVLGLQMELKRREMKDDPVRQQELAAYFTHCNLQTPHLRLALLSAMGVCYKAKNLATASNFARRLLETSPVDSQAKMARQVVQAAERNMTDETKLNYDFRNPFVVCGSTYVPIYRGQKDVSCPYCTARFVPNQEGNICTVCDLAVIGADASGLLCSPSQVR

SEQ ID NO: 76083 - protein, 420 aa, Arabidopsis thaliana
  peptide (1)..(420): Ceres Seq. ID no. 7104970
  misc_feature (1)..(420): Homolog of NCBI NO: 15220684 NR Description: coatomer alpha subunit, putative; protein id: [Arabidopsis thaliana] >gi|7444289|pir||T02146 coatomer complex
  misc_feature (1)..(420): Homolog of NCBI NO: 15226538 NR Description: coatomer alpha subunit; protein id: At2g21390.1
  misc_feature (1)..(420): Homolog of NCBI NO: 15215742 NR Description: At1g62020/F8K4_21 [Arabidopsis thaliana]
  misc_feature (1)..(420): Homolog of NCBI NO: 33945873 NR Description: coatomer alpha subunit-like protein [Lotus
  misc_feature (1)..(420): Homolog of NCBI NO: 13324786 NR Description: putative alpha-coat protein [Oryza sativa]
  misc_feature (1)..(420): Homolog of NCBI NO: 13324789 NR Description: putative alpha-coat protein [Oryza sativa]
  misc_feature (1)..(418): Homolog of NCBI NO: 9957141 NR Description: COP alpha homolog [Triticum aestivum]
  misc_feature (1)..(420): Homolog of NCBI NO: 23958509 NR Description: coatomer protein complex subunit alpha [Mus >gi|28704039|gb|AAH47429.1| coatomer protein complex subunit
  misc_feature (1)..(420): Homolog of NCBI NO: 2494888 NR Description: Coatomer alpha subunit (Alpha-coat protein)
  misc_feature (1)..(420): Homolog of NCBI NO: 19483892 NR Description: Unknown (protein for IMAGE:5012563) [Mus musculus]
MPPTPIMCGGDWPLLRVMKGIFEGGLESADRGGTVDEEDVEGDWGEELDINVDGMENRDIEDILAAAEAGEEENDEEGGWGLEDLVLPPELDTPKASANARSSVFVTPPQGMPVSQSWSQKSSLAAEQAAAGSFDTAMRLLHRQLGIKNFTPLKSMFLDLFNGSHSYLRAFSSCPVVPLAIERGWSESSSPNVRSPPALVYDFSQLDEKLKSGYKATTTGKFTEALRLFLSILHTIPLVVVETRREVDEVKELIVIVKEYVLGLQMELKRREMKDDPVRQQELAAYFTHCNLQTPHLRLALLSAMGVCYKAKNLATASNFARRLLETSPVDSQAKMARQVVQAAERNMTDETKLNYDFRNPFVVCGSTYVPIYRGQKDVSCPYCTARFVPNQEGNICTVCDLAVIGADASGLLCSPSQVR

SEQ ID NO: 76084 - DNA, 1913 bp, Arabidopsis thaliana
  misc_feature (1)..(1913): Ceres Seq. ID no. 7104999
  misc_feature: MA Experiment ID: 108464 Result: Up-regulated in Transcription
  misc_feature: MA Experiment 108464 PARAMETER Experiment Name: At_Germinating_Seeds_cDNA_P Parameter: Age (day) Value: 4 vs. 0
  misc_feature: MA Experiment 108464 PARAMETER Experiment Name: At_Germinating_Seeds_cDNA_P Parameter: Tissue Value: Germinating Seeds
  misc_feature: MA Experiment ID: 108573 Result: Up-regulated in Transcription
  misc_feature: MA Experiment 108573 PARAMETER Experiment Name: At_Drought_cDNA_P Parameter: Timepoint (hr) Value: 6
  misc_feature: MA Experiment 108573 PARAMETER Experiment Name: At_Drought_cDNA_P Parameter: Tissue Value: Aerial
  misc_feature: MA Experiment 108573 PARAMETER Experiment Name: At_Drought_cDNA_P Parameter: Treatment Value: Drought vs. No Drought
  misc_feature: MA Experiment ID: 108585 Result: Up-regulated in Transcription
  misc_feature: MA Experiment 108585 PARAMETER Experiment Name: At_5mM_NaNP_cDNA_P Parameter: Timepoint (hr) Value: 6
  misc_feature: MA Experiment 108585 PARAMETER Experiment Name: At_5mM_NaNP_cDNA_P Parameter: Tissue Value: Aerial
  misc_feature: MA Experiment 108585 PARAMETER Experiment Name: At_5mM_NaNP_cDNA_P Parameter: Treatment Value: null
  misc_feature: MA Experiment ID: 20000069 Result: Down-regulated in Transcription
  misc_feature: MA Experiment 20000069 PARAMETER Experiment Name: At_100uM_ABA_Mutants_cDNA_P Parameter: Plant Line Value: CS23
  misc_feature: MA Experiment 20000069 PARAMETER Experiment Name: At_100uM_ABA_Mutants_cDNA_P Parameter: Timepoint (hr) Value: 6
  misc_feature: MA Experiment 20000069 PARAMETER Experiment Name: At_100uM_ABA_Mutants_cDNA_P Parameter: Tissue Value: Aerial
  misc_feature: MA Experiment 20000069 PARAMETER Experiment Name: At_100uM_ABA_Mutants_cDNA_P Parameter: Treatment Value: 100uM ABA vs. No Treatment
  misc_feature: MA Experiment ID: 20000070 Result: Down-regulated in Transcription
  misc_feature: MA Experiment 20000070 PARAMETER Experiment Name: At_100uM_ABA_Mutants_cDNA_P Parameter: Plant Line Value: CS24
  misc_feature: MA Experiment 20000070 PARAMETER Experiment Name: At_100uM_ABA_Mutants_cDNA_P Parameter: Timepoint (hr) Value: 6
  misc_feature: MA Experiment 20000070 PARAMETER Experiment Name: At_100uM_ABA_Mutants_cDNA_P Parameter: Tissue Value: Aerial
  misc_feature: MA Experiment 20000070 PARAMETER Experiment Name: At_100uM_ABA_Mutants_cDNA_P Parameter: Treatment Value: 100uM ABA vs. No Treatment
  misc_feature: MA Experiment ID: 20000072 Result: Down-regulated in Transcription
  misc_feature: MA Experiment 20000072 PARAMETER Experiment Name: At_100uM_ABA_Mutants_cDNA_P Parameter: Plant Line Value: CS8105
  misc_feature: MA Experiment 20000072 PARAMETER Experiment Name: At_100uM_ABA_Mutants_cDNA_P Parameter: Timepoint (hr) Value: 6
  misc_feature: MA Experiment 20000072 PARAMETER Experiment Name: At_100uM_ABA_Mutants_cDNA_P Parameter: Tissue Value: Aerial
  misc_feature: MA Experiment 20000072 PARAMETER Experiment Name: At_100uM_ABA_Mutants_cDNA_P Parameter: Treatment Value: 100uM ABA vs. No Treatment
  misc_feature: MA Experiment ID: 20000086 Result: Down-regulated in Transcription
  misc_feature: MA Experiment 20000086 PARAMETER Experiment Name: At_100uM_ABA_Mutants_cDNA_P Parameter: Plant Line Value: CS22
  misc_feature: MA Experiment 20000086 PARAMETER Experiment Name: At_100uM_ABA_Mutants_cDNA_P Parameter: Timepoint (hr) Value: 6
  misc_feature: MA Experiment 20000086 PARAMETER Experiment Name: At_100uM_ABA_Mutants_cDNA_P Parameter: Tissue Value: Aerial
  misc_feature: MA Experiment 20000086 PARAMETER Experiment Name: At_100uM_ABA_Mutants_cDNA_P Parameter: Treatment Value: 100uM ABA vs. No Treatment
  misc_feature: MA Experiment ID: 20000087 Result: Down-regulated in Transcription
  misc_feature: MA Experiment 20000087 PARAMETER Experiment Name: At_100uM_ABA_Mutants_cDNA_P Parameter: Plant Line Value: WS
  misc_feature: MA Experiment 20000087 PARAMETER Experiment Name: At_100uM_ABA_Mutants_cDNA_P Parameter: Timepoint (hr) Value: 6
  misc_feature: MA Experiment 20000087 PARAMETER Experiment Name: At_100uM_ABA_Mutants_cDNA_P Parameter: Tissue Value: Aerial
  misc_feature: MA Experiment 20000087 PARAMETER Experiment Name: At_100uM_ABA_Mutants_cDNA_P Parameter: Treatment Value: 100uM ABA vs. No Treatment
  misc_feature: MA Experiment ID: 20000088 Result: Down-regulated in Transcription
  misc_feature: MA Experiment 20000088 PARAMETER Experiment Name: At_100uM_ABA_Mutants_cDNA_P Parameter: Plant Line Value: Landsberg
  misc_feature: MA Experiment 20000088 PARAMETER Experiment Name: At_100uM_ABA_Mutants_cDNA_P Parameter: Timepoint (hr) Value: 6
  misc_feature: MA Experiment 20000088 PARAMETER Experiment Name: At_100uM_ABA_Mutants_cDNA_P Parameter: Tissue Value: Aerial
  misc_feature: MA Experiment 20000088 PARAMETER Experiment Name: At_100uM_ABA_Mutants_cDNA_P Parameter: Treatment Value: 100uM ABA vs. No Treatment
  misc_feature: MA Experiment ID: 20000090 Result: Down-regulated in Transcription
  misc_feature: MA Experiment ID: 20000111 Result: Up-regulated in Transcription
  misc_feature: MA Experiment 20000111 PARAMETER Experiment Name: At_42deg_Heat_cDNA_P Parameter: Temperature (deg C) Value: 42 vs. 22
  misc_feature: MA Experiment 20000111 PARAMETER Experiment Name: At_42deg_Heat_cDNA_P Parameter: Timepoint (hr) Value: 6
  misc_feature: MA Experiment 20000111 PARAMETER Experiment Name: At_42deg_Heat_cDNA_P Parameter: Tissue Value: Aerial
  misc_feature: MA Experiment ID: 20000113 Result: Up-regulated in Transcription
  misc_feature: MA Experiment 20000113 PARAMETER Experiment Name: At_42deg_Heat_cDNA_P Parameter: Temperature (deg C) Value: 42 vs. 22
  misc_feature: MA Experiment 20000113 PARAMETER Experiment Name: At_42deg_Heat_cDNA_P Parameter: Timepoint (hr) Value: 8
  misc_feature: MA Experiment 20000113 PARAMETER Experiment Name: At_42deg_Heat_cDNA_P Parameter: Tissue Value: Aerial
  misc_feature: MA Experiment ID: 20000117 Result: Down-regulated in Transcription
  misc_feature: MA Experiment 20000117 PARAMETER Experiment Name: At_100uM_ABA_Mutants_cDNA_P Parameter: Plant Line Value: Columbia
  misc_feature: MA Experiment 20000117 PARAMETER Experiment Name: At_100uM_ABA_Mutants_cDNA_P Parameter: Timepoint (hr) Value: 6
  misc_feature: MA Experiment 20000117 PARAMETER Experiment Name: At_100uM_ABA_Mutants_cDNA_P Parameter: Tissue Value: Aerial
  misc_feature: MA Experiment 20000117 PARAMETER Experiment Name: At_100uM_ABA_Mutants_cDNA_P Parameter: Treatment Value: 100uM ABA vs. No Treatment
  misc_feature: MA Experiment ID: 20000179 Result: Up-regulated in Transcription
  misc_feature: MA Experiment 20000179 PARAMETER Experiment Name: At_Germinating_Seeds_P Parameter: Age (hr) Value: 6 vs. 0
  misc_feature: MA Experiment 20000179 PARAMETER Experiment Name: At_Germinating_Seeds_P Parameter: Tissue Value: Germinating Seeds
  misc_feature: MA Experiment ID: 20000436 Result: Up-regulated in Transcription
  misc_feature: MA Experiment 20000436 PARAMETER Experiment Name: At_Drought_P Parameter: Age (day) Value: 7
  misc_feature: MA Experiment 20000436 PARAMETER Experiment Name: At_Drought_P Parameter: Organism Value: A. thaliana
  misc_feature: MA Experiment 20000436 PARAMETER Experiment Name: At_Drought_P Parameter: Plant Line Value: WS
  misc_feature: MA Experiment 20000436 PARAMETER Experiment Name: At_Drought_P Parameter: Timepoint (hr) Value: 12
  misc_feature: MA Experiment 20000436 PARAMETER Experiment Name: At_Drought_P Parameter: Tissue Value: Whole Plant
  misc_feature: MA Experiment 20000436 PARAMETER Experiment Name: At_Drought_P Parameter: Treatment Value: Drought vs. No Drought
  misc_feature: MA Experiment ID: 20000437 Result: Up-regulated in Transcription
  misc_feature: MA Experiment 20000437 PARAMETER Experiment Name: At_Drought_P Parameter: Age (day) Value: 8
  misc_feature: MA Experiment 20000437 PARAMETER Experiment Name: At_Drought_P Parameter: Organism Value: A. thaliana
  misc_feature: MA Experiment 20000437 PARAMETER Experiment Name: At_Drought_P Parameter: Plant Line Value: WS
  misc_feature: MA Experiment 20000437 PARAMETER Experiment Name: At_Drought_P Parameter: Timepoint (hr) Value: 24
  misc_feature: MA Experiment 20000437 PARAMETER Experiment Name: At_Drought_P Parameter: Tissue Value: Whole Plant
  misc_feature: MA Experiment 20000437 PARAMETER Experiment Name: At_Drought_P Parameter: Treatment Value: Drought vs. No Drought
  misc_feature: MA Experiment ID: 20000453 Result: Up-regulated in Transcription
  misc_feature: MA Experiment 20000453 PARAMETER Experiment Name: At_100uM_ABA_P Parameter: Age (day) Value: 15
  misc_feature: MA Experiment 20000453 PARAMETER Experiment Name: At_100uM_ABA_P Parameter: Organism Value: A. thaliana
  misc_feature: MA Experiment 20000453 PARAMETER Experiment Name: At_100uM_ABA_P Parameter: Plant Line Value: WS
  misc_feature: MA Experiment 20000453 PARAMETER Experiment Name: At_100uM_ABA_P Parameter: Timepoint (hr) Value: 24
  misc_feature: MA Experiment 20000453 PARAMETER Experiment Name: At_100uM_ABA_P Parameter: Tissue Value: Aerial
  misc_feature: MA Experiment 20000453 PARAMETER Experiment Name: At_100uM_ABA_P Parameter: Treatment Value: 100uM ABA vs. No Treatment
  misc_feature: MA Experiment ID: 20000794 Result: Up-regulated in Transcription
  misc_feature: MA Experiment 20000794 PARAMETER Experiment Name: At_Petals_P Parameter: Age (day) Value: 23-25 days
  misc_feature: MA Experiment 20000794 PARAMETER Experiment Name: At_Petals_P Parameter: Plant Line Value: WS
  misc_feature: MA Experiment 20000794 PARAMETER Experiment Name: At_Petals_P Parameter: Tissue Value: Petals vs. Whole plant
  misc_feature: MA Experiment ID: 20001560 Result: Down-regulated in Transcription
  misc_feature: MA Experiment 20001560 PARAMETER Experiment Name: At_Drought_Soil_Dry_P Parameter: Age (day) Value: 28
  misc_feature: MA Experiment 20001560 PARAMETER Experiment Name: At_Drought_Soil_Dry_P Parameter: Organism Value: A. thaliana
  misc_feature: MA Experiment 20001560 PARAMETER Experiment Name: At_Drought_Soil_Dry_P Parameter: Plant Line Value: WS
  misc_feature: MA Experiment 20001560 PARAMETER Experiment Name: At_Drought_Soil_Dry_P Parameter: Post Timepoint (hr) Value: None
  misc_feature: MA Experiment 20001560 PARAMETER Experiment Name: At_Drought_Soil_Dry_P Parameter: Post-Treatment Value: None
  misc_feature: MA Experiment 20001560 PARAMETER Experiment Name: At_Drought_Soil_Dry_P Parameter: Timepoint (day) Value: 14
  misc_feature: MA Experiment 20001560 PARAMETER Experiment Name: At_Drought_Soil_Dry_P Parameter: Treatment Value: Drought vs. No Drought
  misc_feature: MA Experiment ID: 20001905 Result: Down-regulated in Transcription
  misc_feature: MA Experiment 20001905 PARAMETER Experiment Name: At_Drought_Reproduction_P Parameter: Age (day) Value: 40
  misc_feature: MA Experiment 20001905 PARAMETER Experiment Name: At_Drought_Reproduction_P Parameter: Organism Value: A. thaliana
  misc_feature: MA Experiment 20001905 PARAMETER Experiment Name: At_Drought_Reproduction_P Parameter: Plant Line Value: WS
  misc_feature: MA Experiment 20001905 PARAMETER Experiment Name: At_Drought_Reproduction_P Parameter: Timepoint (day) Value: 10
  misc_feature: MA Experiment 20001905 PARAMETER Experiment Name: At_Drought_Reproduction_P Parameter: Tissue Value: Rosettes
  misc_feature: MA Experiment 20001905 PARAMETER Experiment Name: At_Drought_Reproduction_P Parameter: Treatment Value: Drought vs. No Drought
gcaacacataacccactcacagaaaaacctagaaagctctagagagaaagagagagagagatggaaggtaaagaagaagatgttagagtcggagctaacaagtttccggagaggcaaccgatcggaacttcggctcagagtgacaaggactacaaagagccaccacctgcgccgttgttcgagcccggcgagctagcttcatggtccttctggagagctgggattgctgagtttatagctacgtttttgttcctgtacatcactgttttgactgttatgggtgtgaagaggtcaccgaacatgtgtgcttccgtcggaatccaaggtatcgcttgggctttcggtggtatgatcttcgctctcgtctactgcaccgctggtatctccggtggacacatcaacccagcggttacgttcggtttgttcttagctaggaagctttcgctcacacgagctgtgtactacatagtgatgcagtgcttaggagctatctgtggagctggtgtggtcaaggggttccagccaaagcaataccaggctttgggaggtggagccaacaccatagctcatggctacaccaaaggaagtggtcttggagctgagattattggaacctttgtccttgtttacaccgtcttctctgccactgatgccaagagaaacgctcgtgactctcatgttcctattctagcaccgctccctatcggattcgctgtgttcttggttcacttagcaaccatccccattactggaactggaatcaacccagcaagaagtcttggagctgcaatcatcttcaacaaggacaacgcttgggatgaccactgggtcttttgggttggaccattcattggtgctgcacttgctgctctctaccacgttatagtcatcagagccatcccattcaagtccagaagctaaagctgattgagttctatttaaaatctggcttttgttcttagtttgctttcttttgtgaatctactacctgtgtgtaacgtgtgtatctgttgtcctcttctttgcctaatggagacttatgtaaaacaaataaaaaaaaaaaaaaaagagctcttggatccgagttatttaagccaggtatcaaaaacattcaaggacgtgaaccagacgattcaagaacatggaccgtgggcttctccttgggttggagaatctggtggagcttacaatagtggtggccgtcatgtttctgacacattcatagatagcttctggtatctagatcagcttggaatgtcagcgagacacaacactaaagtttactgcagacagactttggttggagggttttacggcttgctcgaaaagggaacgtttgttccaaatcctgattactatagcgcgctgctttggcatcgtttaatgggaaaaggggttcttgcggtgcagacagatggaccgccacagctacgggtttacgcacattgttcaaaaggaagagccggtgtgacattgctactgataaatctaagcaatcaatcggattttacggttagtgtcagcaatggcataaacgtggttttgaatgcggaatcaaggaagaagaagtcattgttggatactttaaaaagaccattttcttggattggaagcaaagcttctgatggatatttgaatagagaagagtatcatctgacaccagaaaacggtgtgttgcgcagcaaaacaatggtcttgaatggtaaatcgttaaaaccgacggcaacaggagatatcccgagccttgaaccggtcctccgtagtgtgaactctccgcttaatgtcttgccattgtcgatgtcgttcattgtgttacctaattttgatgcttctgcttgttcatgatgttaatggggtctctctttgcttattgggaaaaaataaataaaaataaagaatagttgtaattaaac

SEQ ID NO: 76085 - protein, 286 aa, Arabidopsis thaliana; identical to SEQ ID NO: 39702
  peptide (1)..(286): Ceres Seq. ID no. 7105000
  misc_feature (44)..(273): Pfam Name: Major intrinsic protein Pfam Description: Major intrinsic protein
  misc_feature (1)..(286): Homolog of NCBI NO: 15225913 NR Description: aquaporin (plasma membrane intrinsic protein 1B); id: At2g45960.1, supported by cDNA: 108944., supported by cDNA: supported by cDNA: gi_17380949, supported by cDNA: membrane
  misc_feature (1)..(286): Homolog of NCBI NO: 10799093 NR Description: aquaporin PIP1b1 [Brassica oleracea]
  misc_feature (1)..(286): Homolog of NCBI NO: 10799095 NR Description: aquaporin PIP1b2 [Brassica oleracea]
  misc_feature (1)..(286): Homolog of NCBI NO: 4467357 NR Description: PIP1b protein [Arabidopsis thaliana]
  misc_feature (1)..(286): Homolog of NCBI NO: 1199804 NR Description: transmembrane channel protein [Brassica oleracea]
  misc_feature (1)..(286): Homolog of NCBI NO: 7209556 NR Description: plasma membrane aquaporin 1b [Raphanus sativus]
  misc_feature (1)..(286): Homolog of NCBI NO: 1199503 NR Description: transmembrane channel protein [Brassica oleracea]
  misc_feature (1)..(286): Homolog of NCBI NO: 2199574 NR Description: aquaporin [Brassica rapa]
  misc_feature (1)..(286): Homolog of NCBI NO: 21536709 NR Description: aquaporin (plasma membrane intrinsic protein 1B)
  misc_feature (1)..(286): Homolog of NCBI NO: 15233109 NR Description: plasma membrane intrinsic protein 1a; protein id: supported by cDNA: 6690., supported by cDNA: gi_16648674, by cDNA: gi_20453350 [Arabidopsis thaliana]

SEQ ID NO: 76086 - protein, 271 aa, Arabidopsis thaliana
  peptide (1)..(271): Ceres Seq. ID no. 7105001
  misc_feature (13)..(75): Pfam Name: Glycosyl hydrolase family 79, N-terminal domain Pfam Description: Glycosyl hydrolase family 79, N-terminal domain
  misc_feature (13)..(271): Homolog of NCBI NO: 10176717 NR Description: contains similarity to heparanase~gene_id:MXM12.7
  misc_feature (13)..(271): Homolog of NCBI NO: 15240869 NR Description: glycosyl hydrolase family 79 (endo-beta-
  misc_feature (10)..(271): Homolog of NCBI NO: 9757846 NR Description: contains similarity to heparanase~gene_id:MFB13.2
  misc_feature (10)..(271): Homolog of NCBI NO: 22327999 NR Description: glycosyl hydrolase family 79 (endo-beta- protein id: At5g61250.1, supported by cDNA: gi_20466539 thaliana] >gi|20466540|gb|AAM20587.1| putative protein
  misc_feature (13)..(271): Homolog of NCBI NO: 24413987 NR Description: contains ESTs
  misc_feature (12)..(164): Homolog of NCBI NO: 8918740 NR Description: beta-glucuronidase precursor [Scutellaria
  misc_feature (165)..(270): Homolog of NCBI NO: 8918740 NR Description: beta-glucuronidase precursor [Scutellaria
  misc_feature (5)..(221): Homolog of NCBI NO: 23027854 NR Description: hypothetical protein [Microbulbifer degradans
  misc_feature (16)..(162): Homolog of NCBI NO: 27381913 NR Description: blr6802 [Bradyrhizobium japonicum]
METYVKQIKKKKKELLDPSYLSQVSKTFKDVNQTIQEHGPWASPWVGESGGAYNSGGRHVSDTFIDSFWYLDQLGMSARHNTKVYCRQTLVGGFYGLLEKGTFVPNPDYYSALLWHRLMGKGVLAVQTDGPPQLRVYAHCSKGRAGVTLLLINLSNQSDFTVSVSNGINVVLNAESRKKKSLLDTLKRPFSWIGSKASDGYLNREEYHLTPENGVLRSKTMVLNGKSLKPTATGDIPSLEPVLRSVNSPLNVLPLSMSFIVLPNFDASACS

SEQ ID NO: 76087 - protein, 214 aa, Arabidopsis thaliana; identical to SEQ ID NO: 39703
  peptide (1)..(214): Ceres Seq. ID no. 7105002
  misc_feature (1)..(201): Pfam Name: Major intrinsic protein Pfam Description: Major intrinsic protein
  misc_feature (1)..(214): Homolog of NCBI NO: 15225913 NR Description: aquaporin (plasma membrane intrinsic protein 1B); id: At2g45960.1, supported by cDNA: 108944., supported by cDNA: supported by cDNA: gi_17380949, supported by cDNA: membrane
  misc_feature (1)..(214): Homolog of NCBI NO: 10799093 NR Description: aquaporin PIP1b1 [Brassica oleracea]
  misc_feature (1)..(214): Homolog of NCBI NO: 10799095 NR Description: aquaporin PIP1b2 [Brassica oleracea]
  misc_feature (1)..(214): Homolog of NCBI NO: 4467357 NR Description: PIP1b protein [Arabidopsis thaliana]
  misc_feature (1)..(214): Homolog of NCBI NO: 1199804 NR Description: transmembrane channel protein [Brassica oleracea]
  misc_feature (1)..(214): Homolog of NCBI NO: 7209556 NR Description: plasma membrane aquaporin 1b [Raphanus sativus]
  misc_feature (1)..(214): Homolog of NCBI NO: 1199503 NR Description: transmembrane channel protein [Brassica oleracea]
  misc_feature (1)..(214): Homolog of NCBI NO: 2199574 NR Description: aquaporin [Brassica rapa]
  misc_feature (1)..(214): Homolog of NCBI NO: 21536709 NR Description: aquaporin (plasma membrane intrinsic protein 1B)
  misc_feature (1)..(214): Homolog of NCBI NO: 15233109 NR Description: plasma membrane intrinsic protein 1a; protein id: supported by cDNA: 6690., supported by cDNA: gi_16648674, by cDNA: gi_20453350 [Arabidopsis thaliana]

SEQ ID NO: 76088 - DNA, 1744 bp, Arabidopsis thaliana
  misc_feature (1)..(1744): Ceres Seq. ID no. 7105012
  misc_feature: MA Experiment ID: 20000180 Result: Up-regulated in Transcription
  misc_feature: MA Experiment 20000180 PARAMETER Experiment Name: At_Germinating_Seeds_P Parameter: Age (hr) Value: 24 vs. 0
  misc_feature: MA Experiment 20000180 PARAMETER Experiment Name: At_Germinating_Seeds_P Parameter: Tissue Value: Germinating Seeds
  misc_feature: MA Experiment ID: 20000267 Result: Up-regulated in Transcription
  misc_feature: MA Experiment 20000267 PARAMETER Experiment Name: At_Drought_P Parameter: Age (day) Value: 7
  misc_feature: MA Experiment 20000267 PARAMETER Experiment Name: At_Drought_P Parameter: Organism Value: A. thaliana
  misc_feature: MA Experiment 20000267 PARAMETER Experiment Name: At_Drought_P Parameter: Plant Line Value: WS
  misc_feature: MA Experiment 20000267 PARAMETER Experiment Name: At_Drought_P Parameter: Timepoint (hr) Value: 6
  misc_feature: MA Experiment 20000267 PARAMETER Experiment Name: At_Drought_P Parameter: Tissue Value: Whole Plant
  misc_feature: MA Experiment 20000267 PARAMETER Experiment Name: At_Drought_P Parameter: Treatment Value: Drought vs. No Drought
  misc_feature: MA Experiment ID: 20000268 Result: Up-regulated in Transcription
  misc_feature: MA Experiment 20000268 PARAMETER Experiment Name: At_100mM_NaCl__P Parameter: Age (day) Value: 14
  misc_feature: MA Experiment 20000268 PARAMETER Experiment Name: At_100mM_NaCl__P Parameter: Organism Value: A. thaliana
  misc_feature: MA Experiment 20000268 PARAMETER Experiment Name: At_100mM_NaCl__P Parameter: Plant Line Value: WS
  misc_feature: MA Experiment 20000268 PARAMETER Experiment Name: At_100mM_NaCl__P Parameter: Timepoint (hr) Value: 6
  misc_feature: MA Experiment 20000268 PARAMETER Experiment Name: At_100mM_NaCl__P Parameter: Tissue Value: Whole Plant
  misc_feature: MA Experiment 20000268 PARAMETER Experiment Name: At_100mM_NaCl__P Parameter: Treatment Value: 100mM NaCl vs. No Treatment
  misc_feature: MA Experiment ID: 20000436 Result: Up-regulated in Transcription
  misc_feature: MA Experiment 20000436 PARAMETER Experiment Name: At_Drought_P Parameter: Age (day) Value: 7
  misc_feature: MA Experiment 20000436 PARAMETER Experiment Name: At_Drought_P Parameter: Organism Value: A. thaliana
  misc_feature: MA Experiment 20000436 PARAMETER Experiment Name: At_Drought_P Parameter: Plant Line Value: WS
  misc_feature: MA Experiment 20000436 PARAMETER Experiment Name: At_Drought_P Parameter: Timepoint (hr) Value: 12
  misc_feature: MA Experiment 20000436 PARAMETER Experiment Name: At_Drought_P Parameter: Tissue Value: Whole Plant
  misc_feature: MA Experiment 20000436 PARAMETER Experiment Name: At_Drought_P Parameter: Treatment Value: Drought vs. No Drought
  misc_feature: MA Experiment ID: 20000437 Result: Up-regulated in Transcription
  misc_feature: MA Experiment 20000437 PARAMETER Experiment Name: At_Drought_P Parameter: Age (day) Value: 8
  misc_feature: MA Experiment 20000437 PARAMETER Experiment Name: At_Drought_P Parameter: Organism Value: A. thaliana
  misc_feature: MA Experiment 20000437 PARAMETER Experiment Name: At_Drought_P Parameter: Plant Line Value: WS
  misc_feature: MA Experiment 20000437 PARAMETER Experiment Name: At_Drought_P Parameter: Timepoint (hr) Value: 24
  misc_feature: MA Experiment 20000437 PARAMETER Experiment Name: At_Drought_P Parameter: Tissue Value: Whole Plant
  misc_feature: MA Experiment 20000437 PARAMETER Experiment Name: At_Drought_P Parameter: Treatment Value: Drought vs. No Drought
  misc_feature: MA Experiment ID: 20000453 Result: Up-regulated in Transcription
  misc_feature: MA Experiment 20000453 PARAMETER Experiment Name: At_100uM_ABA_P Parameter: Age (day) Value: 15
  misc_feature: MA Experiment 20000453 PARAMETER Experiment Name: At_100uM_ABA_P Parameter: Organism Value: A. thaliana
  misc_feature: MA Experiment 20000453 PARAMETER Experiment Name: At_100uM_ABA_P Parameter: Plant Line Value: WS
  misc_feature: MA Experiment 20000453 PARAMETER Experiment Name: At_100uM_ABA_P Parameter: Timepoint (hr) Value: 24
  misc_feature: MA Experiment 20000453 PARAMETER Experiment Name: At_100uM_ABA_P Parameter: Tissue Value: Aerial
  misc_feature: MA Experiment 20000453 PARAMETER Experiment Name: At_100uM_ABA_P Parameter: Treatment Value: 100uM ABA vs. No Treatment
  misc_feature: MA Experiment ID: 20001248 Result: Down-regulated in Transcription
  misc_feature: MA Experiment 20001248 PARAMETER Experiment Name: At_Far-red-induction_P Parameter: Age (day) Value: 7
  misc_feature: MA Experiment 20001248 PARAMETER Experiment Name: At_Far-red-induction_P Parameter: Light Value: Far-red vs. White
  misc_feature: MA Experiment 20001248 PARAMETER Experiment Name: At_Far-red-induction_P Parameter: Organism Value: A. thaliana
  misc_feature: MA Experiment 20001248 PARAMETER Experiment Name: At_Far-red-induction_P Parameter: Plant Line Value: Columbia
  misc_feature: MA Experiment 20001248 PARAMETER Experiment Name: At_Far-red-induction_P Parameter: Timepoint (hr) Value: 4
  misc_feature: MA Experiment 20001248 PARAMETER Experiment Name: At_Far-red-induction_P Parameter: Tissue Value: Whole Plant
  misc_feature: MA Experiment ID: 20001554 Result: Up-regulated in Transcription
  misc_feature: MA Experiment 20001554 PARAMETER Experiment Name: At_Drought_Soil_Dry_P Parameter: Age (day) Value: 21
  misc_feature: MA Experiment 20001554 PARAMETER Experiment Name: At_Drought_Soil_Dry_P Parameter: Organism Value: A. thaliana
  misc_feature: MA Experiment 20001554 PARAMETER Experiment Name: At_Drought_Soil_Dry_P Parameter: Plant Line Value: WS
  misc_feature: MA Experiment 20001554 PARAMETER Experiment Name: At_Drought_Soil_Dry_P Parameter: Post Timepoint (hr) Value: None
  misc_feature: MA Experiment 20001554 PARAMETER Experiment Name: At_Drought_Soil_Dry_P Parameter: Post-Treatment Value: None
  misc_feature: MA Experiment 20001554 PARAMETER Experiment Name: At_Drought_Soil_Dry_P Parameter: Timepoint (day) Value: 7
  misc_feature: MA Experiment 20001554 PARAMETER Experiment Name: At_Drought_Soil_Dry_P Parameter: Treatment Value: Drought vs. No Drought
  misc_feature: MA Experiment ID: 20001555 Result: Up-regulated in Transcription
  misc_feature: MA Experiment 20001555 PARAMETER Experiment Name: At_Drought_Soil_Dry_P Parameter: Age (day) Value: 24
  misc_feature: MA Experiment 20001555 PARAMETER Experiment Name: At_Drought_Soil_Dry_P Parameter: Organism Value: A. thaliana
  misc_feature: MA Experiment 20001555 PARAMETER Experiment Name: At_Drought_Soil_Dry_P Parameter: Plant Line Value: WS
  misc_feature: MA Experiment 20001555 PARAMETER Experiment Name: At_Drought_Soil_Dry_P Parameter: Post Timepoint (hr) Value: None
  misc_feature: MA Experiment 20001555 PARAMETER Experiment Name: At_Drought_Soil_Dry_P Parameter: Post-Treatment Value: None
  misc_feature: MA Experiment 20001555 PARAMETER Experiment Name: At_Drought_Soil_Dry_P Parameter: Timepoint (day) Value: 10
  misc_feature: MA Experiment 20001555 PARAMETER Experiment Name: At_Drought_Soil_Dry_P Parameter: Treatment Value: Drought vs. No Drought
  misc_feature: MA Experiment ID: 20001556 Result: Up-regulated in Transcription
  misc_feature: MA Experiment 20001556 PARAMETER Experiment Name: At_Drought_Soil_Dry_P Parameter: Age (day) Value: 26
  misc_feature: MA Experiment 20001556 PARAMETER Experiment Name: At_Drought_Soil_Dry_P Parameter: Organism Value: A. thaliana
  misc_feature: MA Experiment 20001556 PARAMETER Experiment Name: At_Drought_Soil_Dry_P Parameter: Plant Line Value: WS
  misc_feature: MA Experiment 20001556 PARAMETER Experiment Name: At_Drought_Soil_Dry_P Parameter: Post Timepoint (hr) Value: None
  misc_feature: MA Experiment 20001556 PARAMETER Experiment Name: At_Drought_Soil_Dry_P Parameter: Post-Treatment Value: None
  misc_feature: MA Experiment 20001556 PARAMETER Experiment Name: At_Drought_Soil_Dry_P Parameter: Timepoint (day) Value: 12
  misc_feature: MA Experiment 20001556 PARAMETER Experiment Name: At_Drought_Soil_Dry_P Parameter: Treatment Value: Drought vs. No Drought
  misc_feature: MA Experiment ID: 20001559 Result: Up-regulated in Transcription
  misc_feature: MA Experiment 20001559 PARAMETER Experiment Name: At_Drought_Soil_Dry_P Parameter: Age (day) Value: 28
  misc_feature: MA Experiment 20001559 PARAMETER Experiment Name: At_Drought_Soil_Dry_P Parameter: Organism Value: A. thaliana
  misc_feature: MA Experiment 20001559 PARAMETER Experiment Name: At_Drought_Soil_Dry_P Parameter: Plant Line Value: WS
  misc_feature: MA Experiment 20001559 PARAMETER Experiment Name: At_Drought_Soil_Dry_P Parameter: Post Timepoint (hr) Value: 29
  misc_feature: MA Experiment 20001559 PARAMETER Experiment Name: At_Drought_Soil_Dry_P Parameter: Post-Treatment Value: Re-Water vs. No Drought
  misc_feature: MA Experiment 20001559 PARAMETER Experiment Name: At_Drought_Soil_Dry_P Parameter: Timepoint (day) Value: 14
  misc_feature: MA Experiment 20001559 PARAMETER Experiment Name: At_Drought_Soil_Dry_P Parameter: Treatment Value: Drought vs. No Drought
  misc_feature: MA Experiment ID: 20001905 Result: Up-regulated in Transcription
  misc_feature: MA Experiment 20001905 PARAMETER Experiment Name: At_Drought_Reproduction_P Parameter: Age (day) Value: 40
  misc_feature: MA Experiment 20001905 PARAMETER Experiment Name: At_Drought_Reproduction_P Parameter: Organism Value: A. thaliana
  misc_feature: MA Experiment 20001905 PARAMETER Experiment Name: At_Drought_Reproduction_P Parameter: Plant Line Value: WS
  misc_feature: MA Experiment 20001905 PARAMETER Experiment Name: At_Drought_Reproduction_P Parameter: Timepoint (day) Value: 10
  misc_feature: MA Experiment 20001905 PARAMETER Experiment Name: At_Drought_Reproduction_P Parameter: Tissue Value: Rosettes
  misc_feature: MA Experiment 20001905 PARAMETER Experiment Name: At_Drought_Reproduction_P Parameter: Treatment Value: Drought vs. No Drought
  misc_feature: MA Experiment ID: 20001906 Result: Up-regulated in Transcription
  misc_feature: MA Experiment 20001906 PARAMETER Experiment Name: At_Drought_Reproduction_P Parameter: Age (day) Value: 35
  misc_feature: MA Experiment 20001906 PARAMETER Experiment Name: At_Drought_Reproduction_P Parameter: Organism Value: A. thaliana
  misc_feature: MA Experiment 20001906 PARAMETER Experiment Name: At_Drought_Reproduction_P Parameter: Plant Line Value: WS
  misc_feature: MA Experiment 20001906 PARAMETER Experiment Name: At_Drought_Reproduction_P Parameter: Timepoint (day) Value: 5
  misc_feature: MA Experiment 20001906 PARAMETER Experiment Name: At_Drought_Reproduction_P Parameter: Tissue Value: Siliques
  misc_feature: MA Experiment 20001906 PARAMETER Experiment Name: At_Drought_Reproduction_P Parameter: Treatment Value: Drought vs. No Drought
  misc_feature: MA Experiment ID: 20001908 Result: Up-regulated in Transcription
  misc_feature: MA Experiment 20001908 PARAMETER Experiment Name: At_Drought_Reproduction_P Parameter: Age (day) Value: 40
  misc_feature: MA Experiment 20001908 PARAMETER Experiment Name: At_Drought_Reproduction_P Parameter: Organism Value: A. thaliana
  misc_feature: MA Experiment 20001908 PARAMETER Experiment Name: At_Drought_Reproduction_P Parameter: Plant Line Value: WS
  misc_feature: MA Experiment 20001908 PARAMETER Experiment Name: At_Drought_Reproduction_P Parameter: Timepoint (day) Value: 10
  misc_feature: MA Experiment 20001908 PARAMETER Experiment Name: At_Drought_Reproduction_P Parameter: Tissue Value: Siliques
  misc_feature: MA Experiment 20001908 PARAMETER Experiment Name: At_Drought_Reproduction_P Parameter: Treatment Value: Drought vs. No Drought
  misc_feature: MA Experiment ID: 20001911 Result: Up-regulated in Transcription
  misc_feature: MA Experiment 20001911 PARAMETER Experiment Name: At_Drought_Reproduction_P Parameter: Age (day) Value: 40
  misc_feature: MA Experiment 20001911 PARAMETER Experiment Name: At_Drought_Reproduction_P Parameter: Organism Value: A. thaliana
  misc_feature: MA Experiment 20001911 PARAMETER Experiment Name: At_Drought_Reproduction_P Parameter: Plant Line Value: WS
  misc_feature: MA Experiment 20001911 PARAMETER Experiment Name: At_Drought_Reproduction_P Parameter: Timepoint (day) Value: 10
  misc_feature: MA Experiment 20001911 PARAMETER Experiment Name: At_Drought_Reproduction_P Parameter: Tissue Value: Flowers
  misc_feature: MA Experiment 20001911 PARAMETER Experiment Name: At_Drought_Reproduction_P Parameter: Treatment Value: Drought vs. No Drought
tcgattggccaaatcggccctcgagattaaacagcatcaagacaacatccaaaaattacccaggtttttgtgtttgaaactcgaagattgttgcggattcctgaaagattaaggcttttagctccaagtttccaagagtgctgtgaatcagctcccactctgtctctgcatattgcaagacaccggttttgtttcagaagtttgtttcttcttgtctcatgatcactagttttcagcaatggggtatgtaaacgtggagaagagatgggtttttcctcttgtcatcacatctctcgtctgcgttttccttcttgcaacttctttcaacatgggactagtctcttccctccgaacaatcaacgggattttctccatcataccttcccgtctcgtcaagaaccaaacgagacttgattttgcagagtctaaagttgctagacaaacccgtgttttgcctcatgaagacaagcttccccgttttgcataccttgtttccgggtctaaaggggatgtagaaaagctttggagaacacttagagcagtgtaccatccaagaaaccagtatgttgttcacttggatcttgaatcacctgtgaatgagagattagagctggcctctcggattaataacgatcctatgtactctaaaaccgggaatgtatatatgataaccaagactaaccttgtgacatataaaggaccaacgatggtggcaaatactcttcacgcttgtgctgttcttctcaagagaaatgcgaactgggattggtttattaaccttagtgcttcagattatcctctggtgacccaagatgatctgcttcatacgttttcaacattggaccggaacctcaactttatcgaacacacaagtcaactgggatggaaagaggagaagcgagcacagccattaatgattgatcctggactctacttgttgaacaaatctgatatttactgggtcacacctcgccgaagtttgccaactgcctttaagttattcactggatcagcttggatggctctatcacgcccgtttgtagagtattgcatatggggatgggacaatttaccacgaactctcctaatgtattacaccaacttcgtttcatcgcccgaaggttacttccagaccgtgatttgcaacgtgcctgagtttgcaaaaactgcagtaaaccatgacctacactacatttcctgggacaatccgccgcagcagcacccacacgtgttgtcactcaacgacacaatgccgatgatatggagcggtgctgcgtttgctaggaaattcagaagagatgatgaagtacttaataagatcgataaggaattacttaaacggaggaatgataaagatagttttactcctggtggatggtgcagtgggaaaccaaaatgctccagggtcggtaatgtggctaagattgttcctagctttggagctcagaggcttcaaggacttgtgaccaggttagtcaacgaagctaatacaggagttagtcagtgtaaatagaaagaattcgaagaaaaaaagaaccattatcgaagtaatggagagcgactgtcatgatatatatatttatacaacatatagagaatcttgcagttgcaggctttagataagactattagacattgtttgcattgagtagagatgccttgtaatgccacgacctactgggattcatttttgtttgtttgaagtcatctccttcaaaatccaataaaattataaccttttttt

SEQ ID NO: 76089 - protein, 424 aa, Arabidopsis thaliana
  peptide (1)..(424): Ceres Seq. ID no. 7105013
  misc_feature (81)..(306): Pfam Name: Core-2/I-Branching enzyme Pfam Description: Core-2/I-Branching enzyme
  misc_feature (1)..(424): Homolog of NCBI NO: 15146308 NR Description: AT3g15350/K7L4_15 [Arabidopsis thaliana]
  misc_feature (1)..(424): Homolog of NCBI NO: 18400725 NR Description: N-acetylglucosaminyltransferase family enzyme family); protein id: At3g15350.1, supported by cDNA:
  misc_feature (6)..(423): Homolog of NCBI NO: 15219202 NR Description: N-acetylglucosaminyltransferase family
  misc_feature (1)..(424): Homolog of NCBI NO: 30687610 NR Description: N-acetylglucosaminyltransferase family
  misc_feature (31)..(424): Homolog of NCBI NO: 7486258 NR Description: hypothetical protein F27G19.80 - Arabidopsis >gi|4972073|emb|CAB43880.1| putative protein [Arabidopsis >gi|7269602|emb|CAB81398.1| putative protein [Arabidopsis
  misc_feature (1)..(424): Homolog of NCBI NO: 15242532 NR Description: N-acetylglucosaminyltransferase family
  misc_feature (5)..(424): Homolog of NCBI NO: 15242199 NR Description: N-acetylglucosaminyltransferase family enzyme family); protein id: At5g15050.1, supported by cDNA: supported by cDNA: gi_16209673 [Arabidopsis thaliana]
  misc_feature (42)..(424): Homolog of NCBI NO: 34903664 NR Description: B1015E06.17 [Oryza sativa (japonica
  misc_feature (7)..(415): Homolog of NCBI NO: 15218824 NR Description: N-acetylglucosaminyltransferase family enzyme family); protein id: At1g03520.1, supported by cDNA: supported by cDNA: gi_20465790 [Arabidopsis thaliana] thaliana
  misc_feature (7)..(423): Homolog of NCBI NO: 15236287 NR Description: N-acetylglucosaminyltransferase family
MGYVNVEKRWVFPLVITSLVCVFLLATSFNMGLVSSLRTINGIFSIIPSRLVKNQTRLDFAESKVARQTRVLPHEDKLPRFAYLVSGSKGDVEKLWRTLRAVYHPRNQYVVHLDLESPVNERLELASRINNDPMYSKTGNVYMITKTNLVTYKGPTMVANTLHACAVLLKRNANWDWFINLSASDYPLVTQDDLLHTFSTLDRNLNFIEHTSQLGWKEEKRAQPLMIDPGLYLLNKSDIYWVTPRRSLPTAFKLFTGSAWMALSRPFVEYCIWGWDNLPRTLLMYYTNFVSSPEGYFQTVICNVPEFAKTAVNHDLHYISWDNPPQQHPHVLSLNDTMPMIWSGAAFARKFRRDDEVLNKIDKELLKRRNDKDSFTPGGWCSGKPKCSRVGNVAKIVPSFGAQRLQGLVTRLVNEANTGVSQCK

SEQ ID NO: 76090 - protein, 394 aa, Arabidopsis thaliana
  peptide (1)..(394): Ceres Seq. ID no. 7105014
  misc_feature (51)..(276): Pfam Name: Core-2/I-Branching enzyme Pfam Description: Core-2/I-Branching enzyme
  misc_feature (1)..(394): Homolog of NCBI NO: 15146308 NR Description: AT3g15350/K7L4_15 [Arabidopsis thaliana]
  misc_feature (1)..(394): Homolog of NCBI NO: 18400725 NR Description: N-acetylglucosaminyltransferase family enzyme family); protein id: At3g15350.1, supported by cDNA:
  misc_feature (1)..(393): Homolog of NCBI NO: 15219202 NR Description: N-acetylglucosaminyltransferase family
  misc_feature (1)..(394): Homolog of NCBI NO: 30687610 NR Description: N-acetylglucosaminyltransferase family
  misc_feature (1)..(394): Homolog of NCBI NO: 7486258 NR Description: hypothetical protein F27G19.80 - Arabidopsis >gi|4972073|emb|CAB43880.1| putative protein [Arabidopsis >gi|7269602|emb|CAB81398.1| putative protein [Arabidopsis
  misc_feature (1)..(394): Homolog of NCBI NO: 15242532 NR Description: N-acetylglucosaminyltransferase family
  misc_feature (1)..(394): Homolog of NCBI NO: 15242199 NR Description: N-acetylglucosaminyltransferase family enzyme family); protein id: At5g15050.1, supported by cDNA: supported by cDNA: gi_16209673 [Arabidopsis thaliana]
  misc_feature (12)..(394): Homolog of NCBI NO: 34903664 NR Description: B1015E06.17 [Oryza sativa (japonica
  misc_feature (1)..(385): Homolog of NCBI NO: 15218824 NR Description: N-acetylglucosaminyltransferase family enzyme family); protein id: At1g03520.1, supported by cDNA: supported by cDNA: gi_20465790 [Arabidopsis thaliana] thaliana
  misc_feature (1)..(393): Homolog of NCBI NO: 15236287 NR Description: N-acetylglucosaminyltransferase family
MGLVSSLRTINGIFSIIPSRLVKNQTRLDFAESKVARQTRVLPHEDKLPRFAYLVSGSKGDVEKLWRTLRAVYHPRNQYVVHLDLESPVNERLELASRINNDPMYSKTGNVYMITKTNLVTYKGPTMVANTLHACAVLLKRNANWDWFINLSASDYPLVTQDDLLHTFSTLDRNLNFIEHTSQLGWKEEKRAQPLMIDPGLYLLNKSDIYWVTPRRSLPTAFKLFTGSAWMALSRPFVEYCIWGWDNLPRTLLMYYTNFVSSPEGYFQTVICNVPEFAKTAVNHDLHYISWDNPPQQHPHVLSLNDTMPMIWSGAAFARKFRRDDEVLNKIDKELLKRRNDKDSFTPGGWCSGKPKCSRVGNVAKIVPSFGAQRLQGLVTRLVNEANTGVSQCK

SEQ ID NO: 76091 - protein, 291 aa, Arabidopsis thaliana
  peptide (1)..(291): Ceres Seq. ID no. 7105015
  misc_feature (1)..(173): Pfam Name: Core-2/I-Branching enzyme Pfam Description: Core-2/I-Branching enzyme
  misc_feature (1)..(291): Homolog of NCBI NO: 15146308 NR Description: AT3g15350/K7L4_15 [Arabidopsis thaliana]
  misc_feature (1)..(291): Homolog of NCBI NO: 18400725 NR Description: N-acetylglucosaminyltransferase family enzyme family); protein id: At3g15350.1, supported by cDNA:
  misc_feature (1)..(290): Homolog of NCBI NO: 15219202 NR Description: N-acetylglucosaminyltransferase family
  misc_feature (1)..(291): Homolog of NCBI NO: 30687610 NR Description: N-acetylglucosaminyltransferase family
  misc_feature (1)..(291): Homolog of NCBI NO: 7486258 NR Description: hypothetical protein F27G19.80 - Arabidopsis >gi|4972073|emb|CAB43880.1| putative protein [Arabidopsis >gi|7269602|emb|CAB81398.1| putative protein [Arabidopsis
  misc_feature (1)..(291): Homolog of NCBI NO: 15242532 NR Description: N-acetylglucosaminyltransferase family
  misc_feature (1)..(291): Homolog of NCBI NO: 15242199 NR Description: N-acetylglucosaminyltransferase family enzyme family); protein id: At5g15050.1, supported by cDNA: supported by cDNA: gi_16209673 [Arabidopsis thaliana]
  misc_feature (1)..(291): Homolog of NCBI NO: 34903664 NR Description: B1015E06.17 [Oryza sativa (japonica
  misc_feature (1)..(282): Homolog of NCBI NO: 15218824 NR Description: N-acetylglucosaminyltransferase family enzyme family); protein id: At1g03520.1, supported by cDNA: supported by cDNA: gi_20465790 [Arabidopsis thaliana] thaliana
  misc_feature (1)..(290): Homolog of NCBI NO: 15236287 NR Description: N-acetylglucosaminyltransferase family
MYSKTGNVYMITKTNLVTYKGPTMVANTLHACAVLLKRNANWDWFINLSASDYPLVTQDDLLHTFSTLDRNLNFIEHTSQLGWKEEKRAQPLMIDPGLYLLNKSDIYWVTPRRSLPTAFKLFTGSAWMALSRPFVEYCIWGWDNLPRTLLMYYTNFVSSPEGYFQTVICNVPEFAKTAVNHDLHYISWDNPPQQHPHVLSLNDTMPMIWSGAAFARKFRRDDEVLNKIDKELLKRRNDKDSFTPGGWCSGKPKCSRVGNVAKIVPSFGAQRLQGLVTRLVNEANTGVSQCK

SEQ ID NO: 76092 - DNA, 3181 bp, Arabidopsis thaliana
  misc_feature (1)..(3181): Ceres Seq. ID no. 7105035
  misc_feature: MA Experiment ID: 20001247 Result: Up-regulated in Transcription
  misc_feature: MA Experiment 20001247 PARAMETER Experiment Name: At_Far-red-induction_P Parameter: Age (day) Value: 7
  misc_feature: MA Experiment 20001247 PARAMETER Experiment Name: At_Far-red-induction_P Parameter: Light Value: Far-red vs. White
  misc_feature: MA Experiment 20001247 PARAMETER Experiment Name: At_Far-red-induction_P Parameter: Organism Value: A. thaliana
  misc_feature: MA Experiment 20001247 PARAMETER Experiment Name: At_Far-red-induction_P Parameter: Plant Line Value: Columbia
  misc_feature: MA Experiment 20001247 PARAMETER Experiment Name: At_Far-red-induction_P Parameter: Timepoint (hr) Value: 1
  misc_feature: MA Experiment 20001247 PARAMETER Experiment Name: At_Far-red-induction_P Parameter: Tissue Value: Whole Plant
  misc_feature: MA Experiment ID: 20001248 Result: Up-regulated in Transcription
  misc_feature: MA Experiment 20001248 PARAMETER Experiment Name: At_Far-red-induction_P Parameter: Age (day) Value: 7
  misc_feature: MA Experiment 20001248 PARAMETER Experiment Name: At_Far-red-induction_P Parameter: Light Value: Far-red vs. White
  misc_feature: MA Experiment 20001248 PARAMETER Experiment Name: At_Far-red-induction_P Parameter: Organism Value: A. thaliana
  misc_feature: MA Experiment 20001248 PARAMETER Experiment Name: At_Far-red-induction_P Parameter: Plant Line Value: Columbia
  misc_feature: MA Experiment 20001248 PARAMETER Experiment Name: At_Far-red-induction_P Parameter: Timepoint (hr) Value: 4
  misc_feature: MA Experiment 20001248 PARAMETER Experiment Name: At_Far-red-induction_P Parameter: Tissue Value: Whole Plant
  misc_feature: Pfam Name: Pkinase_Tyr Pfam Description: Protein tyrosine kinase
aaccccccgactttcctcaaatcccatcactctctttctttcgtttggtccctcaaaaactatataaaatcccaatttcccagctctattaaaaaaaccatatacgtacacacatacaaatactctctgattattttttgtatgtgtgtacgaaaacgcatagctctttgttgtctttgatcgagatttttgctgaatctatcttcgcagtgagatcgattttgttatttgatttcgtttactcgtcaatcggaagttcgatcggaaattgaatgcgtggatctgattacgatcaaatgacctccagcttaagggctactgacattaaggaaattggcaatgggagagacgggagatgatgctgggccatcagagcaaggaccttctaatcaaacctggtggccttcagaatttgtggagaaatttggttctgtttatctgggatcgcaagaagagacatctagtactaaagactcacctagaaatcttgggcaagatgggctgccatctagtactgcttcgaatattctttggagtactggttcactttctgagcccatcccaaatggcttctactctgtgatcccggataatagattgaagcagctatttaataacattcctacattggaagatcttcatgctctgggtgacgaaggtcttaaggctgatgtgattctagttgattttcagaaagataaaaagcttttcaggcagaagcagttgattaccaaacttgtcagtggattgaactcaaagccagctactattattaagaaaattgctggactggtagcagatgtttataagcaatcaactctgcagagtccagcaaaaagtacgcagtcatttgaaaactgtggtattcaactgctaggacagatcaagcatggttcttgtcgtcctcgagcaatcttgttcaaagtcttagctgatactgttggcctgcaaagtcgacttgtagtgggtttgccaagtgatggagctgctgagagtgtggactcatatagtcatatttctgtcactgttttgctgaattctgtggaaatgctggttgacctaatgcgatttcctggtcagcttattcctctatcaaccaaagcaatttttatgagtcatatctcagcggcaggggaaagtgattctgcagagaatgactcttgtgattcacctttggagccaaacagtcccatgtttggttatccagagaaatttgaccatgaaaatgcagaaaaagatgaaaacctttcgttgcacaggaaactggatgggtctccaaatacgtctggtccaccatcaaggaatatgctgttacgatctgcctctgcgctagagaggaaattaagtttctcacagagcgagtcaaacatggctaacgagttttggcggcagagccggaggaaggtcattgctgatcagcggactgctagttccagtcccgaacatctttccttccgagcccgtacaaagtccatgctaagtggcgacaagaacttggcacgagatttcaccggggatgttgccacatcaagctgcaaatctgttggaggagcaaaaatggaaactaagagaataaggaggagaagcatcagtataactcctgagattggcgatgatattgtcagggcagtacgagcgatgaatgaagccttgaagcagaatcgcctctcaaaagagcaaggggatgatgattcatctcctaactctccaaatgacagaaccgagagctctcatctccagaaaaatgtctctggttttcatcttgatgcccatgaccaagtttctggtggaaggtcgacactttcaagggaaccactagatccgcagaaggcaatctcactaccttcttctccccagaactaccgaagccaatatgaacagagtggatcgtcacatcgcaatataagccacatctgggataaagtattgggatctcccatgttccagaataagccattattaccttatgaagaatggaacatagacttctctgagctgactgttgggacacgtgtcggaattggatttttcggagaagtattccgtgggatctggaacgggacagacgttgctatcaaagtgttccttgagcaagaccttacagctgagaacatggaggatttctgcaatgagatatcaattcttagccgacttagacatcccaatgttatactgttccttggagcatgcacaaagcctccacgattatcactgatcactgagtacatggaaatgggatctttgtattacttgctccacttgagtggacaaaaaaagaggttaagctggcggaggaagctaaagatgctgcgggacatttgcaggggattgatgtgtatacaccggatggggatagtacaccgtgatataaagagtgcaaactgtcttttgagcaacaaatggacagtcaagatctgtgattttgggctgtcgagaataatgacagggacaacaatgagagacacagtctctgcaggaactccagagtggatggctcctgaacttatccgcaatgagcccttctcagaaaagtgtgatatcttcagtttaggtgtaataatgtgggagctatgcactttaaccagaccttgggaaggagtaccgcctgaacgggttgtttatgctattgcttacgagggagctcggcttgagattcctgaaggaccactgggaaagcttattgcagattgttggacagaaccggaacaaagaccgagttgcaatgagatactctctcgtttgctggattgtgagtattcgctttgctaactttctctcaatcatattttccttctgtgaatataaaactttgcagcgagagaggtttttgttttcttcgtttcttttttttgaatattgttggctttctcctttgagtttgtacaaaagaactttggcgctttcacatccacaaaaagctttgtggaactcttttccgtttaatcatttgcaaattcgtaaatttcaaaacctctgaaacaaaaaagtaagtcttataaattttacaaaaggtgagaagagttgctcattctttcagtttaaatgatcaagcttgctactctttttcgtaccataaggtttgttccctgctttgcatttgctataagaaaattacggacaaatacatgtacttttcgtttatatttcgtgccttaagaaatgaaaaggagctttgattgac

SEQ ID NO: 76093 - protein, 809 aa, Arabidopsis thaliana
  peptide (1)..(809): Ceres Seq. ID no. 7105036
  misc_feature: Pfam Name: Pkinase_Tyr Pfam Description: Protein tyrosine kinase
  misc_feature (1)..(470): Homolog of NCBI NO: 18086321 NR Description: AT3g58640/F14P22_230 [Arabidopsis thaliana]
  misc_feature (1)..(297): Homolog of NCBI NO: 34911062 NR Description: P0485G01.18 [Oryza sativa (japonica
  misc_feature (663)..(808): Homolog of NCBI NO: 34911062 NR Description: P0485G01.18 [Oryza sativa (japonica
  misc_feature (385)..(515): Homolog of NCBI NO: 34911062 NR Description: P0485G01.18 [Oryza sativa (japonica
  misc_feature (539)..(610): Homolog of NCBI NO: 34911062 NR Description: P0485G01.18 [Oryza sativa (japonica
  misc_feature (499)..(809): Homolog of NCBI NO: 30684784 NR Description: protein kinase family [Arabidopsis thaliana]
  misc_feature (438)..(809): Homolog of NCBI NO: 15227972 NR Description: putative protein kinase; protein id: At2g42630.1
  misc_feature (499)..(782): Homolog of NCBI NO: 25408119 NR Description: probable protein kinase [imported] - Arabidopsis >gi|3201626|gb|AAC20735.1| putative protein kinase [Arabidopsis
  misc_feature (1)..(297): Homolog of NCBI NO: 15224595 NR Description: hypothetical protein; protein id: At2g31000.1
  misc_feature (545)..(801): Homolog of NCBI NO: 11127921 NR Description: EDR1 [Oryza sativa]
MGETGDDAGPSEQGPSNQTWWPSEFVEKFGSVYLGSQEETSSTKDSPRNLGQDGLPSSTASNILWSTGSLSEPIPNGFYSVIPDNRLKQLFNNIPTLEDLHALGDEGLKADVILVDFQKDKKLFRQKQLITKLVSGLNSKPATIIKKIAGLVADVYKQSTLQSPAKSTQSFENCGIQLLGQIKHGSCRPRAILFKVLADTVGLQSRLVVGLPSDGAAESVDSYSHISVTVLLNSVEMLVDLMRFPGQLIPLSTKAIFMSHISAAGESDSAENDSCDSPLEPNSPMFGYPEKFDHENAEKDENLSLHRKLDGSPNTSGPPSRNMLLRSASALERKLSFSQSESNMANEFWRQSRRKVIADQRTASSSPEHLSFRARTKSMLSGDKNLARDFTGDVATSSCKSVGGAKMETKRIRRRSISITPEIGDDIVRAVRAMNEALKQNRLSKEQGDDDSSPNSPNDRTESSHLQKNVSGFHLDAHDQVSGGRSTLSREPLDPQKAISLPSSPQNYRSQYEQSGSSHRNISHIWDKVLGSPMFQNKPLLPYEEWNIDFSELTVGTRVGIGFFGEVFRGIWNGTDVAIKVFLEQDLTAENMEDFCNEISILSRLRHPNVILFLGACTKPPRLSLITEYMEMGSLYYLLHLSGQKKRLSWRRKLKMLRDICRGLMCIHRMGIVHRDIKSANCLLSNKWTVKICDFGLSRIMTGTTMRDTVSAGTPEWMAPELIRNEPFSEKCDIFSLGVIMWELCTLTRPWEGVPPERVVYAIAYEGARLEIPEGPLGKLIADCWTEPEQRPSCNEILSRLLDCEYSLC

SEQ ID NO: 76094 - protein, 573 aa, Arabidopsis thaliana
  peptide (1)..(573): Ceres Seq. ID no. 7105037
  misc_feature: Pfam Name: Pkinase_Tyr Pfam Description: Protein tyrosine kinase
  misc_feature (1)..(234): Homolog of NCBI NO: 18086321 NR Description: AT3g58640/F14P22_230 [Arabidopsis thaliana]
  misc_feature (1)..(61): Homolog of NCBI NO: 34911062 NR Description: P0485G01.18 [Oryza sativa (japonica
  misc_feature (427)..(572): Homolog of NCBI NO: 34911062 NR Description: P0485G01.18 [Oryza sativa (japonica
  misc_feature (149)..(279): Homolog of NCBI NO: 34911062 NR Description: P0485G01.18 [Oryza sativa (japonica
  misc_feature (303)..(374): Homolog of NCBI NO: 34911062 NR Description: P0485G01.18 [Oryza sativa (japonica
  misc_feature (263)..(573): Homolog of NCBI NO: 30684784 NR Description: protein kinase family [Arabidopsis thaliana]
  misc_feature (202)..(573): Homolog of NCBI NO: 15227972 NR Description: putative protein kinase; protein id: At2g42630.1
  misc_feature (263)..(546): Homolog of NCBI NO: 25408119 NR Description: probable protein kinase [imported] - Arabidopsis >gi|3201626|gb|AAC20735.1| putative protein kinase [Arabidopsis
  misc_feature (1)..(61): Homolog of NCBI NO: 15224595 NR Description: hypothetical protein; protein id: At2g31000.1
  misc_feature (309)..(565): Homolog of NCBI NO: 11127921 NR Description: EDR1 [Oryza sativa]
MLVDLMRFPGQLIPLSTKAIFMSHISAAGESDSAENDSCDSPLEPNSPMFGYPEKFDHENAEKDENLSLHRKLDGSPNTSGPPSRNMLLRSASALERKLSFSQSESNMANEFWRQSRRKVIADQRTASSSPEHLSFRARTKSMLSGDKNLARDFTGDVATSSCKSVGGAKMETKRIRRRSISITPEIGDDIVRAVRAMNEALKQNRLSKEQGDDDSSPNSPNDRTESSHLQKNVSGFHLDAHDQVSGGRSTLSREPLDPQKAISLPSSPQNYRSQYEQSGSSHRNISHIWDKVLGSPMFQNKPLLPYEEWNIDFSELTVGTRVGIGFFGEVFRGIWNGTDVAIKVFLEQDLTAENMEDFCNEISILSRLRHPNVILFLGACTKPPRLSLITEYMEMGSLYYLLHLSGQKKRLSWRRKLKMLRDICRGLMCIHRMGIVHRDIKSANCLLSNKWTVKICDFGLSRIMTGTTMRDTVSAGTPEWMAPELIRNEPFSEKCDIFSLGVIMWELCTLTRPWEGVPPERVVYAIAYEGARLEIPEGPLGKLIADCWTEPEQRPSCNEILSRLLDCEYSLC

SEQ ID NO: 76095 - protein, 568 aa, Arabidopsis thaliana
  peptide (1)..(568): Ceres Seq. ID no. 7105038
  misc_feature: Pfam Name: Pkinase_Tyr Pfam Description: Protein tyrosine kinase
  misc_feature (1)..(229): Homolog of NCBI NO: 18086321 NR Description: AT3g58640/F14P22_230 [Arabidopsis thaliana]
  misc_feature (1)..(56): Homolog of NCBI NO: 34911062 NR Description: P0485G01.18 [Oryza sativa (japonica
  misc_feature (422)..(567): Homolog of NCBI NO: 34911062 NR Description: P0485G01.18 [Oryza sativa (japonica
  misc_feature (144)..(274): Homolog of NCBI NO: 34911062 NR Description: P0485G01.18 [Oryza sativa (japonica
  misc_feature (298)..(369): Homolog of NCBI NO: 34911062 NR Description: P0485G01.18 [Oryza sativa (japonica
  misc_feature (258)..(568): Homolog of NCBI NO: 30684784 NR Description: protein kinase family [Arabidopsis thaliana]
  misc_feature (197)..(568): Homolog of NCBI NO: 15227972 NR Description: putative protein kinase; protein id: At2g42630.1
  misc_feature (258)..(541): Homolog of NCBI NO: 25408119 NR Description: probable protein kinase [imported] - Arabidopsis >gi|3201626|gb|AAC20735.1| putative protein kinase [Arabidopsis
  misc_feature (1)..(56): Homolog of NCBI NO: 15224595 NR Description: hypothetical protein; protein id: At2g31000.1
  misc_feature (304)..(560): Homolog of NCBI NO: 11127921 NR Description: EDR1 [Oryza sativa]
MRFPGQLIPLSTKAIFMSHISAAGESDSAENDSCDSPLEPNSPMFGYPEKFDHENAEKDENLSLHRKLDGSPNTSGPPSRNMLLRSASALERKLSFSQSESNMANEFWRQSRRKVIADQRTASSSPEHLSFRARTKSMLSGDKNLARDFTGDVATSSCKSVGGAKMETKRIRRRSISITPEIGDDIVRAVRAMNEALKQNRLSKEQGDDDSSPNSPNDRTESSHLQKNVSGFHLDAHDQVSGGRSTLSREPLDPQKAISLPSSPQNYRSQYEQSGSSHRNISHIWDKVLGSPMFQNKPLLPYEEWNIDFSELTVGTRVGIGFFGEVFRGIWNGTDVAIKVFLEQDLTAENMEDFCNEISILSRLRHPNVILFLGACTKPPRLSLITEYMEMGSLYYLLHLSGQKKRLSWRRKLKMLRDICRGLMCIHRMGIVHRDIKSANCLLSNKWTVKICDFGLSRIMTGTTMRDTVSAGTPEWMAPELIRNEPFSEKCDIFSLGVIMWELCTLTRPWEGVPPERVVYAIAYEGARLEIPEGPLGKLIADCWTEPEQRPSCNEILSRLLDCEYSLC

SEQ ID NO: 76096 - DNA, 2657 bp, Arabidopsis thaliana
  misc_feature (1)..(2657): Ceres Seq. ID no. 7105238
  misc_feature: MA Experiment ID: 20000314 Result: Up-regulated in Transcription
  misc_feature: MA Experiment 20000314 PARAMETER Experiment Name: At_14day_Shoots-Roots_Sub_P Parameter: Age (day) Value: 14
  misc_feature: MA Experiment 20000314 PARAMETER Experiment Name: At_14day_Shoots-Roots_Sub_P Parameter: Organism Value: A. thaliana
  misc_feature: MA Experiment 20000314 PARAMETER Experiment Name: At_14day_Shoots-Roots_Sub_P Parameter: Plant Line Value: WS
  misc_feature: MA Experiment 20000314 PARAMETER Experiment Name: At_14day_Shoots-Roots_Sub_P Parameter: Tissue Value: Roots vs. Whole Plant
  misc_feature: MA Experiment ID: 20000315 Result: Up-regulated in Transcription
  misc_feature: MA Experiment 20000315 PARAMETER Experiment Name: At_14day_Shoots-Roots_Sub_P Parameter: Age (day) Value: 14
  misc_feature: MA Experiment 20000315 PARAMETER Experiment Name: At_14day_Shoots-Roots_Sub_P Parameter: Organism Value: A. thaliana
  misc_feature: MA Experiment 20000315 PARAMETER Experiment Name: At_14day_Shoots-Roots_Sub_P Parameter: Plant Line Value: WS
  misc_feature: MA Experiment 20000315 PARAMETER Experiment Name: At_14day_Shoots-Roots_Sub_P Parameter: Tissue Value: Shoots vs. Whole Plant
gaagagaatccgatgcgtagaagactatcttccgtgctaatcaacaatcagtgcatcgcgtcccaacgccattaccacacatctcgacctgagaaacccacaaagaaagccagcagccatgaaccaactcacaaattcaccaggaagccatgggaggaagtgccatttctcaccgatctcaaagaaatcgaagacccagaggaagctctttctctcttccaccaataccaggaaatgggtttccgacacgactacccatcttactcttctctcatctacaagcttgcaaagtcccgtaacttcgacgccgtcgaccaaattctccgccttgttcgctatcgaaacgtccggtgcagagaatccctcttcatgggattgattcagcattacgggaaagccggttcggtcgacaaagccatcgatgttttccacaaaatcacctcctttgattgtgttcgcacgattcagtctctcaacactctcatcaacgttctggtcgataacggcgagttggaaaaggccaaaagctttttcgacggggcaaaggatatgcgtttgcgtcccaattcggtgtctttcaatattttgatcaaaggatttcttgataaatgcgattgggaagctgcatgtaaggtgttcgacgaaatgcttgagatggaggtgcaaccgagtgttgtgacatacaatagcctgattggtttcttatgccgaaatgacgatatgggtaaggcgaagagcttgcttgaagatatgattaagaaaagaatacgtccgaatgctgtgacatttgggttgttaatgaaaggtttatgttgtaagggagagtacaatgaagcaaagaagttgatgttcgatatggagtatcgtgggtgtaaaccgggtctcgttaactacggaattttgatgagtgatcttgggaagagagggagaattgatgaggcaaagcttctactcggcgagatgaagaaaagacggataaaaccagatgttgtgatctataacattctggtaaaccatctttgcactgagtgtagagtccctgaggcttatagagtgctgacggaaatgcagatgaaagggtgtaaaccaaatgcagctacataccgtatgatgattgatgggttttgtcgtatcgaggattttgattcagggttgaatgttttgaatgcaatgcttgcaagcagacactgtcccacacctgcaacgtttgtatgtatggttgctgggctgattaaaggcggtaacttggaccatgcttgctttgtgttagaggtgatgggaaagaaaaacttaagttttgggtctggtgcttggcaaaatctactttctgatctctgcatcaaggatggaggagtatattgtgaggctttgtcagaagtaatttccatctaagcaatgacctttttaaaggctgcaaagtactcttcttcctgattttagctctcgccattacttttgtctcagctgctcggcttcttgatgaagaagaagatattgggttggtccctttgcctaccacgagtcctggtcctttaccaacagttggtttaggcccctttcccactgctaattcaggccctgcaactggtatcgcttcaggtacaggttcagcctcagggggtttaggttccttgggtaccaatactggccccgggcctctatcgaccactggttctagtcttttaccagttgctagttcgggtaccttgcctgttactggccccggtcctctaccaaccagttctggtctcttaccgggtgctagttcgggtaacttgcctggttcaggttcagggcctttgcctactgttggttcaggtgctgcagctacgggtctgggcgcaggtgcagggtcagtgattggtggttcagttcctgacaacactttggttttcttcatgcacgatatactcggtggctcaaacccgacagcgagggctgtgactggagtcgtcgcaaacgcagccctcagtggccaaattccattcgctaagcccaatggtgcaaacctccctgttagtaacggcgttccatcagacaataacaacaatggaatcctgaacaataacaacgtcccacttctcgtcgggcttggcggaaccacttccaacattctacagaacaatggaaacaacatgttgaacggtcttcccgtggctaacggcggccagctcccatcgggttcgtctcttcagatgctcatgtttgggacattgacggtgatggacaacgaactaaccgaaggacacgaactcgggtctggtctgctgggtaaagcccaaggcttctacgtggcaagtgcccttgatgggaccagccagactatggctttcacggctatgtttgagagcggtggatatgaagatagcatcagtttcttcggtgtgcatagaacagctgcatcggaatctcatcttggggtaatgggcggtactggtaagtatgtgaatgcgagaggcttcgcaattgtcaagacttttacgggttcctccgggacccagcagcagcagccgcaccagttcacagatgggctcgagactgttctggagtgcaccgtttatctttcttactagtttcttttccctcttctcttatcttttttgtctaccaagaaaacgtgaaaacctattaatttgacaaccaatcccttgttattc

SEQ ID NO: 76097 - protein, 463 aa, Arabidopsis thaliana
  peptide (1)..(463): Ceres Seq. ID no. 7105239
  misc_feature (261)..(295): Pfam Name: PPR repeat Pfam Description: PPR repeat
  misc_feature (5)..(463): Homolog of NCBI NO: 15222997 NR Description: hypothetical protein; protein id: At1g07740.1
  misc_feature (19)..(463): Homolog of NCBI NO: 15237345 NR Description: salt-inducible protein-like; protein id:
  misc_feature (60)..(462): Homolog of NCBI NO: 15219274 NR Description: hypothetical protein; protein id: At1g53330.1
  misc_feature (64)..(463): Homolog of NCBI NO: 15237375 NR Description: salt-inducible protein-like; protein id:
  misc_feature (126)..(432): Homolog of NCBI NO: 15218325 NR Description: hypothetical protein; protein id: At1g09900.1
  misc_feature (81)..(426): Homolog of NCBI NO: 15219049 NR Description: hypothetical protein; protein id: At1g52640.1
  misc_feature (37)..(392): Homolog of NCBI NO: 7486352 NR Description: hypothetical protein F3D13.1 - Arabidopsis
  misc_feature (80)..(450): Homolog of NCBI NO: 14488357 NR Description: unknown protein [Oryza sativa (japonica
  misc_feature (67)..(426): Homolog of NCBI NO: 15240891 NR Description: putative protein; protein id: At5g01110.1
  misc_feature (57)..(450): Homolog of NCBI NO: 15217608 NR Description: unknown protein; protein id: At1g02060.1
EENPMRRRLSSVLINNQCIASQRHYHTSRPEKPTKKASSHEPTHKFTRKPWEEVPFLTDLKEIEDPEEALSLFHQYQEMGFRHDYPSYSSLIYKLAKSRNFDAVDQILRLVRYRNVRCRESLFMGLIQHYGKAGSVDKAIDVFHKITSFDCVRTIQSLNTLINVLVDNGELEKAKSFFDGAKDMRLRPNSVSFNILIKGFLDKCDWEAACKVFDEMLEMEVQPSVVTYNSLIGFLCRNDDMGKAKSLLEDMIKKRIRPNAVTFGLLMKGLCCKGEYNEAKKLMFDMEYRGCKPGLVNYGILMSDLGKRGRIDEAKLLLGEMKKRRIKPDVVIYNILVNHLCTECRVPEAYRVLTEMQMKGCKPNAATYRMMIDGFCRIEDFDSGLNVLNAMLASRHCPTPATFVCMVAGLIKGGNLDHACFVLEVMGKKNLSFGSGAWQNLLSDLCIKDGGVYCEALSEVISI

SEQ ID NO: 76098 - protein, 459 aa, Arabidopsis thaliana
  peptide (1)..(459): Ceres Seq. ID no. 7105240
  misc_feature (257)..(291): Pfam Name: PPR repeat Pfam Description: PPR repeat
  misc_feature (1)..(459): Homolog of NCBI NO: 15222997 NR Description: hypothetical protein; protein id: At1g07740.1
  misc_feature (15)..(459): Homolog of NCBI NO: 15237345 NR Description: salt-inducible protein-like; protein id:
  misc_feature (56)..(458): Homolog of NCBI NO: 15219274 NR Description: hypothetical protein; protein id: At1g53330.1
  misc_feature (60)..(459): Homolog of NCBI NO: 15237375 NR Description: salt-inducible protein-like; protein id:
  misc_feature (122)..(428): Homolog of NCBI NO: 15218325 NR Description: hypothetical protein; protein id: At1g09900.1
  misc_feature (77)..(422): Homolog of NCBI NO: 15219049 NR Description: hypothetical protein; protein id: At1g52640.1
  misc_feature (33)..(388): Homolog of NCBI NO: 7486352 NR Description: hypothetical protein F3D13.1 - Arabidopsis
  misc_feature (76)..(446): Homolog of NCBI NO: 14488357 NR Description: unknown protein [Oryza sativa (japonica
  misc_feature (63)..(422): Homolog of NCBI NO: 15240891 NR Description: putative protein; protein id: At5g01110.1
  misc_feature (53)..(446): Homolog of NCBI NO: 15217608 NR Description: unknown protein; protein id: At1g02060.1
MRRRLSSVLINNQCIASQRHYHTSRPEKPTKKASSHEPTHKFTRKPWEEVPFLTDLKEIEDPEEALSLFHQYQEMGFRHDYPSYSSLIYKLAKSRNFDAVDQILRLVRYRNVRCRESLFMGLIQHYGKAGSVDKAIDVFHKITSFDCVRTIQSLNTLINVLVDNGELEKAKSFFDGAKDMRLRPNSVSFNILIKGFLDKCDWEAACKVFDEMLEMEVQPSVVTYNSLIGFLCRNDDMGKAKSLLEDMIKKRIRPNAVTFGLLMKGLCCKGEYNEAKKLMFDMEYRGCKPGLVNYGILMSDLGKRGRIDEAKLLLGEMKKRRIKPDVVIYNILVNHLCTECRVPEAYRVLTEMQMKGCKPNAATYRMMIDGFCRIEDFDSGLNVLNAMLASRHCPTPATFVCMVAGLIKGGNLDHACFVLEVMGKKNLSFGSGAWQNLLSDLCIKDGGVYCEALSEVISI

SEQ ID NO: 76099 - protein, 385 aa, Arabidopsis thaliana
  peptide (1)..(385): Ceres Seq. ID no. 7105241
  misc_feature (183)..(217): Pfam Name: PPR repeat Pfam Description: PPR repeat
  misc_feature (1)..(385): Homolog of NCBI NO: 15222997 NR Description: hypothetical protein; protein id: At1g07740.1
  misc_feature (1)..(385): Homolog of NCBI NO: 15237345 NR Description: salt-inducible protein-like; protein id:
  misc_feature (1)..(384): Homolog of NCBI NO: 15219274 NR Description: hypothetical protein; protein id: At1g53330.1
  misc_feature (1)..(385): Homolog of NCBI NO: 15237375 NR Description: salt-inducible protein-like; protein id:
  misc_feature (48)..(354): Homolog of NCBI NO: 15218325 NR Description: hypothetical protein; protein id: At1g09900.1
  misc_feature (3)..(348): Homolog of NCBI NO: 15219049 NR Description: hypothetical protein; protein id: At1g52640.1
  misc_feature (1)..(314): Homolog of NCBI NO: 7486352 NR Description: hypothetical protein F3D13.1 - Arabidopsis
  misc_feature (2)..(372): Homolog of NCBI NO: 14488357 NR Description: unknown protein [Oryza sativa (japonica
  misc_feature (1)..(348): Homolog of NCBI NO: 15240891 NR Description: putative protein; protein id: At5g01110.1
  misc_feature (1)..(372): Homolog of NCBI NO: 15217608 NR Description: unknown protein; protein id: At1g02060.1
MGFRHDYPSYSSLIYKLAKSRNFDAVDQILRLVRYRNVRCRESLFMGLIQHYGKAGSVDKAIDVFHKITSFDCVRTIQSLNTLINVLVDNGELEKAKSFFDGAKDMRLRPNSVSFNILIKGFLDKCDWEAACKVFDEMLEMEVQPSVVTYNSLIGFLCRNDDMGKAKSLLEDMIKKRIRPNAVTFGLLMKGLCCKGEYNEAKKLMFDMEYRGCKPGLVNYGILMSDLGKRGRIDEAKLLLGEMKKRRIKPDVVIYNILVNHLCTECRVPEAYRVLTEMQMKGCKPNAATYRMMIDGFCRIEDFDSGLNVLNAMLASRHCPTPATFVCMVAGLIKGGNLDHACFVLEVMGKKNLSFGSGAWQNLLSDLCIKDGGVYCEALSEVISI

SEQ ID NO: 76100 - DNA, 679 bp, Arabidopsis thaliana
  misc_feature (1)..(679): Ceres Seq. ID no. 7105752
  misc_feature: MA Experiment ID: 20001807 Result: Up-regulated in Transcription
  misc_feature: MA Experiment 20001807 PARAMETER Experiment Name: At_50mM_NH4NO3_L-to-H_Sub_P Parameter: Timepoint (hr) Value: 6
  misc_feature: MA Experiment 20001807 PARAMETER Experiment Name: At_50mM_NH4NO3_L-to-H_Sub_P Parameter: Tissue Value: Leaf
  misc_feature: MA Experiment 20001807 PARAMETER Experiment Name: At_50mM_NH4NO3_L-to-H_Sub_P Parameter: Treatment Value: 50mM NH4NO3 vs 100mM Mannitol
actctgtgcattaggtttcattttagcggcagacgagagagctaaagcaaggagcaaccctaaccatggcgactcaaccagctactgaatctgtgcaatgcttcggaaggaagaagaccgcagtggccgtcactcactgcaagcgtggatctggtttgatcaagctcaacggttgcccaatcgagcttttccagcctgagatcctccgattcaagatcttcgagccggttcttctcctcggaaagcaccgtttcgctggtgtgaacatgaggatccgtgtcaacggtggtggtcacacatcccaggtttacgccatccgtcagagtatcgcgaaggctcttgttgcgtactaccagaagtatgtggatgagcagtcgaagaaggagattaaggatatcttggtgaggtatgataggactctgcttgtggcggatccgaggaggtgtgagccgaagaagtttggtggtcgtggtgctcgttctcgttaccagaagagttaccgttaaacaaagctggtttgtgttttgtttttcaatttggaatcatcgtaaggtttttttgggagtatggacttgtgagactctttagattttataatttctgctttattatgcttgttggattatggtgattctccaagaaacttatgttttgttatgtctactattttcttattttt

SEQ ID NO: 76101 - protein, 146 aa, Arabidopsis thaliana; identical to SEQ ID NO: 38400
  peptide (1)..(146): Ceres Seq. ID no. 7105753
  misc_feature (14)..(146): Pfam Name: Ribosomal protein S9/S16 Pfam Description: Ribosomal protein S9/S16
  misc_feature (1)..(146): Homolog of NCBI NO: 15238809 NR Description: 40S RIBOSOMAL PROTEIN S16; protein id: supported by cDNA: gi_13877830, supported by cDNA: gi_16323499
  misc_feature (1)..(146): Homolog of NCBI NO: 15226676 NR Description: 40S ribosomal protein S16; protein id: supported by cDNA: 29241., supported by cDNA: gi_13926207 thaliana] >gi|25294609|pir||E84489 40S ribosomal protein S16
  misc_feature (2)..(146): Homolog of NCBI NO: 6984222 NR Description: 40S ribosomal protein S16 [Euphorbia esula]
  misc_feature (1)..(146): Homolog of NCBI NO: 15229252 NR Description: putative 40S ribosomal protein S16; protein id: [Arabidopsis thaliana] >gi|6721162|gb|AAF26790.1|AC016829_14
  misc_feature (1)..(146): Homolog of NCBI NO: 3122800 NR Description: 40S RIBOSOMAL PROTEIN S16
  misc_feature (4)..(146): Homolog of NCBI NO: 1173209 NR Description: 40S RIBOSOMAL PROTEIN S16 >gi|541835|pir||S41193
  misc_feature (6)..(146): Homolog of NCBI NO: 17369864 NR Description: 40S ribosomal protein S16
  misc_feature (1)..(146): Homolog of NCBI NO: 39850096 NR Description: Unknown (protein for IMAGE:6887619) [Rattus
  misc_feature (1)..(146): Homolog of NCBI NO: 4506691 NR Description: ribosomal protein S16; 40S ribosomal protein S16 sapiens] >gi|27676542|ref|XP_214829.1| similar to ribosomal
  misc_feature (1)..(146): Homolog of NCBI NO: 15294045 NR Description: 40S ribosomal protein S16 [Ictalurus punctatus]

SEQ ID NO: 76102 - protein, 79 aa, Arabidopsis thaliana; identical to SEQ ID NO: 21210
  peptide (1)..(79): Ceres Seq. ID no. 7105754
  misc_feature (1)..(79): Pfam Name: Ribosomal protein S9/S16 Pfam Description: Ribosomal protein S9/S16
  misc_feature (1)..(79): Homolog of NCBI NO: 15238809 NR Description: 40S RIBOSOMAL PROTEIN S16; protein id: supported by cDNA: gi_13877830, supported by cDNA: gi_16323499
  misc_feature (1)..(79): Homolog of NCBI NO: 15226676 NR Description: 40S ribosomal protein S16; protein id: supported by cDNA: 29241., supported by cDNA: gi_13926207 thaliana] >gi|25294609|pir||E84489 40S ribosomal protein S16
  misc_feature (1)..(79): Homolog of NCBI NO: 6984222 NR Description: 40S ribosomal protein S16 [Euphorbia esula]
  misc_feature (1)..(79): Homolog of NCBI NO: 15229252 NR Description: putative 40S ribosomal protein S16; protein id: [Arabidopsis thaliana] >gi|6721162|gb|AAF26790.1|AC016829_14
  misc_feature (1)..(79): Homolog of NCBI NO: 3122800 NR Description: 40S RIBOSOMAL PROTEIN S16
  misc_feature (1)..(79): Homolog of NCBI NO: 1173209 NR Description: 40S RIBOSOMAL PROTEIN S16 >gi|541835|pir||S41193
  misc_feature (1)..(79): Homolog of NCBI NO: 17369864 NR Description: 40S ribosomal protein S16
  misc_feature (1)..(79): Homolog of NCBI NO: 39850096 NR Description: Unknown (protein for IMAGE:6887619) [Rattus
  misc_feature (1)..(79): Homolog of NCBI NO: 4506691 NR Description: ribosomal protein S16; 40S ribosomal protein S16 sapiens] >gi|27676542|ref|XP_214829.1| similar to ribosomal
  misc_feature (1)..(79): Homolog of NCBI NO: 15294045 NR Description: 40S ribosomal protein S16 [Ictalurus punctatus]

SEQ ID NO: 76103 - DNA, 2988 bp, Arabidopsis thaliana
  misc_feature (1)..(2988): Ceres Seq. ID no. 7105774
  misc_feature: MA Experiment ID: 108433 Result: Down-regulated in Transcription
  misc_feature: MA Experiment 108433 PARAMETER Experiment Name: At_rhl_Mutant2_cDNA_P Parameter: Age (day) Value: 7
  misc_feature: MA Experiment 108433 PARAMETER Experiment Name: At_rhl_Mutant2_cDNA_P Parameter: Organism Value: A. thaliana
  misc_feature: MA Experiment 108433 PARAMETER Experiment Name: At_rhl_Mutant2_cDNA_P Parameter: Plant Line Value: rhl Mutant vs. wt landsburg
  misc_feature: MA Experiment 108433 PARAMETER Experiment Name: At_rhl_Mutant2_cDNA_P Parameter: Tissue Value: Roots
  misc_feature: MA Experiment ID: 108462 Result: Down-regulated in Transcription
  misc_feature: MA Experiment 108462 PARAMETER Experiment Name: At_Germinating_Seeds_cDNA_P Parameter: Age (day) Value: 2 vs. 0
  misc_feature: MA Experiment 108462 PARAMETER Experiment Name: At_Germinating_Seeds_cDNA_P Parameter: Tissue Value: Germinating Seeds
ctcttcttcccagtgttgtcttctcttctccacgaacttaattttttcaaaaccctagcaactttgattcattcaaaatccgatccaacgatgactattgaagaagtttccggtgagactcctccgtctacgcctccttcttcttctacgccttctccgtcttcctccaccaccaacgccgcgccgttgggatcctctgtgattccgattgtaaacaagctacaagacatattcgctcagctcggaagccagtctacgatcgcgcttcctcaggttgttgttgttggaagccaaagcagtggcaagtctagcgtccttgaagcactcgtcggccgtgactttctccctcgtggtaatgatatctgcacgcgtcgtcctcttgttctccagctcctccagactaaaagccgcgctaatggcggatccgatgatgagtggggggagtttcgtcaccttcctgaaactcgtttctatgatttctctgagattcgtcgagaaattgaggctgagacgaatagattagttggagagaacaaaggtgtagcagatacacagattcgtcttaaaatttcttcacctaatgtattgaacatcacgcttgtggatctgcctggtattaccaaggtgccagttggtgaccagccatccgacattgaagcacgtataagaacgatgatcttgtcttacatcaagcaagatacttgcttgatattggctgttacccctgctaataccgatctagcaaactctgatgcccttcaaattgctagcattgtagatcctgatggtcacagaacgataggtgtaatcacaaagttggatattatggacaaaggtactgatgctcgaaaactccttcttggaaatgttgttcctcttcgacttggatacgtgggagttgtaaatcgttgccaggaggatattttgctaaaccgcacagtcaaggaagcacttctcgcagaggagaagttcttccggagtcacccggtttaccatggtcttgccgatcgtttgggtgttcctcagctagcaaagaagttaaatcagatccttgttcaacatatcaaggtcttgcttccggatttgaagtcgcggataagtaatgctttggttgctacagcaaaagagcatcagagctatggtgaattaacagaatcaagggctgggcaaggagctcttctcctcaactttctctccaaatactgtgaagcatactcttcattgctggaagggaaaagtgaagaaatgtctacgtcagagctctctggaggagcaagaattcactatattttccagtcaatctttgttaagagtttggaggaggttgatccatgcgaggacttgacagatgatgatattcggactgcaattcagaatgcaactggtccaagatctgcattatttgttccagatgttccatttgaagttcttgttaggaggcagatatctcgtttgttagatcctagccttcagtgtgcccggttcatttttgaagagctaataaagattagccatagatgtatgatgaatgagttacaacgatttccagtcctacgaaagcgcatggatgaggttatcggggatttcctgcgagaaggtcttgaaccctcagaagcaatgatcggggatatcattgatatggagatggattacataaacacttcacatccaaattttattggtggaaccaaggccgtggaagctgcaatgcatcaagtgaagtcttcgaggattccccatcctgtggcacgaccaaaggacactgtggagcctgatagaacatcttcttccacgagtcaagtgaaatctagatcgtttctcggcaggcaagctaatggaattgttactgatcagggagttgtatctgcagatgctgaaaaagctcaacctgctgcaaatgcgagtgatacaaggtggggtatcccttcaattttccgagggggtgatactagagcagttactaaagatagcttattaaacaaaccattcagtgaagctgttgaggatatgtctcacaacttatccatgatctatctaaaggagcccccagctgtcttgaggccaaccgaaacccattcagaacaggaagcagttgagattcagataacaaagctgttactaagatcatactatgacattgtaaggaagaatattgaggactcggtaccaaaagcaatcatgcatttcctggtaaaccacacaaaacgtgagctgcataacgtcttcatcaagaagctttacagggagaacttgtttgaagaaatgttgcaagagccagatgagatagcagttaagaggaaacgcacacaagagactctccacgttcttcagcaagcttacaggacactagatgagttgccactggaagcagattcggtgtcagcaggaatgtcaaaacatcaggagttactgacatcttcaaagtattcgacaagcagctcatactcggcatctccaagtacgacaagaagatcgagaagagcaggagatcaacaccaaaatggatacggattctaacatgatccaaatatctcgaatatctctcgactgtgataacgcatttcattcatttaatggctctttcaggttttggtattaaattatgtgttggtcatatgaagaatttatatagggaaaccagtacacagtgtgggttttggtccttttggahtytgcattggttgamttgataagggagtgaaaggkgatatagttttttttttccaatttgtttcaaatgytccccctgcaamaataasgggaagcaaamacctttmahtttaaatttttttttggggratgtttaatyaataagttatatwamatgatyggtcmamavgaccttataaattgkgtagtttttttgtttttkgagcaasgaraakkggaaaattcccctwaaaaaaaaaaaaaaaaaaaaaaaaaaaaaaaaaaaaaaaaaaaaaaaaaaaaaaaaaaaaaaaaaaaaaaactcgagggggggcccgg

SEQ ID NO: 76104 - protein, 838 aa, Arabidopsis thaliana
  peptide (1)..(838): Ceres Seq. ID no. 7105775
  misc_feature (282)..(575): Pfam Name: Dynamin central region Pfam Description: Dynamin central region
  misc_feature (31)..(504): Homolog of NCBI NO: 14334428 NR Description: putative dynamin protein ADL2 [Arabidopsis >gi|17104743|gb|AAL34260.1| putative dynamin protein ADL2
  misc_feature (47)..(403): Homolog of NCBI NO: 19386736 NR Description: putative dynamin-like protein ADL2 [Oryza sativa
  misc_feature (600)..(838): Homolog of NCBI NO: 19386736 NR Description: putative dynamin-like protein ADL2 [Oryza sativa
  misc_feature (440)..(605): Homolog of NCBI NO: 19386736 NR Description: putative dynamin-like protein ADL2 [Oryza sativa
  misc_feature (67)..(568): Homolog of NCBI NO: 2689219 NR Description: dynamin like protein [Dictyostelium discoideum]
  misc_feature (679)..(786): Homolog of NCBI NO: 2689219 NR Description: dynamin like protein [Dictyostelium discoideum]
  misc_feature (42)..(576): Homolog of NCBI NO: 30048092 NR Description: DNM1 protein [Homo sapiens]
  misc_feature (692)..(825): Homolog of NCBI NO: 30048092 NR Description: DNM1 protein [Homo sapiens]
  misc_feature (67)..(580): Homolog of NCBI NO: 6978771 NR Description: dynamin 2 [Rattus norvegicus]
  misc_feature (67)..(580): Homolog of NCBI NO: 22002044 NR Description: Dynamin 2 (Dynamin UDNM)
LFFPVLSSLLHELNFFKTLATLIHSKSDPTMTIEEVSGETPPSTPPSSSTPSPSSSTTNAAPLGSSVIPIVNKLQDIFAQLGSQSTIALPQVVVVGSQSSGKSSVLEALVGRDFLPRGNDICTRRPLVLQLLQTKSRANGGSDDEWGEFRHLPETRFYDFSEIRREIEAETNRLVGENKGVADTQIRLKISSPNVLNITLVDLPGITKVPVGDQPSDIEARIRTMILSYIKQDTCLILAVTPANTDLANSDALQIASIVDPDGHRTIGVITKLDIMDKGTDARKLLLGNVVPLRLGYVGVVNRCQEDILLNRTVKEALLAEEKFFRSHPVYHGLADRLGVPQLAKKLNQILVQHIKVLLPDLKSRISNALVATAKEHQSYGELTESRAGQGALLLNFLSKYCEAYSSLLEGKSEEMSTSELSGGARIHYIFQSIFVKSLEEVDPCEDLTDDDIRTAIQNATGPRSALFVPDVPFEVLVRRQISRLLDPSLQCARFIFEELIKISHRCMMNELQRFPVLRKRMDEVIGDFLREGLEPSEAMIGDIIDMEMDYINTSHPNFIGGTKAVEAAMHQVKSSRIPHPVARPKDTVEPDRTSSSTSQVKSRSFLGRQANGIVTDQGVVSADAEKAQPAANASDTRWGIPSIFRGGDTRAVTKDSLLNKPFSEAVEDMSHNLSMIYLKEPPAVLRPTETHSEQEAVEIQITKLLLRSYYDIVRKNIEDSVPKAIMHFLVNHTKRELHNVFIKKLYRENLFEEMLQEPDEIAVKRKRTQETLHVLQQAYRTLDELPLEADSVSAGMSKHQELLTSSKYSTSSSYSASPSTTRRSRRAGDQHQNGYGF

SEQ ID NO: 76105 - protein, 808 aa, Arabidopsis thaliana; identical to SEQ ID NO: 39322
  peptide (1)..(808): Ceres Seq. ID no. 7105776
  misc_feature (252)..(545): Pfam Name: Dynamin central region Pfam Description: Dynamin central region
  misc_feature (1)..(474): Homolog of NCBI NO: 14334428 NR Description: putative dynamin protein ADL2 [Arabidopsis >gi|17104743|gb|AAL34260.1| putative dynamin protein ADL2
  misc_feature (17)..(373): Homolog of NCBI NO: 19386736 NR Description: putative dynamin-like protein ADL2 [Oryza sativa
  misc_feature (570)..(808): Homolog of NCBI NO: 19386736 NR Description: putative dynamin-like protein ADL2 [Oryza sativa
  misc_feature (410)..(575): Homolog of NCBI NO: 19386736 NR Description: putative dynamin-like protein ADL2 [Oryza sativa
  misc_feature (37)..(538): Homolog of NCBI NO: 2689219 NR Description: dynamin like protein [Dictyostelium discoideum]
  misc_feature (649)..(756): Homolog of NCBI NO: 2689219 NR Description: dynamin like protein [Dictyostelium discoideum]
  misc_feature (12)..(546): Homolog of NCBI NO: 30048092 NR Description: DNM1 protein [Homo sapiens]
  misc_feature (662)..(795): Homolog of NCBI NO: 30048092 NR Description: DNM1 protein [Homo sapiens]
  misc_feature (37)..(550): Homolog of NCBI NO: 6978771 NR Description: dynamin 2 [Rattus norvegicus]
  misc_feature (37)..(550): Homolog of NCBI NO: 22002044 NR Description: Dynamin 2 (Dynamin UDNM)

SEQ ID NO: 76106 - protein, 614 aa, Arabidopsis thaliana; identical to SEQ ID NO: 39323
  peptide (1)..(614): Ceres Seq. ID no. 7105777
  misc_feature (58)..(351): Pfam Name: Dynamin central region Pfam Description: Dynamin central region
  misc_feature (1)..(280): Homolog of NCBI NO: 14334428 NR Description: putative dynamin protein ADL2 [Arabidopsis >gi|17104743|gb|AAL34260.1| putative dynamin protein ADL2
  misc_feature (1)..(179): Homolog of NCBI NO: 19386736 NR Description: putative dynamin-like protein ADL2 [Oryza sativa
  misc_feature (376)..(614): Homolog of NCBI NO: 19386736 NR Description: putative dynamin-like protein ADL2 [Oryza sativa
  misc_feature (216)..(381): Homolog of NCBI NO: 19386736 NR Description: putative dynamin-like protein ADL2 [Oryza sativa
  misc_feature (1)..(344): Homolog of NCBI NO: 2689219 NR Description: dynamin like protein [Dictyostelium discoideum]
  misc_feature (455)..(562): Homolog of NCBI NO: 2689219 NR Description: dynamin like protein [Dictyostelium discoideum]
  misc_feature (1)..(352): Homolog of NCBI NO: 30048092 NR Description: DNM1 protein [Homo sapiens]
  misc_feature (468)..(601): Homolog of NCBI NO: 30048092 NR Description: DNM1 protein [Homo sapiens]
  misc_feature (1)..(356): Homolog of NCBI NO: 6978771 NR Description: dynamin 2 [Rattus norvegicus]
  misc_feature (1)..(356): Homolog of NCBI NO: 12836637 NR Description: unnamed protein product [Mus musculus]

SEQ ID NO: 76107 - DNA, 2013 bp, Arabidopsis thaliana
  misc_feature (1)..(2013): Ceres Seq. ID no. 7105829
  misc_feature: MA Experiment ID: 108463 Result: Down-regulated in Transcription
  misc_feature: MA Experiment 108463 PARAMETER Experiment Name: At_Germinating_Seeds_cDNA_P Parameter: Age (day) Value: 3 vs. 0
  misc_feature: MA Experiment 108463 PARAMETER Experiment Name: At_Germinating_Seeds_cDNA_P Parameter: Tissue Value: Germinating Seeds
  misc_feature: MA Experiment ID: 108464 Result: Down-regulated in Transcription
  misc_feature: MA Experiment 108464 PARAMETER Experiment Name: At_Germinating_Seeds_cDNA_P Parameter: Age (day) Value: 4 vs. 0
  misc_feature: MA Experiment 108464 PARAMETER Experiment Name: At_Germinating_Seeds_cDNA_P Parameter: Tissue Value: Germinating Seeds
  misc_feature: MA Experiment ID: 108608 Result: Up-regulated in Transcription
  misc_feature: MA Experiment 108608 PARAMETER Experiment Name: At_100uM_ABA_cDNA_P Parameter: Timepoint (hr) Value: 1
  misc_feature: MA Experiment 108608 PARAMETER Experiment Name: At_100uM_ABA_cDNA_P Parameter: Tissue Value: Aerial
  misc_feature: MA Experiment 108608 PARAMETER Experiment Name: At_100uM_ABA_cDNA_P Parameter: Treatment Value: 100uM ABA vs. No Treatment
  misc_feature: MA Experiment ID: 108668 Result: Up-regulated in Transcription
  misc_feature: MA Experiment 108668 PARAMETER Experiment Name: At_2mM_SA_cDNA_P Parameter: Plant Line Value: WS
  misc_feature: MA Experiment 108668 PARAMETER Experiment Name: At_2mM_SA_cDNA_P Parameter: Timepoint (hr) Value: 6
  misc_feature: MA Experiment 108668 PARAMETER Experiment Name: At_2mM_SA_cDNA_P Parameter: Treatment Value: 2mM SA vs. No Treatment
  misc_feature: MA Experiment ID: 20000070 Result: Up-regulated in Transcription
  misc_feature: MA Experiment 20000070 PARAMETER Experiment Name: At_100uM_ABA_Mutants_cDNA_P Parameter: Plant Line Value: CS24
  misc_feature: MA Experiment 20000070 PARAMETER Experiment Name: At_100uM_ABA_Mutants_cDNA_P Parameter: Timepoint (hr) Value: 6
  misc_feature: MA Experiment 20000070 PARAMETER Experiment Name: At_100uM_ABA_Mutants_cDNA_P Parameter: Tissue Value: Aerial
  misc_feature: MA Experiment 20000070 PARAMETER Experiment Name: At_100uM_ABA_Mutants_cDNA_P Parameter: Treatment Value: 100uM ABA vs. No Treatment
  misc_feature: MA Experiment ID: 20000090 Result: Up-regulated in Transcription
  misc_feature: MA Experiment ID: 20000144 Result: Down-regulated in Transcription
  misc_feature: MA Experiment 20000144 PARAMETER Experiment Name: At_42deg_Heat_cDNA_P Parameter: Temperature (deg C) Value: 42 vs. 22
  misc_feature: MA Experiment 20000144 PARAMETER Experiment Name: At_42deg_Heat_cDNA_P Parameter: Timepoint (hr) Value: 1
  misc_feature: MA Experiment 20000144 PARAMETER Experiment Name: At_42deg_Heat_cDNA_P Parameter: Tissue Value: Aerial
  misc_feature: MA Experiment ID: 20000166 Result: Up-regulated in Transcription
  misc_feature: MA Experiment 20000166 PARAMETER Experiment Name: At_100uM_ABA_P Parameter: Age (day) Value: 14
  misc_feature: MA Experiment 20000166 PARAMETER Experiment Name: At_100uM_ABA_P Parameter: Organism Value: A. thaliana
  misc_feature: MA Experiment 20000166 PARAMETER Experiment Name: At_100uM_ABA_P Parameter: Plant Line Value: WS
  misc_feature: MA Experiment 20000166 PARAMETER Experiment Name: At_100uM_ABA_P Parameter: Timepoint (hr) Value: 1
  misc_feature: MA Experiment 20000166 PARAMETER Experiment Name: At_100uM_ABA_P Parameter: Tissue Value: Aerial
  misc_feature: MA Experiment 20000166 PARAMETER Experiment Name: At_100uM_ABA_P Parameter: Treatment Value: 100uM ABA vs. No Treatment
  misc_feature: MA Experiment ID: 20000171 Result: Down-regulated in Transcription
  misc_feature: MA Experiment 20000171 PARAMETER Experiment Name: At_42deg_Heat_P Parameter: Age (day) Value: 14
  misc_feature: MA Experiment 20000171 PARAMETER Experiment Name: At_42deg_Heat_P Parameter: Organism Value: A. thaliana
  misc_feature: MA Experiment 20000171 PARAMETER Experiment Name: At_42deg_Heat_P Parameter: Plant Line Value: WS
  misc_feature: MA Experiment 20000171 PARAMETER Experiment Name: At_42deg_Heat_P Parameter: Temperature (deg C) Value: 42 vs. 22
  misc_feature: MA Experiment 20000171 PARAMETER Experiment Name: At_42deg_Heat_P Parameter: Timepoint (hr) Value: 1
  misc_feature: MA Experiment 20000171 PARAMETER Experiment Name: At_42deg_Heat_P Parameter: Tissue Value: Aerial
  misc_feature: MA Experiment ID: 20000173 Result: Down-regulated in Transcription
  misc_feature: MA Experiment 20000173 PARAMETER Experiment Name: At_42deg_Heat_P Parameter: Age (day) Value: 14
  misc_feature: MA Experiment 20000173 PARAMETER Experiment Name: At_42deg_Heat_P Parameter: Organism Value: A. thaliana
  misc_feature: MA Experiment 20000173 PARAMETER Experiment Name: At_42deg_Heat_P Parameter: Plant Line Value: WS
  misc_feature: MA Experiment 20000173 PARAMETER Experiment Name: At_42deg_Heat_P Parameter: Temperature (deg C) Value: 42 vs. 22
  misc_feature: MA Experiment 20000173 PARAMETER Experiment Name: At_42deg_Heat_P Parameter: Timepoint (hr) Value: 6
  misc_feature: MA Experiment 20000173 PARAMETER Experiment Name: At_42deg_Heat_P Parameter: Tissue Value: Aerial
  misc_feature: MA Experiment ID: 20000182 Result: Up-regulated in Transcription
  misc_feature: MA Experiment 20000182 PARAMETER Experiment Name: At_2mM_SA_P Parameter: Age (day) Value: 14
  misc_feature: MA Experiment 20000182 PARAMETER Experiment Name: At_2mM_SA_P Parameter: Organism Value: A. thaliana
  misc_feature: MA Experiment 20000182 PARAMETER Experiment Name: At_2mM_SA_P Parameter: Plant Line Value: WS
  misc_feature: MA Experiment 20000182 PARAMETER Experiment Name: At_2mM_SA_P Parameter: Timepoint (hr) Value: 6
  misc_feature: MA Experiment 20000182 PARAMETER Experiment Name: At_2mM_SA_P Parameter: Tissue Value: Aerial
  misc_feature: MA Experiment 20000182 PARAMETER Experiment Name: At_2mM_SA_P Parameter: Treatment Value: 2mM SA vs. No Treatment
  misc_feature: MA Experiment ID: 20000185 Result: Up-regulated in Transcription
  misc_feature: MA Experiment 20000185 PARAMETER Experiment Name: At_Roots__P Parameter: Age (day) Value: 7 vs. 21
  misc_feature: MA Experiment 20000185 PARAMETER Experiment Name: At_Roots__P Parameter: Organism Value: A. thaliana
  misc_feature: MA Experiment 20000185 PARAMETER Experiment Name: At_Roots__P Parameter: Tissue Value: Roots vs. Whole Plant
  misc_feature: MA Experiment ID: 20000227 Result: Up-regulated in Transcription
  misc_feature: MA Experiment 20000227 PARAMETER Experiment Name: At_Root-Tips-vs-Tops_P Parameter: Tissue Value: Root Tips vs. Root Tops
  misc_feature: MA Experiment ID: 20000438 Result: Down-regulated in Transcription
  misc_feature: MA Experiment 20000438 PARAMETER Experiment Name: At_Shoots__P Parameter: Age (day) Value: 14
  misc_feature: MA Experiment 20000438 PARAMETER Experiment Name: At_Shoots__P Parameter: Tissue Value: Shoots vs. Whole Plant
  misc_feature: MA Experiment ID: 20000527 Result: Down-regulated in Transcription
  misc_feature: MA Experiment 20000527 PARAMETER Experiment Name: At_10percent_PEG_P Parameter: Age (day) Value: 20
  misc_feature: MA Experiment 20000527 PARAMETER Experiment Name: At_10percent_PEG_P Parameter: Organism Value: A. thaliana
  misc_feature: MA Experiment 20000527 PARAMETER Experiment Name: At_10percent_PEG_P Parameter: Plant Line Value: WS
  misc_feature: MA Experiment 20000527 PARAMETER Experiment Name: At_10percent_PEG_P Parameter: Timepoint (day) Value: 20
  misc_feature: MA Experiment 20000527 PARAMETER Experiment Name: At_10percent_PEG_P Parameter: Tissue Value: Whole Plant
  misc_feature: MA Experiment 20000527 PARAMETER Experiment Name: At_10percent_PEG_P Parameter: Treatment Value: 10percent PEG vs. No Treatment
gactcactatagggaaagctggtacgcctgcaggtaccggtccggaattcccgggtcgacccacgcgtccgcaacaatggcttcgtcatctacaagtatctctctccttctcttcgtctctttcattcttcttctcgttaactcgcgtgcagagaatgcgtccagtggatcggatctcgacgaagaattggctttcctcgccgcggaggaatccaaggaacaaagccacggcggcggttcgtaccacgaggaggagcacgatcatcagcaccgagacttcgagaattacgatgatctcgagcaaggaggcggcgagtttcatcacggcgatcacggttacgaggaggagccgttaccaccagtcgacgagaaagacgtggcggttctgaccaaggacaatttcaccgagttcgtcggcaacaatagcttcgcgatggtggagttttacgctccgtggtgcggcgcttgtcaggctttgactccggagtacgccgcggctgcgacggagttgaaaggccttgcggcgctcgcgaagatcgacgcgacggaggaaggggatttggctcagaagtacgagattcagggcttccccaccgttttcttgtttgtcgacggagaaatgcgcaagacctacgaaggtgaaagaacaaaggatggtattgtgacttggctgaagaagaaggccagtcctagcatccacaacatcactactaaagaggaggctgaacgtgttttgtccgctgaacctaaacttgtctttggttttctcaactcattagtggggtcagagagtgaggagctcgcggctgcgtccagactggaagacgatctcagtttttaccaaactgcaagccctgatattgcaaagctatttgaaattgaaacccaagtcaagcgtcctgccttagttttactgaaaaaggaggaagagaaacttgcccgttttgatggaaacttcactaaaacggctatagcagagtttgtgtcagccaacaaagtcccattggtgatcaacttcacaagggaaggtgcatcactgattttcgagagctcagtgaaaaaccaactcattctttttgccaaggcaaatgaatcagagaagcaccttcccactctgagggaggtggcaaagtccttcaagggaaagtttgttttcgtttatgtgcaaatggacaatgaagattatggagaagcagtttctggattctttggtgttaccggcgctgcccccaaggttcttgtatacactggtaatgaagatatgaggaagtttattctggacggtgaattgaccgtaaataacattaagacacttgcggaagatttcctagcagacaaactgaagcctttctacaagtcagatccactaccggaaaataacgatggtgatgttaaggtcattgtgggaaacaattttgatgagattgttcttgacgagtcaaaggatgttcttctcgagatatatgctccttggtgtggccactgccaatcatttgagccgatttacaacaagcttggaaagtatttaaaaggcattgactcgttagttgtagcaaagatggatggtaccagcaatgagcatcctagagcaaaggctgatgggttcccaacaatcctgttcttccctggtggaaacaaaagcttcgatccgatcgctgtggatgttgaccgtacagtagtggaactgtacaaattcctgaagaagcacgcatcaatcccatttaaacttgagaaaccggcgacacctgaaccggtgatctcgaccatgaaatctgatgagaagatcgagggtgatagttccaaggatgagttgtgatgatcggaacagagtgtgtaacaaggctatagatgatgactcttctataaatgatagaaaatgttttgccctttgtttttttccattgttgtatgctatgaaatgaataattaaagaagttttggtttctcaagtttttggatgtaactggaggtttgatccacacattgagtgttgatttaatgcgacttgtggtt

SEQ ID NO: 76108 - protein, 604 aa, Arabidopsis thaliana
  peptide (1)..(604): Ceres Seq. ID no. 7105830
  misc_feature (463)..(571): Pfam Name: Thioredoxin Pfam Description: Thioredoxin
  misc_feature (26)..(604): Homolog of NCBI NO: 22331799 NR Description: protein disulfide-isomerase-like protein; protein At3g54960.1, supported by cDNA: gi_20260431 [Arabidopsis
  misc_feature (26)..(604): Homolog of NCBI NO: 7437396 NR Description: protein disulfide-isomerase homolog F28P10.60 -
  misc_feature (35)..(602): Homolog of NCBI NO: 21593313 NR Description: protein disulfide isomerase precursor-like
  misc_feature (35)..(602): Homolog of NCBI NO: 30697404 NR Description: protein disulfide isomerase family [Arabidopsis
  misc_feature (162)..(604): Homolog of NCBI NO: 28140231 NR Description: protein disulphide isomerase [Elaeis guineensis]
  misc_feature (35)..(552): Homolog of NCBI NO: 30697408 NR Description: protein disulfide isomerase family [Arabidopsis
  misc_feature (121)..(584): Homolog of NCBI NO: 20805285 NR Description: protein disulfide isomerase-like PDI-H
  misc_feature (122)..(604): Homolog of NCBI NO: 20805287 NR Description: protein disulfide isomerase-like PDI-M
  misc_feature (114)..(604): Homolog of NCBI NO: 5902592 NR Description: protein disulfide isomerase precursor [Volvox
  misc_feature (105)..(604): Homolog of NCBI NO: 7437394 NR Description: protein disulfide-isomerase (EC 5.3.4.1) RB60 - reinhardtii >gi|2708314|gb|AAC49896.1| protein disulfide RB60 [Chlamydomonas reinhardtii] >gi|4104541|gb|AAD02069.1|
THYRESWYACRYRSGIPGSTHASATMASSSTSISLLLFVSFILLLVNSRAENASSGSDLDEELAFLAAEESKEQSHGGGSYHEEEHDHQHRDFENYDDLEQGGGEFHHGDHGYEEEPLPPVDEKDVAVLTKDNFTEFVGNNSFAMVEFYAPWCGACQALTPEYAAAATELKGLAALAKIDATEEGDLAQKYEIQGFPTVFLFVDGEMRKTYEGERTKDGIVTWLKKKASPSIHNITTKEEAERVLSAEPKLVFGFLNSLVGSESEELAAASRLEDDLSFYQTASPDIAKLFEIETQVKRPALVLLKKEEEKLARFDGNFTKTAIAEFVSANKVPLVINFTREGASLIFESSVKNQLILFAKANESEKHLPTLREVAKSFKGKFVFVYVQMDNEDYGEAVSGFFGVTGAAPKVLVYTGNEDMRKFILDGELTVNNIKTLAEDFLADKLKPFYKSDPLPENNDGDVKVIVGNNFDEIVLDESKDVLLEIYAPWCGHCQSFEPIYNKLGKYLKGIDSLVVAKMDGTSNEHPRAKADGFPTILFFPGGNKSFDPIAVDVDRTVVELYKFLKKHASIPFKLEKPATPEPVISTMKSDEKIEGDSSKDEL

SEQ ID NO: 76109 - protein, 579 aa, Arabidopsis thaliana
  peptide (1)..(579): Ceres Seq. ID no. 7105831
  misc_feature (438)..(546): Pfam Name: Thioredoxin Pfam Description: Thioredoxin
  misc_feature (1)..(579): Homolog of NCBI NO: 22331799 NR Description: protein disulfide-isomerase-like protein; protein At3g54960.1, supported by cDNA: gi_20260431 [Arabidopsis
  misc_feature (1)..(579): Homolog of NCBI NO: 7437396 NR Description: protein disulfide-isomerase homolog F28P10.60 -
  misc_feature (10)..(577): Homolog of NCBI NO: 21593313 NR Description: protein disulfide isomerase precursor-like
  misc_feature (10)..(577): Homolog of NCBI NO: 30697404 NR Description: protein disulfide isomerase family [Arabidopsis
  misc_feature (137)..(579): Homolog of NCBI NO: 28140231 NR Description: protein disulphide isomerase [Elaeis guineensis]
  misc_feature (10)..(527): Homolog of NCBI NO: 30697408 NR Description: protein disulfide isomerase family [Arabidopsis
  misc_feature (96)..(559): Homolog of NCBI NO: 20805285 NR Description: protein disulfide isomerase-like PDI-H
  misc_feature (97)..(579): Homolog of NCBI NO: 20805287 NR Description: protein disulfide isomerase-like PDI-M
  misc_feature (89)..(579): Homolog of NCBI NO: 5902592 NR Description: protein disulfide isomerase precursor [Volvox
  misc_feature (80)..(579): Homolog of NCBI NO: 7437394 NR Description: protein disulfide-isomerase (EC 5.3.4.1) RB60 - reinhardtii >gi|2708314|gb|AAC49896.1| protein disulfide RB60 [Chlamydomonas reinhardtii] >gi|4104541|gb|AAD02069.1|
MASSSTSISLLLFVSFILLLVNSRAENASSGSDLDEELAFLAAEESKEQSHGGGSYHEEEHDHQHRDFENYDDLEQGGGEFHHGDHGYEEEPLPPVDEKDVAVLTKDNFTEFVGNNSFAMVEFYAPWCGACQALTPEYAAAATELKGLAALAKIDATEEGDLAQKYEIQGFPTVFLFVDGEMRKTYEGERTKDGIVTWLKKKASPSIHNITTKEEAERVLSAEPKLVFGFLNSLVGSESEELAAASRLEDDLSFYQTASPDIAKLFEIETQVKRPALVLLKKEEEKLARFDGNFTKTAIAEFVSANKVPLVINFTREGASLIFESSVKNQLILFAKANESEKHLPTLREVAKSFKGKFVFVYVQMDNEDYGEAVSGFFGVTGAAPKVLVYTGNEDMRKFILDGELTVNNIKTLAEDFLADKLKPFYKSDPLPENNDGDVKVIVGNNFDEIVLDESKDVLLEIYAPWCGHCQSFEPIYNKLGKYLKGIDSLVVAKMDGTSNEHPRAKADGFPTILFFPGGNKSFDPIAVDVDRTVVELYKFLKKHASIPFKLEKPATPEPVISTMKSDEKIEGDSSKDEL

SEQ ID NO: 76110 - protein, 460 aa, Arabidopsis thaliana; identical to SEQ ID NO: 50654
  peptide (1)..(460): Ceres Seq. ID no. 7105832
  misc_feature (319)..(427): Pfam Name: Thioredoxin Pfam Description: Thioredoxin
  misc_feature (1)..(460): Homolog of NCBI NO: 22331799 NR Description: protein disulfide-isomerase-like protein; protein At3g54960.1, supported by cDNA: gi_20260431 [Arabidopsis
  misc_feature (1)..(460): Homolog of NCBI NO: 7437396 NR Description: protein disulfide-isomerase homolog F28P10.60 -
  misc_feature (1)..(458): Homolog of NCBI NO: 21593313 NR Description: protein disulfide isomerase precursor-like
  misc_feature (1)..(458): Homolog of NCBI NO: 30697404 NR Description: protein disulfide isomerase family [Arabidopsis
  misc_feature (18)..(460): Homolog of NCBI NO: 28140231 NR Description: protein disulphide isomerase [Elaeis guineensis]
  misc_feature (1)..(408): Homolog of NCBI NO: 30697408 NR Description: protein disulfide isomerase family [Arabidopsis
  misc_feature (1)..(440): Homolog of NCBI NO: 20805285 NR Description: protein disulfide isomerase-like PDI-H
  misc_feature (1)..(460): Homolog of NCBI NO: 20805287 NR Description: protein disulfide isomerase-like PDI-M
  misc_feature (1)..(460): Homolog of NCBI NO: 5902592 NR Description: protein disulfide isomerase precursor [Volvox
  misc_feature (1)..(460): Homolog of NCBI NO: 7437394 NR Description: protein disulfide-isomerase (EC 5.3.4.1) RB60 - reinhardtii >gi|2708314|gb|AAC49896.1| protein disulfide RB60 [Chlamydomonas reinhardtii] >gi|4104541|gb|AAD02069.1|

SEQ ID NO: 76111 - DNA, 1463 bp, Arabidopsis thaliana
  misc_feature (1)..(1463): Ceres Seq. ID no. 7105900
  misc_feature: MA Experiment ID: 108463 Result: Up-regulated in Transcription
  misc_feature: MA Experiment 108463 PARAMETER Experiment Name: At_Germinating_Seeds_cDNA_P Parameter: Age (day) Value: 3 vs. 0
  misc_feature: MA Experiment 108463 PARAMETER Experiment Name: At_Germinating_Seeds_cDNA_P Parameter: Tissue Value: Germinating Seeds
  misc_feature: MA Experiment ID: 108464 Result: Up-regulated in Transcription
  misc_feature: MA Experiment 108464 PARAMETER Experiment Name: At_Germinating_Seeds_cDNA_P Parameter: Age (day) Value: 4 vs. 0
  misc_feature: MA Experiment 108464 PARAMETER Experiment Name: At_Germinating_Seeds_cDNA_P Parameter: Tissue Value: Germinating Seeds
  misc_feature: MA Experiment ID: 108595 Result: Down-regulated in Transcription
  misc_feature: MA Experiment 108595 PARAMETER Experiment Name: At_Ler-pi_Ovule_cDNA_P Parameter: Plant Line Value: null
  misc_feature: MA Experiment ID: 20000112 Result: Up-regulated in Transcription
  misc_feature: MA Experiment 20000112 PARAMETER Experiment Name: At_42deg_Heat_cDNA_P Parameter: Temperature (deg C) Value: 42 vs. 22
  misc_feature: MA Experiment 20000112 PARAMETER Experiment Name: At_42deg_Heat_cDNA_P Parameter: Timepoint (hr) Value: 2
  misc_feature: MA Experiment 20000112 PARAMETER Experiment Name: At_42deg_Heat_cDNA_P Parameter: Tissue Value: Aerial
  misc_feature: MA Experiment ID: 20000184 Result: Down-regulated in Transcription
  misc_feature: MA Experiment 20000184 PARAMETER Experiment Name: At_Shoots__P Parameter: Age (day) Value: 7
  misc_feature: MA Experiment 20000184 PARAMETER Experiment Name: At_Shoots__P Parameter: Tissue Value: Shoots vs. Whole Plant
  misc_feature: MA Experiment ID: 20000235 Result: Down-regulated in Transcription
  misc_feature: MA Experiment 20000235 PARAMETER Experiment Name: At_Siliques_P Parameter: Age (day) Value: 21
  misc_feature: MA Experiment 20000235 PARAMETER Experiment Name: At_Siliques_P Parameter: Organism Value: A. thaliana
  misc_feature: MA Experiment 20000235 PARAMETER Experiment Name: At_Siliques_P Parameter: Plant Line Value: WS
  misc_feature: MA Experiment 20000235 PARAMETER Experiment Name: At_Siliques_P Parameter: Tissue Value: 5-10mm Siliques vs. Whole Plant
  misc_feature: MA Experiment ID: 20000286 Result: Down-regulated in Transcription
  misc_feature: MA Experiment 20000286 PARAMETER Experiment Name: At_Open_Flower_P Parameter: Age (day) Value: 21
  misc_feature: MA Experiment 20000286 PARAMETER Experiment Name: At_Open_Flower_P Parameter: Plant Line Value: WS
  misc_feature: MA Experiment 20000286 PARAMETER Experiment Name: At_Open_Flower_P Parameter: Tissue Value: Half Open vs. Whole Plant
ccacgcgtccgaagtgatttcaagtggttggttctgttccttttctcgtccccgatcaagtttcttctcctaaactccagaatttggtcttgaaaatctctaaaggctcttcctttttgttcatttctctacccagatatcgatgggtacatacctaagttctccgaaaactgaaaagttatcagaagatggtgagaatgataagctcagatttggtttatcgtctatgcaaggttggcgcgctaccatggaagacgcgcatgctgcaattcttgatcttgatgataagacatcgttcttcggtgtgtatgatggccatggaggtaaagtcgttgcaaagttctgtgccaagtatctacaccagcaggttatcagtaatgaagcgtataaaactggagacgtcgaaacatctcttcgaagagcattctttagaatggatgacatgatgcaaggacaaagaggatggcgagagttagctgtacttggcgacaagatgaacaaatttagcggcatgattgaaggatttatatggtcaccaagaagcggtgacaccaataaccaacccgatagttggcctcttgaagatggtcctcattctgatttcacgggacctacctcggggtgcacagcgtgtgtagctcttattaaagataagaagctctttgttgcaaatgccggtgactcacgttgtgtgatatcaagaaagagtcaggcttacaatctttctaaagatcacaagcctgatcttgaagttgaaaaagaaaggatattgaaagctggtggctttattcacgctgggagaatcaatggaagcttgaatctgacaagagccattggtgatatggagttcaagcagaataagtttttaccatctgaaaagcaaatggttactgctgatccagatataaacactattgacctatgtgatgatgatgactttcttgttgttgcttgcgatggaatatgggattgtatgtcaagccaggaactagttgattttatccatgaacagttaaaatctgaaacaaaactttcaacagtatgtgaaaaggttgttgatagatgtttggctccagatacagcgactggtgaaggttgtgataatatgaccatcatcttggttcagttcaagaagcctaacccatctgagactgaaccagaagattccaaaccagaaccaagcgaagatgagccgagctcatcaagctagatatctttaaagagccaagaggaagaagatttgtgaaagtgtctcttttatcattgactttttgttcaacattgtaaatccttttgaatgtggcttagattcaagaagctggctttttcccagtttagcttcaagaagtctgagatgtcacagagtttggtttaatcttaaaaggacctttgtatagatatttcttgtgattgatgttttcagctatagtttaaaaaattcacaaggacaagctttttgtacc

SEQ ID NO: 76112 - protein, 355 aa, Arabidopsis thaliana; identical to SEQ ID NO: 28678
  peptide (1)..(355): Ceres Seq. ID no. 7105901
  misc_feature (22)..(322): Pfam Name: Protein phosphatase 2C Pfam Description: Protein phosphatase 2C
  misc_feature (1)..(355): Homolog of NCBI NO: 15224677 NR Description: protein phosphatase 2C (PP2C); protein id: supported by cDNA: 11428., supported by cDNA: gi_15292878, by cDNA: gi_18652942, supported by cDNA: gi_20258908 [Arabidopsis
  misc_feature (1)..(355): Homolog of NCBI NO: 15236548 NR Description: protein phosphatase 2C (PP2C); protein id: supported by cDNA: gi_16209697 [Arabidopsis thaliana]
  misc_feature (1)..(343): Homolog of NCBI NO: 12003990 NR Description: protein phosphatase type-2C [Zea mays]
  misc_feature (156)..(331): Homolog of NCBI NO: 19921654 NR Description: CG10417-PA [Drosophila melanogaster]
  misc_feature (1)..(99): Homolog of NCBI NO: 19921654 NR Description: CG10417-PA [Drosophila melanogaster]
  misc_feature (134)..(355): Homolog of NCBI NO: 27697184 NR Description: Similar to protein phosphatase 1G (formerly 2C),
  misc_feature (156)..(348): Homolog of NCBI NO: 4505999 NR Description: protein phosphatase 1G (formerly 2C), gamma isoform; protein phosphatase 1G (formerly 2C),; protein
  misc_feature (1)..(120): Homolog of NCBI NO: 27697184 NR Description: Similar to protein phosphatase 1G (formerly 2C),
  misc_feature (1)..(117): Homolog of NCBI NO: 4505999 NR Description: protein phosphatase 1G (formerly 2C), gamma isoform; protein phosphatase 1G (formerly 2C),; protein
  misc_feature (156)..(348): Homolog of NCBI NO: 22219444 NR Description: protein phosphatase 1G (formerly 2C), gamma isoform [Rattus norvegicus] >gi|22087629|gb|AAM90993.1|

SEQ ID NO: 76113 - protein, 327 aa, Arabidopsis thaliana; identical to SEQ ID NO: 28679
  peptide (1)..(327): Ceres Seq. ID no. 7105902
  misc_feature (1)..(294): Pfam Name: Protein phosphatase 2C Pfam Description: Protein phosphatase 2C
  misc_feature (1)..(327): Homolog of NCBI NO: 15224677 NR Description: protein phosphatase 2C (PP2C); protein id: supported by cDNA: 11428., supported by cDNA: gi_15292878, by cDNA: gi_18652942, supported by cDNA: gi_20258908 [Arabidopsis
  misc_feature (1)..(327): Homolog of NCBI NO: 15236548 NR Description: protein phosphatase 2C (PP2C); protein id: supported by cDNA: gi_16209697 [Arabidopsis thaliana]
  misc_feature (1)..(315): Homolog of NCBI NO: 12003990 NR Description: protein phosphatase type-2C [Zea mays]
  misc_feature (128)..(303): Homolog of NCBI NO: 19921654 NR Description: CG10417-PA [Drosophila melanogaster]
  misc_feature (1)..(71): Homolog of NCBI NO: 19921654 NR Description: CG10417-PA [Drosophila melanogaster]
  misc_feature (106)..(327): Homolog of NCBI NO: 27697184 NR Description: Similar to protein phosphatase 1G (formerly 2C),
  misc_feature (128)..(320): Homolog of NCBI NO: 4505999 NR Description: protein phosphatase 1G (formerly 2C), gamma isoform; protein phosphatase 1G (formerly 2C),; protein
  misc_feature (1)..(92): Homolog of NCBI NO: 27697184 NR Description: Similar to protein phosphatase 1G (formerly 2C),
  misc_feature (1)..(89): Homolog of NCBI NO: 4505999 NR Description: protein phosphatase 1G (formerly 2C), gamma isoform; protein phosphatase 1G (formerly 2C),; protein
  misc_feature (128)..(320): Homolog of NCBI NO: 22219444 NR Description: protein phosphatase 1G (formerly 2C), gamma isoform [Rattus norvegicus] >gi|22087629|gb|AAM90993.1|

SEQ ID NO: 76114 - protein, 320 aa, Arabidopsis thaliana; identical to SEQ ID NO: 28680
  peptide (1)..(320): Ceres Seq. ID no. 7105903
  misc_feature (1)..(287): Pfam Name: Protein phosphatase 2C Pfam Description: Protein phosphatase 2C
  misc_feature (1)..(320): Homolog of NCBI NO: 15224677 NR Description: protein phosphatase 2C (PP2C); protein id: supported by cDNA: 11428., supported by cDNA: gi_15292878, by cDNA: gi_18652942, supported by cDNA: gi_20258908 [Arabidopsis
  misc_feature (1)..(320): Homolog of NCBI NO: 15236548 NR Description: protein phosphatase 2C (PP2C); protein id: supported by cDNA: gi_16209697 [Arabidopsis thaliana]
  misc_feature (1)..(308): Homolog of NCBI NO: 12003990 NR Description: protein phosphatase type-2C [Zea mays]
  misc_feature (121)..(296): Homolog of NCBI NO: 19921654 NR Description: CG10417-PA [Drosophila melanogaster]
  misc_feature (1)..(64): Homolog of NCBI NO: 19921654 NR Description: CG10417-PA [Drosophila melanogaster]
  misc_feature (99)..(320): Homolog of NCBI NO: 27697184 NR Description: Similar to protein phosphatase 1G (formerly 2C),
  misc_feature (121)..(313): Homolog of NCBI NO: 4505999 NR Description: protein phosphatase 1G (formerly 2C), gamma isoform; protein phosphatase 1G (formerly 2C),; protein
  misc_feature (1)..(85): Homolog of NCBI NO: 27697184 NR Description: Similar to protein phosphatase 1G (formerly 2C),
  misc_feature (1)..(82): Homolog of NCBI NO: 4505999 NR Description: protein phosphatase 1G (formerly 2C), gamma isoform; protein phosphatase 1G (formerly 2C),; protein
  misc_feature (121)..(313): Homolog of NCBI NO: 22219444 NR Description: protein phosphatase 1G (formerly 2C), gamma isoform [Rattus norvegicus] >gi|22087629|gb|AAM90993.1|

SEQ ID NO: 76115 - DNA, 1263 bp, Arabidopsis thaliana
  misc_feature (1)..(1263): Ceres Seq. ID no. 7105947
  misc_feature: MA Experiment ID: 108569 Result: Up-regulated in Transcription
  misc_feature: MA Experiment 108569 PARAMETER Experiment Name: At_0.001%_MeJA__cDNA_P Parameter: Timepoint (hr) Value: 6
  misc_feature: MA Experiment 108569 PARAMETER Experiment Name: At_0.001%_MeJA__cDNA_P Parameter: Tissue Value: Aerial
  misc_feature: MA Experiment 108569 PARAMETER Experiment Name: At_0.001%_MeJA__cDNA_P Parameter: Treatment Value: 0.001% MeJA vs. No Treatment
  misc_feature: MA Experiment ID: 108573 Result: Up-regulated in Transcription
  misc_feature: MA Experiment 108573 PARAMETER Experiment Name: At_Drought_cDNA_P Parameter: Timepoint (hr) Value: 6
  misc_feature: MA Experiment 108573 PARAMETER Experiment Name: At_Drought_cDNA_P Parameter: Tissue Value: Aerial
  misc_feature: MA Experiment 108573 PARAMETER Experiment Name: At_Drought_cDNA_P Parameter: Treatment Value: Drought vs. No Drought
  misc_feature: MA Experiment ID: 108579 Result: Down-regulated in Transcription
  misc_feature: MA Experiment 108579 PARAMETER Experiment Name: At_4deg_Cold_cDNA_P Parameter: Temperature (deg C) Value: 4 vs. 22
  misc_feature: MA Experiment 108579 PARAMETER Experiment Name: At_4deg_Cold_cDNA_P Parameter: Timepoint (hr) Value: 6
  misc_feature: MA Experiment 108579 PARAMETER Experiment Name: At_4deg_Cold_cDNA_P Parameter: Tissue Value: Aerial
attcgcggccgcgagagagagaaactcaccggggaatcttgaaatcaccatcacatcctctcttccctcgatctccgttatcgactgtaaatcgaattttgttgttgctttgttttcttgggcgaataaaagaggataatttagtggcggggttttcgagaaagagagagaaagaatgagttttcaagatttagaggcgggaagaggaagatcattagcttcttcaaggaacatcaatggtggtggtagtagacaagacacgactcaagatgttgcttctggtatatttcagatcaatacaagtgtttccactttccatcgtcttgtcaatactcttggtactcctaaagatacgcctgagctcagagagaagctgcataagacaagattatatattggacagttagtgaaagatacatcagctaaacttaaagaagctagtgaaactgatcatcaaagaggtgtaaatcaaaagaagaagattgtggatgctaagcttgcaaaggactttcaagctgtgttgaaagagtttcaaaaggctcagcgtcttgctgctgaaagagaaaccgtatatgctcctcttgtccacaagccatctcttccctcaagctacacatccagtgagatagatgtgaatggagataagcatccagagcagcgtgcccttcttgtggaatcaaaaagacaagaacttgtactgttggacaatgagattgcgttcaatgaggctgttattgaggaaagagagcaagggatacaagaaattcagcagcaaattggcgaggtgcacgagatcttcaaagacttggcagtgttggtgcacgatcaaggaaacatgatagatgatattggtactcacatcgataactcttacgctgcaactgcccaaggaaaatcccatctcgtaaggcatcaaagacacaaagatcaaattcttctctgacgtgcttgctcttggtgatttttggtatcgtgctcatgattgttattatagtgctcgcagtttgatttccccaagctcataaaagcatggacaagtgcttcatcatcaatcaagaagcatcaatgagtatatgtttgtcacgactctctttgttcctacaatttagtctgttggactattggtctcttgtttcttgttatcgagtatatagagtagttcactttggtttgatttggcttgtgtttgctgagtcttggttctgaaggagagagtgttactgctttgtctctgtaatataacttggttctgaagcggccgcg

SEQ ID NO: 76116 - protein, 255 aa, Arabidopsis thaliana; identical to SEQ ID NO: 24038
  peptide (1)..(255): Ceres Seq. ID no. 7105948
  misc_feature (189)..(251): Pfam Name: SNARE domain Pfam Description: SNARE domain
  misc_feature (1)..(243): Homolog of NCBI NO: 7488213 NR Description: probable syntaxin - Arabidopsis thaliana
  misc_feature (1)..(255): Homolog of NCBI NO: 18414953 NR Description: syntaxin SYP23; protein id: At4g17730.1 thaliana] >gi|28380150|sp|O04378|SY23_ARATH Syntaxin 23 (AtSYP23)
  misc_feature (1)..(245): Homolog of NCBI NO: 18422725 NR Description: syntaxin SYP22 (VAM3); protein id: At5g46860.1, by cDNA: 13184., supported by cDNA: gi_14326484, supported by gi_18086568, supported by cDNA: gi_1850545 [Arabidopsis thaliana]

SEQ ID NO: 76117 - DNA, 1813 bp, Arabidopsis thaliana
  misc_feature (1)..(1813): Ceres Seq. ID no. 7106018
  misc_feature: MA Experiment ID: 20000171 Result: Up-regulated in Transcription
  misc_feature: MA Experiment 20000171 PARAMETER Experiment Name: At_42deg_Heat_P Parameter: Age (day) Value: 14
  misc_feature: MA Experiment 20000171 PARAMETER Experiment Name: At_42deg_Heat_P Parameter: Organism Value: A. thaliana
  misc_feature: MA Experiment 20000171 PARAMETER Experiment Name: At_42deg_Heat_P Parameter: Plant Line Value: WS
  misc_feature: MA Experiment 20000171 PARAMETER Experiment Name: At_42deg_Heat_P Parameter: Temperature (deg C) Value: 42 vs. 22
  misc_feature: MA Experiment 20000171 PARAMETER Experiment Name: At_42deg_Heat_P Parameter: Timepoint (hr) Value: 1
  misc_feature: MA Experiment 20000171 PARAMETER Experiment Name: At_42deg_Heat_P Parameter: Tissue Value: Aerial
  misc_feature: MA Experiment ID: 20000182 Result: Up-regulated in Transcription
  misc_feature: MA Experiment 20000182 PARAMETER Experiment Name: At_2mM_SA_P Parameter: Age (day) Value: 14
  misc_feature: MA Experiment 20000182 PARAMETER Experiment Name: At_2mM_SA_P Parameter: Organism Value: A. thaliana
  misc_feature: MA Experiment 20000182 PARAMETER Experiment Name: At_2mM_SA_P Parameter: Plant Line Value: WS
  misc_feature: MA Experiment 20000182 PARAMETER Experiment Name: At_2mM_SA_P Parameter: Timepoint (hr) Value: 6
  misc_feature: MA Experiment 20000182 PARAMETER Experiment Name: At_2mM_SA_P Parameter: Tissue Value: Aerial
  misc_feature: MA Experiment 20000182 PARAMETER Experiment Name: At_2mM_SA_P Parameter: Treatment Value: 2mM SA vs. No Treatment
  misc_feature: MA Experiment ID: 20001905 Result: Up-regulated in Transcription
  misc_feature: MA Experiment 20001905 PARAMETER Experiment Name: At_Drought_Reproduction_P Parameter: Age (day) Value: 40
  misc_feature: MA Experiment 20001905 PARAMETER Experiment Name: At_Drought_Reproduction_P Parameter: Organism Value: A. thaliana
  misc_feature: MA Experiment 20001905 PARAMETER Experiment Name: At_Drought_Reproduction_P Parameter: Plant Line Value: WS
  misc_feature: MA Experiment 20001905 PARAMETER Experiment Name: At_Drought_Reproduction_P Parameter: Timepoint (day) Value: 10
  misc_feature: MA Experiment 20001905 PARAMETER Experiment Name: At_Drought_Reproduction_P Parameter: Tissue Value: Rosettes
  misc_feature: MA Experiment 20001905 PARAMETER Experiment Name: At_Drought_Reproduction_P Parameter: Treatment Value: Drought vs. No Drought
gaattcggcacgaggcgaagaccaaccagtctgttaattttgtataaacaatgaaacgaagaagatcttccgagaatattctctccttctcacgcataccctagaatattgtttcgtctctcttccttctacgtttgcttatttgccccaactcgacgcgaatcatcagcttttataaattctgtcaactcaaagattgtttctgaattggaatcttacagaggtttagcttgagatgatatgacgaatcagcaggagcaacacattgcgatatttacaacagctagtattccatggcttacgggaactgctgttaatcctctcttccgtgctgcctaccttgcaaatgatggggaaagacgggtcacgttggtgattccatggctgactttgaagcaccaaaagcttgtctacccaaatagcatcacttttagttccccgtcagagcaagaagcttatgtccgccagtggcttgaggagagagtctcttttcgtttagcctttgagatacgtttctatcctggaaagtttgctattgacaaaaggagtattcttcctgttggggatatatctgatgccattcctgatgaagaggcagacattgctgtcctcgaggagcctgagcatctcacatggtttcatcatggccaaaaatggaaaactaagttcaactacgtcataggaatcgtacacactaactacttggaatacgttaaaagagagaaacaaggccgtgtcaaagcatttttcctcaaatacttaaatagttgggttgttggcatttactgccacaaggtaatcaggttatctgctgcgactcaagaataccctaaatctatagtctgcaatgttcatggcgtcaaccctaaatttctcgaaattgggttgagaaaactagaacagcagaagctccaggagcagcccttcactaaaggcgcatactacattggtaagatggtctggagcaaagggtacaaggagcttcttaaactacttgagaaacaccaaaaggaacttgccgagttagaggttgatttatacggtgatggagaggactctgaagagatcaaagaagcagcccgaaaactcgacttgacggttaatgtttacccaggacgtgatcacgctgactcgctatttcacaactataaagtgtttctcaaccccagcacgacagacgttgtgtgtacaacaactgcagaagccttggcgatgggaaaaatagtagtatgcgcgaatcacatatcgaacaagttcttcaaacagtttcccaactgcagaacctatgacgatggacaaggttttgtaagagccacgctcaaggctcttggggaacaaccatcgcaacttacagagcaacaaaggcatgaactatcatgggaagctgctacacaacggtttataaaagtctctgatctgaaccggttatcaagagctgattcgaacttgtcaaagagaagtgtgtttgcgtcatcttcgattagtgtggggaaaaacttggaggatatgtcagcgtatattcatttcttggcgtctggatttgaagcttcaagaacagcttttggtgctatacctggaagcttgcagcccgatgaagagttatgtagagatcttggtttgtctctcaacactccttccccaaatactcgcaagcaagattgacctgttttttaatttatctttgtctgcatatcattgggatatttttgtgtataaatcaatgtatactatctgaatcattctatagcagctttggtgtaatattgatgatatatatactatatattaacatgaaagttagatttttcatctt

SEQ ID NO: 76118 - protein, 473 aa, Arabidopsis thaliana
  peptide (1)..(473): Ceres Seq. ID no. 7106019
  misc_feature (216)..(377): Pfam Name: Glycosyl transferases group 1 Pfam Description: Glycosyl transferases group 1
  misc_feature (1)..(473): Homolog of NCBI NO: 22328179 NR Description: similar to digalactosyldiacylglycerol; protein At4g00550.1, supported by cDNA: gi_18141111 [Arabidopsis >gi|18141112|gb|AAL60504.1|AF421193_1 digalactosyldiacylglycerol
  misc_feature (302)..(473): Homolog of NCBI NO: 7486557 NR Description: hypothetical protein F6N23.24 - Arabidopsis >gi|3047114|gb|AAC13625.1| F6N23.24 gene product [Arabidopsis >gi|7267394|emb|CAB80864.1| predicted protein of unknown function
  misc_feature (96)..(266): Homolog of NCBI NO: 7486557 NR Description: hypothetical protein F6N23.24 - Arabidopsis >gi|3047114|gb|AAC13625.1| F6N23.24 gene product [Arabidopsis >gi|7267394|emb|CAB80864.1| predicted protein of unknown function
  misc_feature (1)..(24): Homolog of NCBI NO: 7486557 NR Description: hypothetical protein F6N23.24 - Arabidopsis >gi|3047114|gb|AAC13625.1| F6N23.24 gene product [Arabidopsis >gi|7267394|emb|CAB80864.1| predicted protein of unknown function
  misc_feature (5)..(462): Homolog of NCBI NO: 34902044 NR Description: name [Oryza sativa (japonica cultivar-group)]
  misc_feature (3)..(460): Homolog of NCBI NO: 38344037 NR Description: OJ991214_12.18 [Oryza sativa (japonica
  misc_feature (13)..(460): Homolog of NCBI NO: 27542603 NR Description: digalactosyldiacylglycerol synthase [Xerophyta
  misc_feature (2)..(473): Homolog of NCBI NO: 15229824 NR Description: digalactosyldiacylglycerol synthase; protein id: supported by cDNA: gi_18700088, supported by cDNA: gi_20855997, by cDNA: gi_5354157 [Arabidopsis thaliana]
  misc_feature (239)..(473): Homolog of NCBI NO: 18141114 NR Description: digalactosyldiacylglycerol synthase [Arabidopsis
  misc_feature (2)..(301): Homolog of NCBI NO: 30681840 NR Description: digalactosyldiacylglycerol synthase 1 (MGDG:MGDG (galactolipid galactosyltransferase) (DGD1) [Arabidopsis
MTNQQEQHIAIFTTASIPWLTGTAVNPLFRAAYLANDGERRVTLVIPWLTLKHQKLVYPNSITFSSPSEQEAYVRQWLEERVSFRLAFEIRFYPGKFAIDKRSILPVGDISDAIPDEEADIAVLEEPEHLTWFHHGQKWKTKFNYVIGIVHTNYLEYVKREKQGRVKAFFLKYLNSWVVGIYCHKVIRLSAATQEYPKSIVCNVHGVNPKFLEIGLRKLEQQKLQEQPFTKGAYYIGKMVWSKGYKELLKLLEKHQKELAELEVDLYGDGEDSEEIKEAARKLDLTVNVYPGRDHADSLFHNYKVFLNPSTTDVVCTTTAEALAMGKIVVCANHISNKFFKQFPNCRTYDDGQGFVRATLKALGEQPSQLTEQQRHELSWEAATQRFIKVSDLNRLSRADSNLSKRSVFASSSISVGKNLEDMSAYIHFLASGFEASRTAFGAIPGSLQPDEELCRDLGLSLNTPSPNTRKQD

SEQ ID NO: 76119 - DNA, 2787 bp, Arabidopsis thaliana
  misc_feature (1)..(2787): Ceres Seq. ID no. 7106145
  misc_feature: MA Experiment ID: 108462 Result: Up-regulated in Transcription
  misc_feature: MA Experiment 108462 PARAMETER Experiment Name: At_Germinating_Seeds_cDNA_P Parameter: Age (day) Value: 2 vs. 0
  misc_feature: MA Experiment 108462 PARAMETER Experiment Name: At_Germinating_Seeds_cDNA_P Parameter: Tissue Value: Germinating Seeds
  misc_feature: MA Experiment ID: 108463 Result: Up-regulated in Transcription
  misc_feature: MA Experiment 108463 PARAMETER Experiment Name: At_Germinating_Seeds_cDNA_P Parameter: Age (day) Value: 3 vs. 0
  misc_feature: MA Experiment 108463 PARAMETER Experiment Name: At_Germinating_Seeds_cDNA_P Parameter: Tissue Value: Germinating Seeds
  misc_feature: MA Experiment ID: 108464 Result: Up-regulated in Transcription
  misc_feature: MA Experiment 108464 PARAMETER Experiment Name: At_Germinating_Seeds_cDNA_P Parameter: Age (day) Value: 4 vs. 0
  misc_feature: MA Experiment 108464 PARAMETER Experiment Name: At_Germinating_Seeds_cDNA_P Parameter: Tissue Value: Germinating Seeds
  misc_feature: MA Experiment ID: 108488 Result: Down-regulated in Transcription
  misc_feature: MA Experiment ID: 108561 Result: Up-regulated in Transcription
  misc_feature: MA Experiment 108561 PARAMETER Experiment Name: At_100uM_ABA_cDNA_P Parameter: Timepoint (hr) Value: 6
  misc_feature: MA Experiment 108561 PARAMETER Experiment Name: At_100uM_ABA_cDNA_P Parameter: Tissue Value: Aerial
  misc_feature: MA Experiment 108561 PARAMETER Experiment Name: At_100uM_ABA_cDNA_P Parameter: Treatment Value: 100uM ABA vs. No Treatment
  misc_feature: MA Experiment ID: 108573 Result: Up-regulated in Transcription
  misc_feature: MA Experiment 108573 PARAMETER Experiment Name: At_Drought_cDNA_P Parameter: Timepoint (hr) Value: 6
  misc_feature: MA Experiment 108573 PARAMETER Experiment Name: At_Drought_cDNA_P Parameter: Tissue Value: Aerial
  misc_feature: MA Experiment 108573 PARAMETER Experiment Name: At_Drought_cDNA_P Parameter: Treatment Value: Drought vs. No Drought
  misc_feature: MA Experiment ID: 108605 Result: Up-regulated in Transcription
  misc_feature: MA Experiment 108605 PARAMETER Experiment Name: At_100uM_ABA_cDNA_P Parameter: Timepoint (hr) Value: 6
  misc_feature: MA Experiment 108605 PARAMETER Experiment Name: At_100uM_ABA_cDNA_P Parameter: Tissue Value: Aerial
  misc_feature: MA Experiment 108605 PARAMETER Experiment Name: At_100uM_ABA_cDNA_P Parameter: Treatment Value: 100uM ABA vs. No Treatment
  misc_feature: MA Experiment ID: 108607 Result: Up-regulated in Transcription
  misc_feature: MA Experiment 108607 PARAMETER Experiment Name: At_100uM_ABA_cDNA_P Parameter: Timepoint (hr) Value: 4
  misc_feature: MA Experiment 108607 PARAMETER Experiment Name: At_100uM_ABA_cDNA_P Parameter: Tissue Value: Aerial
  misc_feature: MA Experiment 108607 PARAMETER Experiment Name: At_100uM_ABA_cDNA_P Parameter: Treatment Value: 100uM ABA vs. No Treatment
  misc_feature: MA Experiment ID: 108609 Result: Up-regulated in Transcription
  misc_feature: MA Experiment 108609 PARAMETER Experiment Name: At_100uM_ABA_cDNA_P Parameter: Timepoint (hr) Value: 24
  misc_feature: MA Experiment 108609 PARAMETER Experiment Name: At_100uM_ABA_cDNA_P Parameter: Tissue Value: Aerial
  misc_feature: MA Experiment 108609 PARAMETER Experiment Name: At_100uM_ABA_cDNA_P Parameter: Treatment Value: 100uM ABA vs. No Treatment
  misc_feature: MA Experiment ID: 20000069 Result: Up-regulated in Transcription
  misc_feature: MA Experiment 20000069 PARAMETER Experiment Name: At_100uM_ABA_Mutants_cDNA_P Parameter: Plant Line Value: CS23
  misc_feature: MA Experiment 20000069 PARAMETER Experiment Name: At_100uM_ABA_Mutants_cDNA_P Parameter: Timepoint (hr) Value: 6
  misc_feature: MA Experiment 20000069 PARAMETER Experiment Name: At_100uM_ABA_Mutants_cDNA_P Parameter: Tissue Value: Aerial
  misc_feature: MA Experiment 20000069 PARAMETER Experiment Name: At_100uM_ABA_Mutants_cDNA_P Parameter: Treatment Value: 100uM ABA vs. No Treatment
  misc_feature: MA Experiment ID: 20000070 Result: Up-regulated in Transcription
  misc_feature: MA Experiment 20000070 PARAMETER Experiment Name: At_100uM_ABA_Mutants_cDNA_P Parameter: Plant Line Value: CS24
  misc_feature: MA Experiment 20000070 PARAMETER Experiment Name: At_100uM_ABA_Mutants_cDNA_P Parameter: Timepoint (hr) Value: 6
  misc_feature: MA Experiment 20000070 PARAMETER Experiment Name: At_100uM_ABA_Mutants_cDNA_P Parameter: Tissue Value: Aerial
  misc_feature: MA Experiment 20000070 PARAMETER Experiment Name: At_100uM_ABA_Mutants_cDNA_P Parameter: Treatment Value: 100uM ABA vs. No Treatment
  misc_feature: MA Experiment ID: 20000072 Result: Up-regulated in Transcription
  misc_feature: MA Experiment 20000072 PARAMETER Experiment Name: At_100uM_ABA_Mutants_cDNA_P Parameter: Plant Line Value: CS8105
  misc_feature: MA Experiment 20000072 PARAMETER Experiment Name: At_100uM_ABA_Mutants_cDNA_P Parameter: Timepoint (hr) Value: 6
  misc_feature: MA Experiment 20000072 PARAMETER Experiment Name: At_100uM_ABA_Mutants_cDNA_P Parameter: Tissue Value: Aerial
  misc_feature: MA Experiment 20000072 PARAMETER Experiment Name: At_100uM_ABA_Mutants_cDNA_P Parameter: Treatment Value: 100uM ABA vs. No Treatment
  misc_feature: MA Experiment ID: 20000086 Result: Up-regulated in Transcription
  misc_feature: MA Experiment 20000086 PARAMETER Experiment Name: At_100uM_ABA_Mutants_cDNA_P Parameter: Plant Line Value: CS22
  misc_feature: MA Experiment 20000086 PARAMETER Experiment Name: At_100uM_ABA_Mutants_cDNA_P Parameter: Timepoint (hr) Value: 6
  misc_feature: MA Experiment 20000086 PARAMETER Experiment Name: At_100uM_ABA_Mutants_cDNA_P Parameter: Tissue Value: Aerial
  misc_feature: MA Experiment 20000086 PARAMETER Experiment Name: At_100uM_ABA_Mutants_cDNA_P Parameter: Treatment Value: 100uM ABA vs. No Treatment
  misc_feature: MA Experiment ID: 20000087 Result: Up-regulated in Transcription
  misc_feature: MA Experiment 20000087 PARAMETER Experiment Name: At_100uM_ABA_Mutants_cDNA_P Parameter: Plant Line Value: WS
  misc_feature: MA Experiment 20000087 PARAMETER Experiment Name: At_100uM_ABA_Mutants_cDNA_P Parameter: Timepoint (hr) Value: 6
  misc_feature: MA Experiment 20000087 PARAMETER Experiment Name: At_100uM_ABA_Mutants_cDNA_P Parameter: Tissue Value: Aerial
  misc_feature: MA Experiment 20000087 PARAMETER Experiment Name: At_100uM_ABA_Mutants_cDNA_P Parameter: Treatment Value: 100uM ABA vs. No Treatment
  misc_feature: MA Experiment ID: 20000088 Result: Up-regulated in Transcription
  misc_feature: MA Experiment 20000088 PARAMETER Experiment Name: At_100uM_ABA_Mutants_cDNA_P Parameter: Plant Line Value: Landsberg
  misc_feature: MA Experiment 20000088 PARAMETER Experiment Name: At_100uM_ABA_Mutants_cDNA_P Parameter: Timepoint (hr) Value: 6
  misc_feature: MA Experiment 20000088 PARAMETER Experiment Name: At_100uM_ABA_Mutants_cDNA_P Parameter: Tissue Value: Aerial
  misc_feature: MA Experiment 20000088 PARAMETER Experiment Name: At_100uM_ABA_Mutants_cDNA_P Parameter: Treatment Value: 100uM ABA vs. No Treatment
  misc_feature: MA Experiment ID: 20000111 Result: Down-regulated in Transcription
  misc_feature: MA Experiment 20000111 PARAMETER Experiment Name: At_42deg_Heat_cDNA_P Parameter: Temperature (deg C) Value: 42 vs. 22
  misc_feature: MA Experiment 20000111 PARAMETER Experiment Name: At_42deg_Heat_cDNA_P Parameter: Timepoint (hr) Value: 6
  misc_feature: MA Experiment 20000111 PARAMETER Experiment Name: At_42deg_Heat_cDNA_P Parameter: Tissue Value: Aerial
  misc_feature: MA Experiment ID: 20000113 Result: Down-regulated in Transcription
  misc_feature: MA Experiment 20000113 PARAMETER Experiment Name: At_42deg_Heat_cDNA_P Parameter: Temperature (deg C) Value: 42 vs. 22
  misc_feature: MA Experiment 20000113 PARAMETER Experiment Name: At_42deg_Heat_cDNA_P Parameter: Timepoint (hr) Value: 8
  misc_feature: MA Experiment 20000113 PARAMETER Experiment Name: At_42deg_Heat_cDNA_P Parameter: Tissue Value: Aerial
  misc_feature: MA Experiment ID: 20000117 Result: Up-regulated in Transcription
  misc_feature: MA Experiment 20000117 PARAMETER Experiment Name: At_100uM_ABA_Mutants_cDNA_P Parameter: Plant Line Value: Columbia
  misc_feature: MA Experiment 20000117 PARAMETER Experiment Name: At_100uM_ABA_Mutants_cDNA_P Parameter: Timepoint (hr) Value: 6
  misc_feature: MA Experiment 20000117 PARAMETER Experiment Name: At_100uM_ABA_Mutants_cDNA_P Parameter: Tissue Value: Aerial
  misc_feature: MA Experiment 20000117 PARAMETER Experiment Name: At_100uM_ABA_Mutants_cDNA_P Parameter: Treatment Value: 100uM ABA vs. No Treatment
  misc_feature: MA Experiment ID: 20000169 Result: Up-regulated in Transcription
  misc_feature: MA Experiment 20000169 PARAMETER Experiment Name: At_100uM_ABA_P Parameter: Age (day) Value: 14
  misc_feature: MA Experiment 20000169 PARAMETER Experiment Name: At_100uM_ABA_P Parameter: Organism Value: A. thaliana
  misc_feature: MA Experiment 20000169 PARAMETER Experiment Name: At_100uM_ABA_P Parameter: Plant Line Value: WS
  misc_feature: MA Experiment 20000169 PARAMETER Experiment Name: At_100uM_ABA_P Parameter: Timepoint (hr) Value: 6
  misc_feature: MA Experiment 20000169 PARAMETER Experiment Name: At_100uM_ABA_P Parameter: Tissue Value: Aerial
  misc_feature: MA Experiment 20000169 PARAMETER Experiment Name: At_100uM_ABA_P Parameter: Treatment Value: 100uM ABA vs. No Treatment
  misc_feature: MA Experiment ID: 20000171 Result: Down-regulated in Transcription
  misc_feature: MA Experiment 20000171 PARAMETER Experiment Name: At_42deg_Heat_P Parameter: Age (day) Value: 14
  misc_feature: MA Experiment 20000171 PARAMETER Experiment Name: At_42deg_Heat_P Parameter: Organism Value: A. thaliana
  misc_feature: MA Experiment 20000171 PARAMETER Experiment Name: At_42deg_Heat_P Parameter: Plant Line Value: WS
  misc_feature: MA Experiment 20000171 PARAMETER Experiment Name: At_42deg_Heat_P Parameter: Temperature (deg C) Value: 42 vs. 22
  misc_feature: MA Experiment 20000171 PARAMETER Experiment Name: At_42deg_Heat_P Parameter: Timepoint (hr) Value: 1
  misc_feature: MA Experiment 20000171 PARAMETER Experiment Name: At_42deg_Heat_P Parameter: Tissue Value: Aerial
  misc_feature: MA Experiment ID: 20000267 Result: Up-regulated in Transcription
  misc_feature: MA Experiment 20000267 PARAMETER Experiment Name: At_Drought_P Parameter: Age (day) Value: 7
  misc_feature: MA Experiment 20000267 PARAMETER Experiment Name: At_Drought_P Parameter: Organism Value: A. thaliana
  misc_feature: MA Experiment 20000267 PARAMETER Experiment Name: At_Drought_P Parameter: Plant Line Value: WS
  misc_feature: MA Experiment 20000267 PARAMETER Experiment Name: At_Drought_P Parameter: Timepoint (hr) Value: 6
  misc_feature: MA Experiment 20000267 PARAMETER Experiment Name: At_Drought_P Parameter: Tissue Value: Whole Plant
  misc_feature: MA Experiment 20000267 PARAMETER Experiment Name: At_Drought_P Parameter: Treatment Value: Drought vs. No Drought
  misc_feature: MA Experiment ID: 20000436 Result: Up-regulated in Transcription
  misc_feature: MA Experiment 20000436 PARAMETER Experiment Name: At_Drought_P Parameter: Age (day) Value: 7
  misc_feature: MA Experiment 20000436 PARAMETER Experiment Name: At_Drought_P Parameter: Organism Value: A. thaliana
  misc_feature: MA Experiment 20000436 PARAMETER Experiment Name: At_Drought_P Parameter: Plant Line Value: WS
  misc_feature: MA Experiment 20000436 PARAMETER Experiment Name: At_Drought_P Parameter: Timepoint (hr) Value: 12
  misc_feature: MA Experiment 20000436 PARAMETER Experiment Name: At_Drought_P Parameter: Tissue Value: Whole Plant
  misc_feature: MA Experiment 20000436 PARAMETER Experiment Name: At_Drought_P Parameter: Treatment Value: Drought vs. No Drought
  misc_feature: MA Experiment ID: 20000437 Result: Up-regulated in Transcription
  misc_feature: MA Experiment 20000437 PARAMETER Experiment Name: At_Drought_P Parameter: Age (day) Value: 8
  misc_feature: MA Experiment 20000437 PARAMETER Experiment Name: At_Drought_P Parameter: Organism Value: A. thaliana
  misc_feature: MA Experiment 20000437 PARAMETER Experiment Name: At_Drought_P Parameter: Plant Line Value: WS
  misc_feature: MA Experiment 20000437 PARAMETER Experiment Name: At_Drought_P Parameter: Timepoint (hr) Value: 24
  misc_feature: MA Experiment 20000437 PARAMETER Experiment Name: At_Drought_P Parameter: Tissue Value: Whole Plant
  misc_feature: MA Experiment 20000437 PARAMETER Experiment Name: At_Drought_P Parameter: Treatment Value: Drought vs. No Drought
  misc_feature: MA Experiment ID: 20000453 Result: Up-regulated in Transcription
  misc_feature: MA Experiment 20000453 PARAMETER Experiment Name: At_100uM_ABA_P Parameter: Age (day) Value: 15
  misc_feature: MA Experiment 20000453 PARAMETER Experiment Name: At_100uM_ABA_P Parameter: Organism Value: A. thaliana
  misc_feature: MA Experiment 20000453 PARAMETER Experiment Name: At_100uM_ABA_P Parameter: Plant Line Value: WS
  misc_feature: MA Experiment 20000453 PARAMETER Experiment Name: At_100uM_ABA_P Parameter: Timepoint (hr) Value: 24
  misc_feature: MA Experiment 20000453 PARAMETER Experiment Name: At_100uM_ABA_P Parameter: Tissue Value: Aerial
  misc_feature: MA Experiment 20000453 PARAMETER Experiment Name: At_100uM_ABA_P Parameter: Treatment Value: 100uM ABA vs. No Treatment
  misc_feature: MA Experiment ID: 20001757 Result: Down-regulated in Transcription
  misc_feature: MA Experiment 20001757 PARAMETER Experiment Name: At_50mM_NH4NO3_L-to-H_P Parameter: Timepoint (hr) Value: 6
  misc_feature: MA Experiment 20001757 PARAMETER Experiment Name: At_50mM_NH4NO3_L-to-H_P Parameter: Tissue Value: Leaf
  misc_feature: MA Experiment 20001757 PARAMETER Experiment Name: At_50mM_NH4NO3_L-to-H_P Parameter: Treatment Value: 50mM NH4NO3 vs 100mM Mannitol
  misc_feature: MA Experiment ID: 20001905 Result: Up-regulated in Transcription
  misc_feature: MA Experiment 20001905 PARAMETER Experiment Name: At_Drought_Reproduction_P Parameter: Age (day) Value: 40
  misc_feature: MA Experiment 20001905 PARAMETER Experiment Name: At_Drought_Reproduction_P Parameter: Organism Value: A. thaliana
  misc_feature: MA Experiment 20001905 PARAMETER Experiment Name: At_Drought_Reproduction_P Parameter: Plant Line Value: WS
  misc_feature: MA Experiment 20001905 PARAMETER Experiment Name: At_Drought_Reproduction_P Parameter: Timepoint (day) Value: 10
  misc_feature: MA Experiment 20001905 PARAMETER Experiment Name: At_Drought_Reproduction_P Parameter: Tissue Value: Rosettes
  misc_feature: MA Experiment 20001905 PARAMETER Experiment Name: At_Drought_Reproduction_P Parameter: Treatment Value: Drought vs. No Drought
  misc_feature: MA Experiment ID: 20001906 Result: Up-regulated in Transcription
  misc_feature: MA Experiment 20001906 PARAMETER Experiment Name: At_Drought_Reproduction_P Parameter: Age (day) Value: 35
  misc_feature: MA Experiment 20001906 PARAMETER Experiment Name: At_Drought_Reproduction_P Parameter: Organism Value: A. thaliana
  misc_feature: MA Experiment 20001906 PARAMETER Experiment Name: At_Drought_Reproduction_P Parameter: Plant Line Value: WS
  misc_feature: MA Experiment 20001906 PARAMETER Experiment Name: At_Drought_Reproduction_P Parameter: Timepoint (day) Value: 5
  misc_feature: MA Experiment 20001906 PARAMETER Experiment Name: At_Drought_Reproduction_P Parameter: Tissue Value: Siliques
  misc_feature: MA Experiment 20001906 PARAMETER Experiment Name: At_Drought_Reproduction_P Parameter: Treatment Value: Drought vs. No Drought
  misc_feature: MA Experiment ID: 20001908 Result: Up-regulated in Transcription
  misc_feature: MA Experiment 20001908 PARAMETER Experiment Name: At_Drought_Reproduction_P Parameter: Age (day) Value: 40
  misc_feature: MA Experiment 20001908 PARAMETER Experiment Name: At_Drought_Reproduction_P Parameter: Organism Value: A. thaliana
  misc_feature: MA Experiment 20001908 PARAMETER Experiment Name: At_Drought_Reproduction_P Parameter: Plant Line Value: WS
  misc_feature: MA Experiment 20001908 PARAMETER Experiment Name: At_Drought_Reproduction_P Parameter: Timepoint (day) Value: 10
  misc_feature: MA Experiment 20001908 PARAMETER Experiment Name: At_Drought_Reproduction_P Parameter: Tissue Value: Siliques
  misc_feature: MA Experiment 20001908 PARAMETER Experiment Name: At_Drought_Reproduction_P Parameter: Treatment Value: Drought vs. No Drought
cgcggccgcgtaaccatggcggagaaagtatcggaggacgttatgcttctacacggtgacctcgatttgaaaattgttaaggctaggaggttacctaacatggatatgttctcagaacatttgcgccgtctcttcaccgcctgtaacgcctgtgctagacccaccgataccgatgatgtcgatcccagagataaaggcgaattcggtgataaaaacatccgtagccaccgtaaggttatcaccagcgatccttacgtcaccgtcgtcgttcctcaagcgactctagctcgaacacgtgttttgaaaaactcacaagagcctctttgggacgagaaattcaacatttctatagcgcatccgtttgcttatctcgagttccaggtcaaagacgacgatgttttcggtgctcaaatcattggcacggctaagatcccggttcgagacatcgcatcgggagaacgcatttctggttggtttcctgtactcggtgcttcgggaaaaccgcctaaggcagaaactgctattttcatcgatatgaaatttactccgtttgaccagatccatagctaccgatgtggaatcgccggagatccggagcgtaggggtgttagacggacttatttccctgtgaggaaaggaagtcaggtgaggctttaccaggacgctcatgttatggacggaacgttgccggcgattgggttagataacgggaaagtttatgagcatgggaagtgttgggaagatatatgttatgctatatctgaggctcaccatatgatttacattgttggttggtctatcttccataagattaagcttgttagggaaacaaaagttccaagagataaggatatgacgcttggggaattgctcaaatacaaatcccaggaaggtgttcgagttttgctacttgtatgggatgataagacttctcatgataagtttgggataaaaacgcctggagttatggggacacatgatgaggagactaggaagttcttcaagcattcttctgtgatatgcgttttgtcaccccggtatgccagcagtaagcttgggttgttcaaacaacaggttgttggaactctcttcacgcaccatcaaaagtgtgttcttgtagacactcaggctgttggtaataatcgcaaggtcaccgcttttattggaggtctagatctttgtgatggccgttatgacacacctgagcataggatactccacgatcttgacactgtatttaaggatgatttccacaatcctacatttccagctggtaccaaggccccaagacaaccttggcacgatttgcactgtaggatagatgggcctgcggcatatgatgttctcataaactttgagcagcgatggagaaaggcaacacgatggaaggagtttagcttacgtttaaaggggaaaactcactggcaagatgatgctttgatccggatagggcgtatatcatggattctgagtccagtgtttaaatttctgaaggatggtacttcgataattccagaggacgatccatgtgtttgggtttctaaagaagatgatccagagaactggcatgttcagatattccgttctatcgactcaggatccgtgaaaggatttccaaaatatgaagatgaggctgaggcccagcatctggaatgtgccaagcgtcttgttgtagataaaagcatccagactgcatacatccagacaatcagatctgctcagcatttcatatatatcgagaatcagtatttcctgggttcttcttatgcttggccttcttatagagacgcaggagctgacaatcttattcctatggagttggcactaaagattgttagcaaaatcagagctaaggaaagatttgccgtatatgttgtcataccattgtggcctgaaggcgacccaaagtctggccctgtgcaagaaattctatattggcagagccaaactatgcagatgatgtatgatgttatagcaaaagaactgaaagcggtgcaatcagatgctcatcctctcgattaccttaacttttactgccttggtaaacgagagcagcttccagatgatatgccagccaccaatggcagtgtggtatcagattcttataatttccagcgtttcatgatttacgtgcacgcaaaagggatgatagtagatgatgagtatgtactcatgggatctgctaatatcaaccaaagatctatggcaggcaccaaagatactgaaatcgccatgggcgcataccaacctaatcatacatgggctcacaagggaagacacccacgtggccaggtgtatggatacagaatgtcactatgggcagagcatttaggcaaaactggagatgagtttgtggagccatcagatctggaatgtctgaagaaggtgaacacaatctctgaagaaaactggaaaagattcatagacccgaaattctcagagctacaaggtcacttaataaagtatcctctacaagtagacgttgatggtaaagtaagccctcttcctgattacgagaccttcccagatgttggtggtaagatcattggagctcattccatggctcttcctgacactttaaccacgtaatgtgaatgttcaatgtaaatttcagcatttgttttggggtttcttttgatcctgaataatattagctgaaagtgttgtttgagttgttgtacatttaactgtgttgtttcttttttatacattcttttgtgattgtcgtcaaatatttgttggggtgcaaaatgtagagatcgtgagtgagtgaagaggcgcggccgc

SEQ ID NO: 76120 - protein, 862 aa, Arabidopsis thaliana
  peptide (1)..(862): Ceres Seq. ID no. 7106146
  misc_feature (21)..(143): Pfam Name: C2 domain Pfam Description: C2 domain
  misc_feature (15)..(862): Homolog of NCBI NO: 34900970 NR Description: putative phospholipase D [Oryza sativa (japonica
  misc_feature (11)..(862): Homolog of NCBI NO: 8699602 NR Description: phospholipase D [Oryza sativa]
  misc_feature (80)..(861): Homolog of NCBI NO: 20198318 NR Description: phospholipase D [Arabidopsis thaliana]
  misc_feature (80)..(861): Homolog of NCBI NO: 30688872 NR Description: phospholipase D (PLDbeta) [Arabidopsis thaliana]
  misc_feature (3)..(45): Homolog of NCBI NO: 20198318 NR Description: phospholipase D [Arabidopsis thaliana]
  misc_feature (3)..(45): Homolog of NCBI NO: 30688872 NR Description: phospholipase D (PLDbeta) [Arabidopsis thaliana]
  misc_feature (80)..(861): Homolog of NCBI NO: 20138945 NR Description: Phospholipase D beta 1 (AtPLDbeta1) (PLD beta 1)
  misc_feature (3)..(45): Homolog of NCBI NO: 20138945 NR Description: Phospholipase D beta 1 (AtPLDbeta1) (PLD beta 1)
  misc_feature (80)..(512): Homolog of NCBI NO: 13111663 NR Description: phospholipase PLDb2 [Lycopersicon esculentum]
  misc_feature (507)..(861): Homolog of NCBI NO: 13111663 NR Description: phospholipase PLDb2 [Lycopersicon esculentum]
RGRVTMAEKVSEDVMLLHGDLDLKIVKARRLPNMDMFSEHLRRLFTACNACARPTDTDDVDPRDKGEFGDKNIRSHRKVITSDPYVTVVVPQATLARTRVLKNSQEPLWDEKFNISIAHPFAYLEFQVKDDDVFGAQIIGTAKIPVRDIASGERISGWFPVLGASGKPPKAETAIFIDMKFTPFDQIHSYRCGIAGDPERRGVRRTYFPVRKGSQVRLYQDAHVMDGTLPAIGLDNGKVYEHGKCWEDICYAISEAHHMIYIVGWSIFHKIKLVRETKVPRDKDMTLGELLKYKSQEGVRVLLLVWDDKTSHDKFGIKTPGVMGTHDEETRKFFKHSSVICVLSPRYASSKLGLFKQQVVGTLFTHHQKCVLVDTQAVGNNRKVTAFIGGLDLCDGRYDTPEHRILHDLDTVFKDDFHNPTFPAGTKAPRQPWHDLHCRIDGPAAYDVLINFEQRWRKATRWKEFSLRLKGKTHWQDDALIRIGRISWILSPVFKFLKDGTSIIPEDDPCVWVSKEDDPENWHVQIFRSIDSGSVKGFPKYEDEAEAQHLECAKRLVVDKSIQTAYIQTIRSAQHFIYIENQYFLGSSYAWPSYRDAGADNLIPMELALKIVSKIRAKERFAVYVVIPLWPEGDPKSGPVQEILYWQSQTMQMMYDVIAKELKAVQSDAHPLDYLNFYCLGKREQLPDDMPATNGSVVSDSYNFQRFMIYVHAKGMIVDDEYVLMGSANINQRSMAGTKDTEIAMGAYQPNHTWAHKGRHPRGQVYGYRMSLWAEHLGKTGDEFVEPSDLECLKKVNTISEENWKRFIDPKFSELQGHLIKYPLQVDVDGKVSPLPDYETFPDVGGKIIGAHSMALPDTLTT

SEQ ID NO: 76121 - protein, 857 aa, Arabidopsis thaliana; identical to SEQ ID NO: 41444
  peptide (1)..(857): Ceres Seq. ID no. 7106147
  misc_feature (16)..(138): Pfam Name: C2 domain Pfam Description: C2 domain
  misc_feature (10)..(857): Homolog of NCBI NO: 34900970 NR Description: putative phospholipase D [Oryza sativa (japonica
  misc_feature (6)..(857): Homolog of NCBI NO: 8699602 NR Description: phospholipase D [Oryza sativa]
  misc_feature (75)..(856): Homolog of NCBI NO: 20198318 NR Description: phospholipase D [Arabidopsis thaliana]
  misc_feature (75)..(856): Homolog of NCBI NO: 30688872 NR Description: phospholipase D (PLDbeta) [Arabidopsis thaliana]
  misc_feature (1)..(40): Homolog of NCBI NO: 20198318 NR Description: phospholipase D [Arabidopsis thaliana]
  misc_feature (1)..(40): Homolog of NCBI NO: 30688872 NR Description: phospholipase D (PLDbeta) [Arabidopsis thaliana]
  misc_feature (75)..(856): Homolog of NCBI NO: 20138945 NR Description: Phospholipase D beta 1 (AtPLDbeta1) (PLD beta 1)
  misc_feature (1)..(40): Homolog of NCBI NO: 20138945 NR Description: Phospholipase D beta 1 (AtPLDbeta1) (PLD beta 1)
  misc_feature (75)..(507): Homolog of NCBI NO: 13111663 NR Description: phospholipase PLDb2 [Lycopersicon esculentum]
  misc_feature (502)..(856): Homolog of NCBI NO: 13111663 NR Description: phospholipase PLDb2 [Lycopersicon esculentum]

SEQ ID NO: 76122 - protein, 848 aa, Arabidopsis thaliana; identical to SEQ ID NO: 41445
  peptide (1)..(848): Ceres Seq. ID no. 7106148
  misc_feature (7)..(129): Pfam Name: C2 domain Pfam Description: C2 domain
  misc_feature (1)..(848): Homolog of NCBI NO: 34900970 NR Description: putative phospholipase D [Oryza sativa (japonica
  misc_feature (1)..(848): Homolog of NCBI NO: 8699602 NR Description: phospholipase D [Oryza sativa]
  misc_feature (66)..(847): Homolog of NCBI NO: 20198318 NR Description: phospholipase D [Arabidopsis thaliana]
  misc_feature (66)..(847): Homolog of NCBI NO: 30688872 NR Description: phospholipase D (PLDbeta) [Arabidopsis thaliana]
  misc_feature (1)..(31): Homolog of NCBI NO: 20198318 NR Description: phospholipase D [Arabidopsis thaliana]
  misc_feature (1)..(31): Homolog of NCBI NO: 30688872 NR Description: phospholipase D (PLDbeta) [Arabidopsis thaliana]
  misc_feature (66)..(847): Homolog of NCBI NO: 20138945 NR Description: Phospholipase D beta 1 (AtPLDbeta1) (PLD beta 1)
  misc_feature (1)..(31): Homolog of NCBI NO: 20138945 NR Description: Phospholipase D beta 1 (AtPLDbeta1) (PLD beta 1)
  misc_feature (66)..(498): Homolog of NCBI NO: 13111663 NR Description: phospholipase PLDb2 [Lycopersicon esculentum]
  misc_feature (493)..(847): Homolog of NCBI NO: 13111663 NR Description: phospholipase PLDb2 [Lycopersicon esculentum]

SEQ ID NO: 76123 - DNA, 698 bp, Arabidopsis thaliana
  misc_feature (1)..(698): Ceres Seq. ID no. 7106241
  misc_feature: MA Experiment ID: 108434 Result: Up-regulated in Transcription
  misc_feature: MA Experiment 108434 PARAMETER Experiment Name: At_Root_Tips_cDNA_P Parameter: Tissue Value: Root Tips
ccacgcgtccgggctttcaaagcttcgaggactatcgattgggatggtatggctaaggtccttgtcacagatgaggctcgtagagagttctctaaccttcgtcgtgctttcgatgaggttaacacacagctccagaccaaatttagtcaggaacctgaacccatagattgggattactataggaagggtattggagctggcattgttgacaagtacaaggaagcttatgacagcattgagattccaaagtacgttgacaaagttactcctgaatacaagccaaagtttgatgctttgttggtggaactgaaagaagcagaacagaaatcgctcaaggagtctgaacggttggagaaagaaattgctgatgtccaagagatcagcaaaaagctcagcaccatgactgcagatgagtactttgagaagcacccggaactcaaaaagaagtttgatgacgaaatccgtaatgacaactggggatactgatcatgtttctccatctccggcttggaaagaaaactctctttctctttctctgttctcttactgtgattttgtgagccaatcataacaataataagtacaccattcacttaagcagtgttgagatcttcattccaaggaagataaacgcatttggttttagttatcaatttcacaaagtgtttcgtttcgttcctcagtgaataataagagtc

SEQ ID NO: 76124 - protein, 161 aa, Arabidopsis thaliana
  peptide (1)..(161): Ceres Seq. ID no. 7106242
  misc_feature (8)..(145): Pfam Name: ATP synthase D chain, mitochondrial (ATP5H) Pfam Description: ATP synthase D chain, mitochondrial (ATP5H)
  misc_feature (5)..(161): Homolog of NCBI NO: 15231176 NR Description: putative protein; protein id: At3g52300.1, by cDNA: 27681., supported by cDNA: gi_15215603, supported by gi_20334871 [Arabidopsis thaliana]
  misc_feature (17)..(161): Homolog of NCBI NO: 17939851 NR Description: mitochondrial F0 ATP synthase D chain
  misc_feature (5)..(161): Homolog of NCBI NO: 32352148 NR Description: hypothetical protein [Oryza sativa (japonica
PRVRAFKASRTIDWDGMAKVLVTDEARREFSNLRRAFDEVNTQLQTKFSQEPEPIDWDYYRKGIGAGIVDKYKEAYDSIEIPKYVDKVTPEYKPKFDALLVELKEAEQKSLKESERLEKEIADVQEISKKLSTMTADEYFEKHPELKKKFDDEIRNDNWGY

SEQ ID NO: 76125 - protein, 145 aa, Arabidopsis thaliana; identical to SEQ ID NO: 20822
  peptide (1)..(145): Ceres Seq. ID no. 7106243
  misc_feature (1)..(129): Pfam Name: ATP synthase D chain, mitochondrial (ATP5H) Pfam Description: ATP synthase D chain, mitochondrial (ATP5H)
  misc_feature (1)..(145): Homolog of NCBI NO: 15231176 NR Description: putative protein; protein id: At3g52300.1, by cDNA: 27681., supported by cDNA: gi_15215603, supported by gi_20334871 [Arabidopsis thaliana]
  misc_feature (1)..(145): Homolog of NCBI NO: 17939851 NR Description: mitochondrial F0 ATP synthase D chain
  misc_feature (1)..(145): Homolog of NCBI NO: 32352148 NR Description: hypothetical protein [Oryza sativa (japonica

SEQ ID NO: 76126 - DNA, 1508 bp, Arabidopsis thaliana
  misc_feature (1)..(1508): Ceres Seq. ID no. 7106244
  misc_feature: MA Experiment ID: 108434 Result: Down-regulated in Transcription
  misc_feature: MA Experiment 108434 PARAMETER Experiment Name: At_Root_Tips_cDNA_P Parameter: Tissue Value: Root Tips
  misc_feature: MA Experiment ID: 108461 Result: Down-regulated in Transcription
  misc_feature: MA Experiment 108461 PARAMETER Experiment Name: At_Germinating_Seeds_cDNA_P Parameter: Age (day) Value: 1 vs. 0
  misc_feature: MA Experiment 108461 PARAMETER Experiment Name: At_Germinating_Seeds_cDNA_P Parameter: Tissue Value: Germinating Seeds
  misc_feature: MA Experiment ID: 108488 Result: Down-regulated in Transcription
  misc_feature: MA Experiment ID: 108501 Result: Down-regulated in Transcription
  misc_feature: MA Experiment 108501 PARAMETER Experiment Name: At_ap2_floral_buds_cDNA_P Parameter: Plant Line Value: ap2 (Ler.)
  misc_feature: MA Experiment 108501 PARAMETER Experiment Name: At_ap2_floral_buds_cDNA_P Parameter: Tissue Value: Closed Flower
  misc_feature: MA Experiment ID: 108572 Result: Up-regulated in Transcription
  misc_feature: MA Experiment 108572 PARAMETER Experiment Name: At_Drought_cDNA_P Parameter: Timepoint (hr) Value: 1
  misc_feature: MA Experiment 108572 PARAMETER Experiment Name: At_Drought_cDNA_P Parameter: Tissue Value: Aerial
  misc_feature: MA Experiment 108572 PARAMETER Experiment Name: At_Drought_cDNA_P Parameter: Treatment Value: Drought vs. No Drought
  misc_feature: MA Experiment ID: 108573 Result: Up-regulated in Transcription
  misc_feature: MA Experiment 108573 PARAMETER Experiment Name: At_Drought_cDNA_P Parameter: Timepoint (hr) Value: 6
  misc_feature: MA Experiment 108573 PARAMETER Experiment Name: At_Drought_cDNA_P Parameter: Tissue Value: Aerial
  misc_feature: MA Experiment 108573 PARAMETER Experiment Name: At_Drought_cDNA_P Parameter: Treatment Value: Drought vs. No Drought
  misc_feature: MA Experiment ID: 108579 Result: Down-regulated in Transcription
  misc_feature: MA Experiment 108579 PARAMETER Experiment Name: At_4deg_Cold_cDNA_P Parameter: Temperature (deg C) Value: 4 vs. 22
  misc_feature: MA Experiment 108579 PARAMETER Experiment Name: At_4deg_Cold_cDNA_P Parameter: Timepoint (hr) Value: 6
  misc_feature: MA Experiment 108579 PARAMETER Experiment Name: At_4deg_Cold_cDNA_P Parameter: Tissue Value: Aerial
  misc_feature: MA Experiment ID: 108585 Result: Up-regulated in Transcription
  misc_feature: MA Experiment 108585 PARAMETER Experiment Name: At_5mM_NaNP_cDNA_P Parameter: Timepoint (hr) Value: 6
  misc_feature: MA Experiment 108585 PARAMETER Experiment Name: At_5mM_NaNP_cDNA_P Parameter: Tissue Value: Aerial
  misc_feature: MA Experiment 108585 PARAMETER Experiment Name: At_5mM_NaNP_cDNA_P Parameter: Treatment Value: null
  misc_feature: MA Experiment ID: 108605 Result: Up-regulated in Transcription
  misc_feature: MA Experiment 108605 PARAMETER Experiment Name: At_100uM_ABA_cDNA_P Parameter: Timepoint (hr) Value: 6
  misc_feature: MA Experiment 108605 PARAMETER Experiment Name: At_100uM_ABA_cDNA_P Parameter: Tissue Value: Aerial
  misc_feature: MA Experiment 108605 PARAMETER Experiment Name: At_100uM_ABA_cDNA_P Parameter: Treatment Value: 100uM ABA vs. No Treatment
  misc_feature: MA Experiment ID: 108607 Result: Up-regulated in Transcription
  misc_feature: MA Experiment 108607 PARAMETER Experiment Name: At_100uM_ABA_cDNA_P Parameter: Timepoint (hr) Value: 4
  misc_feature: MA Experiment 108607 PARAMETER Experiment Name: At_100uM_ABA_cDNA_P Parameter: Tissue Value: Aerial
  misc_feature: MA Experiment 108607 PARAMETER Experiment Name: At_100uM_ABA_cDNA_P Parameter: Treatment Value: 100uM ABA vs. No Treatment
  misc_feature: MA Experiment ID: 108608 Result: Up-regulated in Transcription
  misc_feature: MA Experiment 108608 PARAMETER Experiment Name: At_100uM_ABA_cDNA_P Parameter: Timepoint (hr) Value: 1
  misc_feature: MA Experiment 108608 PARAMETER Experiment Name: At_100uM_ABA_cDNA_P Parameter: Tissue Value: Aerial
  misc_feature: MA Experiment 108608 PARAMETER Experiment Name: At_100uM_ABA_cDNA_P Parameter: Treatment Value: 100uM ABA vs. No Treatment
  misc_feature: MA Experiment ID: 108609 Result: Up-regulated in Transcription
  misc_feature: MA Experiment 108609 PARAMETER Experiment Name: At_100uM_ABA_cDNA_P Parameter: Timepoint (hr) Value: 24
  misc_feature: MA Experiment 108609 PARAMETER Experiment Name: At_100uM_ABA_cDNA_P Parameter: Tissue Value: Aerial
  misc_feature: MA Experiment 108609 PARAMETER Experiment Name: At_100uM_ABA_cDNA_P Parameter: Treatment Value: 100uM ABA vs. No Treatment
  misc_feature: MA Experiment ID: 20000069 Result: Up-regulated in Transcription
  misc_feature: MA Experiment 20000069 PARAMETER Experiment Name: At_100uM_ABA_Mutants_cDNA_P Parameter: Plant Line Value: CS23
  misc_feature: MA Experiment 20000069 PARAMETER Experiment Name: At_100uM_ABA_Mutants_cDNA_P Parameter: Timepoint (hr) Value: 6
  misc_feature: MA Experiment 20000069 PARAMETER Experiment Name: At_100uM_ABA_Mutants_cDNA_P Parameter: Tissue Value: Aerial
  misc_feature: MA Experiment 20000069 PARAMETER Experiment Name: At_100uM_ABA_Mutants_cDNA_P Parameter: Treatment Value: 100uM ABA vs. No Treatment
  misc_feature: MA Experiment ID: 20000070 Result: Up-regulated in Transcription
  misc_feature: MA Experiment 20000070 PARAMETER Experiment Name: At_100uM_ABA_Mutants_cDNA_P Parameter: Plant Line Value: CS24
  misc_feature: MA Experiment 20000070 PARAMETER Experiment Name: At_100uM_ABA_Mutants_cDNA_P Parameter: Timepoint (hr) Value: 6
  misc_feature: MA Experiment 20000070 PARAMETER Experiment Name: At_100uM_ABA_Mutants_cDNA_P Parameter: Tissue Value: Aerial
  misc_feature: MA Experiment 20000070 PARAMETER Experiment Name: At_100uM_ABA_Mutants_cDNA_P Parameter: Treatment Value: 100uM ABA vs. No Treatment
  misc_feature: MA Experiment ID: 20000071 Result: Up-regulated in Transcription
  misc_feature: MA Experiment 20000071 PARAMETER Experiment Name: At_100uM_ABA_Mutants_cDNA_P Parameter: Plant Line Value: CS8104
  misc_feature: MA Experiment 20000071 PARAMETER Experiment Name: At_100uM_ABA_Mutants_cDNA_P Parameter: Timepoint (hr) Value: 6
  misc_feature: MA Experiment 20000071 PARAMETER Experiment Name: At_100uM_ABA_Mutants_cDNA_P Parameter: Tissue Value: Aerial
  misc_feature: MA Experiment 20000071 PARAMETER Experiment Name: At_100uM_ABA_Mutants_cDNA_P Parameter: Treatment Value: 100uM ABA vs. No Treatment
  misc_feature: MA Experiment ID: 20000072 Result: Up-regulated in Transcription
  misc_feature: MA Experiment 20000072 PARAMETER Experiment Name: At_100uM_ABA_Mutants_cDNA_P Parameter: Plant Line Value: CS8105
  misc_feature: MA Experiment 20000072 PARAMETER Experiment Name: At_100uM_ABA_Mutants_cDNA_P Parameter: Timepoint (hr) Value: 6
  misc_feature: MA Experiment 20000072 PARAMETER Experiment Name: At_100uM_ABA_Mutants_cDNA_P Parameter: Tissue Value: Aerial
  misc_feature: MA Experiment 20000072 PARAMETER Experiment Name: At_100uM_ABA_Mutants_cDNA_P Parameter: Treatment Value: 100uM ABA vs. No Treatment
  misc_feature: MA Experiment ID: 20000086 Result: Up-regulated in Transcription
  misc_feature: MA Experiment 20000086 PARAMETER Experiment Name: At_100uM_ABA_Mutants_cDNA_P Parameter: Plant Line Value: CS22
  misc_feature: MA Experiment 20000086 PARAMETER Experiment Name: At_100uM_ABA_Mutants_cDNA_P Parameter: Timepoint (hr) Value: 6
  misc_feature: MA Experiment 20000086 PARAMETER Experiment Name: At_100uM_ABA_Mutants_cDNA_P Parameter: Tissue Value: Aerial
  misc_feature: MA Experiment 20000086 PARAMETER Experiment Name: At_100uM_ABA_Mutants_cDNA_P Parameter: Treatment Value: 100uM ABA vs. No Treatment
  misc_feature: MA Experiment ID: 20000087 Result: Up-regulated in Transcription
  misc_feature: MA Experiment 20000087 PARAMETER Experiment Name: At_100uM_ABA_Mutants_cDNA_P Parameter: Plant Line Value: WS
  misc_feature: MA Experiment 20000087 PARAMETER Experiment Name: At_100uM_ABA_Mutants_cDNA_P Parameter: Timepoint (hr) Value: 6
  misc_feature: MA Experiment 20000087 PARAMETER Experiment Name: At_100uM_ABA_Mutants_cDNA_P Parameter: Tissue Value: Aerial
  misc_feature: MA Experiment 20000087 PARAMETER Experiment Name: At_100uM_ABA_Mutants_cDNA_P Parameter: Treatment Value: 100uM ABA vs. No Treatment
  misc_feature: MA Experiment ID: 20000088 Result: Up-regulated in Transcription
  misc_feature: MA Experiment 20000088 PARAMETER Experiment Name: At_100uM_ABA_Mutants_cDNA_P Parameter: Plant Line Value: Landsberg
  misc_feature: MA Experiment 20000088 PARAMETER Experiment Name: At_100uM_ABA_Mutants_cDNA_P Parameter: Timepoint (hr) Value: 6
  misc_feature: MA Experiment 20000088 PARAMETER Experiment Name: At_100uM_ABA_Mutants_cDNA_P Parameter: Tissue Value: Aerial
  misc_feature: MA Experiment 20000088 PARAMETER Experiment Name: At_100uM_ABA_Mutants_cDNA_P Parameter: Treatment Value: 100uM ABA vs. No Treatment
  misc_feature: MA Experiment ID: 20000089 Result: Up-regulated in Transcription
  misc_feature: MA Experiment ID: 20000111 Result: Down-regulated in Transcription
  misc_feature: MA Experiment 20000111 PARAMETER Experiment Name: At_42deg_Heat_cDNA_P Parameter: Temperature (deg C) Value: 42 vs. 22
  misc_feature: MA Experiment 20000111 PARAMETER Experiment Name: At_42deg_Heat_cDNA_P Parameter: Timepoint (hr) Value: 6
  misc_feature: MA Experiment 20000111 PARAMETER Experiment Name: At_42deg_Heat_cDNA_P Parameter: Tissue Value: Aerial
  misc_feature: MA Experiment ID: 20000113 Result: Down-regulated in Transcription
  misc_feature: MA Experiment 20000113 PARAMETER Experiment Name: At_42deg_Heat_cDNA_P Parameter: Temperature (deg C) Value: 42 vs. 22
  misc_feature: MA Experiment 20000113 PARAMETER Experiment Name: At_42deg_Heat_cDNA_P Parameter: Timepoint (hr) Value: 8
  misc_feature: MA Experiment 20000113 PARAMETER Experiment Name: At_42deg_Heat_cDNA_P Parameter: Tissue Value: Aerial
  misc_feature: MA Experiment ID: 20000117 Result: Up-regulated in Transcription
  misc_feature: MA Experiment 20000117 PARAMETER Experiment Name: At_100uM_ABA_Mutants_cDNA_P Parameter: Plant Line Value: Columbia
  misc_feature: MA Experiment 20000117 PARAMETER Experiment Name: At_100uM_ABA_Mutants_cDNA_P Parameter: Timepoint (hr) Value: 6
  misc_feature: MA Experiment 20000117 PARAMETER Experiment Name: At_100uM_ABA_Mutants_cDNA_P Parameter: Tissue Value: Aerial
  misc_feature: MA Experiment 20000117 PARAMETER Experiment Name: At_100uM_ABA_Mutants_cDNA_P Parameter: Treatment Value: 100uM ABA vs. No Treatment
  misc_feature: MA Experiment ID: 20000166 Result: Up-regulated in Transcription
  misc_feature: MA Experiment 20000166 PARAMETER Experiment Name: At_100uM_ABA_P Parameter: Age (day) Value: 14
  misc_feature: MA Experiment 20000166 PARAMETER Experiment Name: At_100uM_ABA_P Parameter: Organism Value: A. thaliana
  misc_feature: MA Experiment 20000166 PARAMETER Experiment Name: At_100uM_ABA_P Parameter: Plant Line Value: WS
  misc_feature: MA Experiment 20000166 PARAMETER Experiment Name: At_100uM_ABA_P Parameter: Timepoint (hr) Value: 1
  misc_feature: MA Experiment 20000166 PARAMETER Experiment Name: At_100uM_ABA_P Parameter: Tissue Value: Aerial
  misc_feature: MA Experiment 20000166 PARAMETER Experiment Name: At_100uM_ABA_P Parameter: Treatment Value: 100uM ABA vs. No Treatment
  misc_feature: MA Experiment ID: 20000169 Result: Up-regulated in Transcription
  misc_feature: MA Experiment 20000169 PARAMETER Experiment Name: At_100uM_ABA_P Parameter: Age (day) Value: 14
  misc_feature: MA Experiment 20000169 PARAMETER Experiment Name: At_100uM_ABA_P Parameter: Organism Value: A. thaliana
  misc_feature: MA Experiment 20000169 PARAMETER Experiment Name: At_100uM_ABA_P Parameter: Plant Line Value: WS
  misc_feature: MA Experiment 20000169 PARAMETER Experiment Name: At_100uM_ABA_P Parameter: Timepoint (hr) Value: 6
  misc_feature: MA Experiment 20000169 PARAMETER Experiment Name: At_100uM_ABA_P Parameter: Tissue Value: Aerial
  misc_feature: MA Experiment 20000169 PARAMETER Experiment Name: At_100uM_ABA_P Parameter: Treatment Value: 100uM ABA vs. No Treatment
  misc_feature: MA Experiment ID: 20000171 Result: Down-regulated in Transcription
  misc_feature: MA Experiment 20000171 PARAMETER Experiment Name: At_42deg_Heat_P Parameter: Age (day) Value: 14
  misc_feature: MA Experiment 20000171 PARAMETER Experiment Name: At_42deg_Heat_P Parameter: Organism Value: A. thaliana
  misc_feature: MA Experiment 20000171 PARAMETER Experiment Name: At_42deg_Heat_P Parameter: Plant Line Value: WS
  misc_feature: MA Experiment 20000171 PARAMETER Experiment Name: At_42deg_Heat_P Parameter: Temperature (deg C) Value: 42 vs. 22
  misc_feature: MA Experiment 20000171 PARAMETER Experiment Name: At_42deg_Heat_P Parameter: Timepoint (hr) Value: 1
  misc_feature: MA Experiment 20000171 PARAMETER Experiment Name: At_42deg_Heat_P Parameter: Tissue Value: Aerial
  misc_feature: MA Experiment ID: 20000173 Result: Down-regulated in Transcription
  misc_feature: MA Experiment 20000173 PARAMETER Experiment Name: At_42deg_Heat_P Parameter: Age (day) Value: 14
  misc_feature: MA Experiment 20000173 PARAMETER Experiment Name: At_42deg_Heat_P Parameter: Organism Value: A. thaliana
  misc_feature: MA Experiment 20000173 PARAMETER Experiment Name: At_42deg_Heat_P Parameter: Plant Line Value: WS
  misc_feature: MA Experiment 20000173 PARAMETER Experiment Name: At_42deg_Heat_P Parameter: Temperature (deg C) Value: 42 vs. 22
  misc_feature: MA Experiment 20000173 PARAMETER Experiment Name: At_42deg_Heat_P Parameter: Timepoint (hr) Value: 6
  misc_feature: MA Experiment 20000173 PARAMETER Experiment Name: At_42deg_Heat_P Parameter: Tissue Value: Aerial
  misc_feature: MA Experiment ID: 20000179 Result: Down-regulated in Transcription
  misc_feature: MA Experiment 20000179 PARAMETER Experiment Name: At_Germinating_Seeds_P Parameter: Age (hr) Value: 6 vs. 0
  misc_feature: MA Experiment 20000179 PARAMETER Experiment Name: At_Germinating_Seeds_P Parameter: Tissue Value: Germinating Seeds
  misc_feature: MA Experiment ID: 20000180 Result: Down-regulated in Transcription
  misc_feature: MA Experiment 20000180 PARAMETER Experiment Name: At_Germinating_Seeds_P Parameter: Age (hr) Value: 24 vs. 0
  misc_feature: MA Experiment 20000180 PARAMETER Experiment Name: At_Germinating_Seeds_P Parameter: Tissue Value: Germinating Seeds
  misc_feature: MA Experiment ID: 20000182 Result: Up-regulated in Transcription
  misc_feature: MA Experiment 20000182 PARAMETER Experiment Name: At_2mM_SA_P Parameter: Age (day) Value: 14
  misc_feature: MA Experiment 20000182 PARAMETER Experiment Name: At_2mM_SA_P Parameter: Organism Value: A. thaliana
  misc_feature: MA Experiment 20000182 PARAMETER Experiment Name: At_2mM_SA_P Parameter: Plant Line Value: WS
  misc_feature: MA Experiment 20000182 PARAMETER Experiment Name: At_2mM_SA_P Parameter: Timepoint (hr) Value: 6
  misc_feature: MA Experiment 20000182 PARAMETER Experiment Name: At_2mM_SA_P Parameter: Tissue Value: Aerial
  misc_feature: MA Experiment 20000182 PARAMETER Experiment Name: At_2mM_SA_P Parameter: Treatment Value: 2mM SA vs. No Treatment
  misc_feature: MA Experiment ID: 20000185 Result: Down-regulated in Transcription
  misc_feature: MA Experiment 20000185 PARAMETER Experiment Name: At_Roots__P Parameter: Age (day) Value: 7 vs. 21
  misc_feature: MA Experiment 20000185 PARAMETER Experiment Name: At_Roots__P Parameter: Organism Value: A. thaliana
  misc_feature: MA Experiment 20000185 PARAMETER Experiment Name: At_Roots__P Parameter: Tissue Value: Roots vs. Whole Plant
  misc_feature: MA Experiment ID: 20000234 Result: Down-regulated in Transcription
  misc_feature: MA Experiment 20000234 PARAMETER Experiment Name: At_Siliques_P Parameter: Age (day) Value: 21
  misc_feature: MA Experiment 20000234 PARAMETER Experiment Name: At_Siliques_P Parameter: Organism Value: A. thaliana
  misc_feature: MA Experiment 20000234 PARAMETER Experiment Name: At_Siliques_P Parameter: Plant Line Value: WS
  misc_feature: MA Experiment 20000234 PARAMETER Experiment Name: At_Siliques_P Parameter: Tissue Value: Less Than 5mm Siliques vs. Whole Plant
  misc_feature: MA Experiment ID: 20000235 Result: Down-regulated in Transcription
  misc_feature: MA Experiment 20000235 PARAMETER Experiment Name: At_Siliques_P Parameter: Age (day) Value: 21
  misc_feature: MA Experiment 20000235 PARAMETER Experiment Name: At_Siliques_P Parameter: Organism Value: A. thaliana
  misc_feature: MA Experiment 20000235 PARAMETER Experiment Name: At_Siliques_P Parameter: Plant Line Value: WS
  misc_feature: MA Experiment 20000235 PARAMETER Experiment Name: At_Siliques_P Parameter: Tissue Value: 5-10mm Siliques vs. Whole Plant
  misc_feature: MA Experiment ID: 20000265 Result: Down-regulated in Transcription
  misc_feature: MA Experiment 20000265 PARAMETER Experiment Name: At_Open_Flower_P Parameter: Age (day) Value: 21
  misc_feature: MA Experiment 20000265 PARAMETER Experiment Name: At_Open_Flower_P Parameter: Plant Line Value: WS
  misc_feature: MA Experiment 20000265 PARAMETER Experiment Name: At_Open_Flower_P Parameter: Tissue Value: Closed Flower vs. Whole Plant
  misc_feature: MA Experiment ID: 20000439 Result: Down-regulated in Transcription
  misc_feature: MA Experiment 20000439 PARAMETER Experiment Name: At_Roots__P Parameter: Age (day) Value: 14 vs. 21
  misc_feature: MA Experiment 20000439 PARAMETER Experiment Name: At_Roots__P Parameter: Organism Value: A. thaliana
  misc_feature: MA Experiment 20000439 PARAMETER Experiment Name: At_Roots__P Parameter: Tissue Value: Roots vs. Whole Plant
  misc_feature: MA Experiment ID: 20000445 Result: Up-regulated in Transcription
  misc_feature: MA Experiment 20000445 PARAMETER Experiment Name: At_100uM_NAA__P Parameter: Age (day) Value: 14
  misc_feature: MA Experiment 20000445 PARAMETER Experiment Name: At_100uM_NAA__P Parameter: Organism Value: A. thaliana
  misc_feature: MA Experiment 20000445 PARAMETER Experiment Name: At_100uM_NAA__P Parameter: Plant Line Value: WS
  misc_feature: MA Experiment 20000445 PARAMETER Experiment Name: At_100uM_NAA__P Parameter: Timepoint (hr) Value: 6
  misc_feature: MA Experiment 20000445 PARAMETER Experiment Name: At_100uM_NAA__P Parameter: Tissue Value: Aerial
  misc_feature: MA Experiment 20000445 PARAMETER Experiment Name: At_100uM_NAA__P Parameter: Treatment Value: 100uM NAA vs. No Treatment
  misc_feature: MA Experiment ID: 20000453 Result: Up-regulated in Transcription
  misc_feature: MA Experiment 20000453 PARAMETER Experiment Name: At_100uM_ABA_P Parameter: Age (day) Value: 15
  misc_feature: MA Experiment 20000453 PARAMETER Experiment Name: At_100uM_ABA_P Parameter: Organism Value: A. thaliana
  misc_feature: MA Experiment 20000453 PARAMETER Experiment Name: At_100uM_ABA_P Parameter: Plant Line Value: WS
  misc_feature: MA Experiment 20000453 PARAMETER Experiment Name: At_100uM_ABA_P Parameter: Timepoint (hr) Value: 24
  misc_feature: MA Experiment 20000453 PARAMETER Experiment Name: At_100uM_ABA_P Parameter: Tissue Value: Aerial
  misc_feature: MA Experiment 20000453 PARAMETER Experiment Name: At_100uM_ABA_P Parameter: Treatment Value: 100uM ABA vs. No Treatment
  misc_feature: MA Experiment ID: 20000455 Result: Up-regulated in Transcription
  misc_feature: MA Experiment 20000455 PARAMETER Experiment Name: At_100uM_ABA_P Parameter: Age (day) Value: 16
  misc_feature: MA Experiment 20000455 PARAMETER Experiment Name: At_100uM_ABA_P Parameter: Organism Value: A. thaliana
  misc_feature: MA Experiment 20000455 PARAMETER Experiment Name: At_100uM_ABA_P Parameter: Plant Line Value: WS
  misc_feature: MA Experiment 20000455 PARAMETER Experiment Name: At_100uM_ABA_P Parameter: Timepoint (hr) Value: 48
  misc_feature: MA Experiment 20000455 PARAMETER Experiment Name: At_100uM_ABA_P Parameter: Tissue Value: Aerial
  misc_feature: MA Experiment 20000455 PARAMETER Experiment Name: At_100uM_ABA_P Parameter: Treatment Value: 100uM ABA vs. No Treatment
  misc_feature: MA Experiment ID: 20000456 Result: Down-regulated in Transcription
  misc_feature: MA Experiment 20000456 PARAMETER Experiment Name: At_100uM_BA_P Parameter: Age (day) Value: 14
  misc_feature: MA Experiment 20000456 PARAMETER Experiment Name: At_100uM_BA_P Parameter: Organism Value: A. thaliana
  misc_feature: MA Experiment 20000456 PARAMETER Experiment Name: At_100uM_BA_P Parameter: Plant Line Value: WS
  misc_feature: MA Experiment 20000456 PARAMETER Experiment Name: At_100uM_BA_P Parameter: Timepoint (hr) Value: 6
  misc_feature: MA Experiment 20000456 PARAMETER Experiment Name: At_100uM_BA_P Parameter: Tissue Value: Aerial
  misc_feature: MA Experiment 20000456 PARAMETER Experiment Name: At_100uM_BA_P Parameter: Treatment Value: 100uM BA vs. No Treatment
  misc_feature: MA Experiment ID: 20000573 Result: Up-regulated in Transcription
  misc_feature: MA Experiment 20000573 PARAMETER Experiment Name: At_100uM_ABA_Mutants__P Parameter: Organism Value: A. thaliana
  misc_feature: MA Experiment 20000573 PARAMETER Experiment Name: At_100uM_ABA_Mutants__P Parameter: Plant Line Value: CS22 vs. Ler wt
  misc_feature: MA Experiment 20000573 PARAMETER Experiment Name: At_100uM_ABA_Mutants__P Parameter: Timepoint (hr) Value: N/A
  misc_feature: MA Experiment 20000573 PARAMETER Experiment Name: At_100uM_ABA_Mutants__P Parameter: Tissue Value: Whole Plant
  misc_feature: MA Experiment 20000573 PARAMETER Experiment Name: At_100uM_ABA_Mutants__P Parameter: Treatment Value: None
  misc_feature: MA Experiment ID: 20000574 Result: Up-regulated in Transcription
  misc_feature: MA Experiment 20000574 PARAMETER Experiment Name: At_100uM_ABA_Mutants__P Parameter: Organism Value: A. thaliana
  misc_feature: MA Experiment 20000574 PARAMETER Experiment Name: At_100uM_ABA_Mutants__P Parameter: Plant Line Value: CS23 vs. Ler wt
  misc_feature: MA Experiment 20000574 PARAMETER Experiment Name: At_100uM_ABA_Mutants__P Parameter: Timepoint (hr) Value: N/A
  misc_feature: MA Experiment 20000574 PARAMETER Experiment Name: At_100uM_ABA_Mutants__P Parameter: Tissue Value: Whole Plant
  misc_feature: MA Experiment 20000574 PARAMETER Experiment Name: At_100uM_ABA_Mutants__P Parameter: Treatment Value: None
  misc_feature: MA Experiment ID: 20000794 Result: Up-regulated in Transcription
  misc_feature: MA Experiment 20000794 PARAMETER Experiment Name: At_Petals_P Parameter: Age (day) Value: 23-25 days
  misc_feature: MA Experiment 20000794 PARAMETER Experiment Name: At_Petals_P Parameter: Plant Line Value: WS
  misc_feature: MA Experiment 20000794 PARAMETER Experiment Name: At_Petals_P Parameter: Tissue Value: Petals vs. Whole plant
  misc_feature: MA Experiment ID: 20001248 Result: Up-regulated in Transcription
  misc_feature: MA Experiment 20001248 PARAMETER Experiment Name: At_Far-red-induction_P Parameter: Age (day) Value: 7
  misc_feature: MA Experiment 20001248 PARAMETER Experiment Name: At_Far-red-induction_P Parameter: Light Value: Far-red vs. White
  misc_feature: MA Experiment 20001248 PARAMETER Experiment Name: At_Far-red-induction_P Parameter: Organism Value: A. thaliana
  misc_feature: MA Experiment 20001248 PARAMETER Experiment Name: At_Far-red-induction_P Parameter: Plant Line Value: Columbia
  misc_feature: MA Experiment 20001248 PARAMETER Experiment Name: At_Far-red-induction_P Parameter: Timepoint (hr) Value: 4
  misc_feature: MA Experiment 20001248 PARAMETER Experiment Name: At_Far-red-induction_P Parameter: Tissue Value: Whole Plant
  misc_feature: MA Experiment ID: 20001450 Result: Up-regulated in Transcription
  misc_feature: MA Experiment 20001450 PARAMETER Experiment Name: At_Far-red-induction_P Parameter: Age (day) Value: 7
  misc_feature: MA Experiment 20001450 PARAMETER Experiment Name: At_Far-red-induction_P Parameter: Light Value: Far-red vs. White
  misc_feature: MA Experiment 20001450 PARAMETER Experiment Name: At_Far-red-induction_P Parameter: Organism Value: A. thaliana
  misc_feature: MA Experiment 20001450 PARAMETER Experiment Name: At_Far-red-induction_P Parameter: Plant Line Value: Columbia
  misc_feature: MA Experiment 20001450 PARAMETER Experiment Name: At_Far-red-induction_P Parameter: Timepoint (hr) Value: 8
  misc_feature: MA Experiment 20001450 PARAMETER Experiment Name: At_Far-red-induction_P Parameter: Tissue Value: Whole Plant
  misc_feature: MA Experiment ID: 20001906 Result: Up-regulated in Transcription
  misc_feature: MA Experiment 20001906 PARAMETER Experiment Name: At_Drought_Reproduction_P Parameter: Age (day) Value: 35
  misc_feature: MA Experiment 20001906 PARAMETER Experiment Name: At_Drought_Reproduction_P Parameter: Organism Value: A. thaliana
  misc_feature: MA Experiment 20001906 PARAMETER Experiment Name: At_Drought_Reproduction_P Parameter: Plant Line Value: WS
  misc_feature: MA Experiment 20001906 PARAMETER Experiment Name: At_Drought_Reproduction_P Parameter: Timepoint (day) Value: 5
  misc_feature: MA Experiment 20001906 PARAMETER Experiment Name: At_Drought_Reproduction_P Parameter: Tissue Value: Siliques
  misc_feature: MA Experiment 20001906 PARAMETER Experiment Name: At_Drought_Reproduction_P Parameter: Treatment Value: Drought vs. No Drought
  misc_feature: MA Experiment ID: 20001908 Result: Up-regulated in Transcription
  misc_feature: MA Experiment 20001908 PARAMETER Experiment Name: At_Drought_Reproduction_P Parameter: Age (day) Value: 40
  misc_feature: MA Experiment 20001908 PARAMETER Experiment Name: At_Drought_Reproduction_P Parameter: Organism Value: A. thaliana
  misc_feature: MA Experiment 20001908 PARAMETER Experiment Name: At_Drought_Reproduction_P Parameter: Plant Line Value: WS
  misc_feature: MA Experiment 20001908 PARAMETER Experiment Name: At_Drought_Reproduction_P Parameter: Timepoint (day) Value: 10
  misc_feature: MA Experiment 20001908 PARAMETER Experiment Name: At_Drought_Reproduction_P Parameter: Tissue Value: Siliques
  misc_feature: MA Experiment 20001908 PARAMETER Experiment Name: At_Drought_Reproduction_P Parameter: Treatment Value: Drought vs. No Drought
  misc_feature: MA Experiment ID: 20001911 Result: Up-regulated in Transcription
  misc_feature: MA Experiment 20001911 PARAMETER Experiment Name: At_Drought_Reproduction_P Parameter: Age (day) Value: 40
  misc_feature: MA Experiment 20001911 PARAMETER Experiment Name: At_Drought_Reproduction_P Parameter: Organism Value: A. thaliana
  misc_feature: MA Experiment 20001911 PARAMETER Experiment Name: At_Drought_Reproduction_P Parameter: Plant Line Value: WS
  misc_feature: MA Experiment 20001911 PARAMETER Experiment Name: At_Drought_Reproduction_P Parameter: Timepoint (day) Value: 10
  misc_feature: MA Experiment 20001911 PARAMETER Experiment Name: At_Drought_Reproduction_P Parameter: Tissue Value: Flowers
  misc_feature: MA Experiment 20001911 PARAMETER Experiment Name: At_Drought_Reproduction_P Parameter: Treatment Value: Drought vs. No Drought
ccacgcgtccgcaaagagtaaccaaattgatatttatctcttctcaaccatggcgatgagacaagccgctaaggcaacgatcagggcctgttcttcctcttcttcttcgggttacttcgctcgacgtcagtttaatgcatcttctggtgatagcaaaaagattgtaggagttttctacaaggccaacgaatacgctaccaagaaccctaacttccttggctgcgtcgagaatgccttaggaatccgtgactggcttgaatcccaaggacatcagtacatcgtcactgatgacaaggaaggccctgattgcgaacttgagaaacatatcccggatcttcacgtcctaatctccactcccttccacccggcgtatgtaactgctgaaagaatcaagaaagccaaaaacttgaagcttctcctcacagctggtattggctcggatcatattgatctccaggcagctgcagctgctggcctgacggttgctgaagtcacgggaagcaacgtggtctcagtggcagaagatgagctcatgagaatcttaatcctcatgcgcaacttcgtaccagggtacaaccaggtcgtcaaaggcgagtggaacgtcgcgggcattgcgtacagagcttatgatcttgaagggaagacgataggaaccgtgggagctggaagaatcggaaagcttttgctgcagcggttgaaaccattcgggtgtaacttgttgtaccatgacaggcttcagatggcaccagagctggagaaagagactggagctaagttcgttgaggatctgaatgaaatgctccctaaatgtgacgttatagtcatcaacatgcctctcacggagaagacaagaggaatgttcaacaaagagttgatagggaaattgaagaaaggcgttttgatagtgaacaacgcaagaggagccatcatggagaggcaagcagtggtggatgcggtggagagtggacacattggagggtacagcggagacgtttgggacccacagccagctcctaaggaccatccatggcgttacatgcctaaccaggctatgacccctcatacctccggcaccaccattgacgctcagctacggtatgcggcggggacgaaagacatgttggagagatacttcaagggagaagacttccctactgagaattacatcgtcaaggacggtgaacttgctcctcagtaccggtaagcttttgaggaggtgacattgggaagatgatgagaaacgaccccaacgttcaagaaaacaaataaagaagtatttggactttgctaagtcgaatgacttgagtcatcttttggtttagtttttgttattatataagcacaataataataggagggcacttcccctgttctgagagtttgtgaacatattactcagtggtttaaatcacacatatgtatttgtttccccaatcgtaggaactcaatggtttcaaatctcattatataaacataaaaatgaataaaggcatattaaatttgtctaa

SEQ ID NO: 76127 - protein, 400 aa, Arabidopsis thaliana
  peptide (1)..(400): Ceres Seq. ID no. 7106245
  misc_feature (69)..(166): Pfam Name: D-isomer specific 2-hydroxyacid dehydrogenase, Pfam Description: D-isomer specific 2-hydroxyacid dehydrogenase,
  misc_feature (17)..(400): Homolog of NCBI NO: 15241492 NR Description: formate dehydrogenase (FDH); protein id: supported by cDNA: 7530., supported by cDNA: gi_14517547, by cDNA: gi_15810033, supported by cDNA: gi_19548046, supported
  misc_feature (17)..(400): Homolog of NCBI NO: 26454627 NR Description: Formate dehydrogenase, mitochondrial precursor dependent formate dehydrogenase) (FDH)
  misc_feature (19)..(400): Homolog of NCBI NO: 542089 NR Description: formate dehydrogenase (EC 1.2.1.2) precursor,
  misc_feature (42)..(400): Homolog of NCBI NO: 38636526 NR Description: formate dehydrogenase [Quercus robur]
  misc_feature (42)..(400): Homolog of NCBI NO: 21263612 NR Description: Formate dehydrogenase, mitochondrial precursor dependent formate dehydrogenase) (FDH)
  misc_feature (42)..(400): Homolog of NCBI NO: 21263611 NR Description: Formate dehydrogenase, mitochondrial precursor
  misc_feature (15)..(396): Homolog of NCBI NO: 4572458 NR Description: NAD-dependent formate dehydrogenase
  misc_feature (57)..(298): Homolog of NCBI NO: 40738675 NR Description: FDH_EMENI Probable formate dehydrogenase
  misc_feature (297)..(396): Homolog of NCBI NO: 40738675 NR Description: FDH_EMENI Probable formate dehydrogenase
  misc_feature (53)..(396): Homolog of NCBI NO: 32405002 NR Description: FORMATE DEHYDROGENASE (NAD-DEPENDENT FORMATE (FDH) [Neurospora crassa] >gi|729469|sp|Q07103|FDH_NEUCR Formate
HASAKSNQIDIYLFSTMAMRQAAKATIRACSSSSSSGYFARRQFNASSGDSKKIVGVFYKANEYATKNPNFLGCVENALGIRDWLESQGHQYIVTDDKEGPDCELEKHIPDLHVLISTPFHPAYVTAERIKKAKNLKLLLTAGIGSDHIDLQAAAAAGLTVAEVTGSNVVSVAEDELMRILILMRNFVPGYNQVVKGEWNVAGIAYRAYDLEGKTIGTVGAGRIGKLLLQRLKPFGCNLLYHDRLQMAPELEKETGAKFVEDLNEMLPKCDVIVINMPLTEKTRGMFNKELIGKLKKGVLIVNNARGAIMERQAVVDAVESGHIGGYSGDVWDPQPAPKDHPWRYMPNQAMTPHTSGTTIDAQLRYAAGTKDMLERYFKGEDFPTENYIVKDGELAPQYR

SEQ ID NO: 76128 - protein, 384 aa, Arabidopsis thaliana
  peptide (1)..(384): Ceres Seq. ID no. 7106246
  misc_feature (53)..(150): Pfam Name: D-isomer specific 2-hydroxyacid dehydrogenase, Pfam Description: D-isomer specific 2-hydroxyacid dehydrogenase,
  misc_feature (1)..(384): Homolog of NCBI NO: 15241492 NR Description: formate dehydrogenase (FDH); protein id: supported by cDNA: 7530., supported by cDNA: gi_14517547, by cDNA: gi_15810033, supported by cDNA: gi_19548046, supported
  misc_feature (1)..(384): Homolog of NCBI NO: 26454627 NR Description: Formate dehydrogenase, mitochondrial precursor dependent formate dehydrogenase) (FDH)
  misc_feature (3)..(384): Homolog of NCBI NO: 542089 NR Description: formate dehydrogenase (EC 1.2.1.2) precursor,
  misc_feature (26)..(384): Homolog of NCBI NO: 38636526 NR Description: formate dehydrogenase [Quercus robur]
  misc_feature (26)..(384): Homolog of NCBI NO: 21263612 NR Description: Formate dehydrogenase, mitochondrial precursor dependent formate dehydrogenase) (FDH)
  misc_feature (26)..(384): Homolog of NCBI NO: 21263611 NR Description: Formate dehydrogenase, mitochondrial precursor
  misc_feature (1)..(380): Homolog of NCBI NO: 4572458 NR Description: NAD-dependent formate dehydrogenase
  misc_feature (41)..(282): Homolog of NCBI NO: 40738675 NR Description: FDH_EMENI Probable formate dehydrogenase
  misc_feature (281)..(380): Homolog of NCBI NO: 40738675 NR Description: FDH_EMENI Probable formate dehydrogenase
  misc_feature (37)..(380): Homolog of NCBI NO: 32405002 NR Description: FORMATE DEHYDROGENASE (NAD-DEPENDENT FORMATE (FDH) [Neurospora crassa] >gi|729469|sp|Q07103|FDH_NEUCR Formate
MAMRQAAKATIRACSSSSSSGYFARRQFNASSGDSKKIVGVFYKANEYATKNPNFLGCVENALGIRDWLESQGHQYIVTDDKEGPDCELEKHIPDLHVLISTPFHPAYVTAERIKKAKNLKLLLTAGIGSDHIDLQAAAAAGLTVAEVTGSNVVSVAEDELMRILILMRNFVPGYNQVVKGEWNVAGIAYRAYDLEGKTIGTVGAGRIGKLLLQRLKPFGCNLLYHDRLQMAPELEKETGAKFVEDLNEMLPKCDVIVINMPLTEKTRGMFNKELIGKLKKGVLIVNNARGAIMERQAVVDAVESGHIGGYSGDVWDPQPAPKDHPWRYMPNQAMTPHTSGTTIDAQLRYAAGTKDMLERYFKGEDFPTENYIVKDGELAPQYR

SEQ ID NO: 76129 - protein, 382 aa, Arabidopsis thaliana
  peptide (1)..(382): Ceres Seq. ID no. 7106247
  misc_feature (51)..(148): Pfam Name: D-isomer specific 2-hydroxyacid dehydrogenase, Pfam Description: D-isomer specific 2-hydroxyacid dehydrogenase,
  misc_feature (1)..(382): Homolog of NCBI NO: 15241492 NR Description: formate dehydrogenase (FDH); protein id: supported by cDNA: 7530., supported by cDNA: gi_14517547, by cDNA: gi_15810033, supported by cDNA: gi_19548046, supported
  misc_feature (1)..(382): Homolog of NCBI NO: 26454627 NR Description: Formate dehydrogenase, mitochondrial precursor dependent formate dehydrogenase) (FDH)
  misc_feature (1)..(382): Homolog of NCBI NO: 542089 NR Description: formate dehydrogenase (EC 1.2.1.2) precursor,
  misc_feature (24)..(382): Homolog of NCBI NO: 38636526 NR Description: formate dehydrogenase [Quercus robur]
  misc_feature (24)..(382): Homolog of NCBI NO: 21263612 NR Description: Formate dehydrogenase, mitochondrial precursor dependent formate dehydrogenase) (FDH)
  misc_feature (24)..(382): Homolog of NCBI NO: 21263611 NR Description: Formate dehydrogenase, mitochondrial precursor
  misc_feature (1)..(378): Homolog of NCBI NO: 4572458 NR Description: NAD-dependent formate dehydrogenase
  misc_feature (39)..(280): Homolog of NCBI NO: 40738675 NR Description: FDH_EMENI Probable formate dehydrogenase
  misc_feature (279)..(378): Homolog of NCBI NO: 40738675 NR Description: FDH_EMENI Probable formate dehydrogenase
  misc_feature (35)..(378): Homolog of NCBI NO: 32405002 NR Description: FORMATE DEHYDROGENASE (NAD-DEPENDENT FORMATE (FDH) [Neurospora crassa] >gi|729469|sp|Q07103|FDH_NEUCR Formate
MRQAAKATIRACSSSSSSGYFARRQFNASSGDSKKIVGVFYKANEYATKNPNFLGCVENALGIRDWLESQGHQYIVTDDKEGPDCELEKHIPDLHVLISTPFHPAYVTAERIKKAKNLKLLLTAGIGSDHIDLQAAAAAGLTVAEVTGSNVVSVAEDELMRILILMRNFVPGYNQVVKGEWNVAGIAYRAYDLEGKTIGTVGAGRIGKLLLQRLKPFGCNLLYHDRLQMAPELEKETGAKFVEDLNEMLPKCDVIVINMPLTEKTRGMFNKELIGKLKKGVLIVNNARGAIMERQAVVDAVESGHIGGYSGDVWDPQPAPKDHPWRYMPNQAMTPHTSGTTIDAQLRYAAGTKDMLERYFKGEDFPTENYIVKDGELAPQYR

SEQ ID NO: 76130 - DNA, 1887 bp, Arabidopsis thaliana
  misc_feature (1)..(1887): Ceres Seq. ID no. 7106556
  misc_feature: MA Experiment ID: 108434 Result: Down-regulated in Transcription
  misc_feature: MA Experiment 108434 PARAMETER Experiment Name: At_Root_Tips_cDNA_P Parameter: Tissue Value: Root Tips
  misc_feature: MA Experiment ID: 108435 Result: Up-regulated in Transcription
  misc_feature: MA Experiment 108435 PARAMETER Experiment Name: At_stm_Mutants_cDNA_P Parameter: Plant Line Value: wt Landsburg vs stm
  misc_feature: MA Experiment 108435 PARAMETER Experiment Name: At_stm_Mutants_cDNA_P Parameter: Tissue Value: Shoot Apical Meristem Region
  misc_feature: MA Experiment ID: 108464 Result: Up-regulated in Transcription
  misc_feature: MA Experiment 108464 PARAMETER Experiment Name: At_Germinating_Seeds_cDNA_P Parameter: Age (day) Value: 4 vs. 0
  misc_feature: MA Experiment 108464 PARAMETER Experiment Name: At_Germinating_Seeds_cDNA_P Parameter: Tissue Value: Germinating Seeds
  misc_feature: MA Experiment ID: 108469 Result: Down-regulated in Transcription
  misc_feature: MA Experiment ID: 108488 Result: Up-regulated in Transcription
  misc_feature: MA Experiment ID: 108489 Result: Up-regulated in Transcription
  misc_feature: MA Experiment ID: 108501 Result: Up-regulated in Transcription
  misc_feature: MA Experiment 108501 PARAMETER Experiment Name: At_ap2_floral_buds_cDNA_P Parameter: Plant Line Value: ap2 (Ler.)
  misc_feature: MA Experiment 108501 PARAMETER Experiment Name: At_ap2_floral_buds_cDNA_P Parameter: Tissue Value: Closed Flower
  misc_feature: MA Experiment ID: 108569 Result: Up-regulated in Transcription
  misc_feature: MA Experiment 108569 PARAMETER Experiment Name: At_0.001%_MeJA__cDNA_P Parameter: Timepoint (hr) Value: 6
  misc_feature: MA Experiment 108569 PARAMETER Experiment Name: At_0.001%_MeJA__cDNA_P Parameter: Tissue Value: Aerial
  misc_feature: MA Experiment 108569 PARAMETER Experiment Name: At_0.001%_MeJA__cDNA_P Parameter: Treatment Value: 0.001% MeJA vs. No Treatment
  misc_feature: MA Experiment ID: 20000068 Result: Up-regulated in Transcription
  misc_feature: MA Experiment ID: 20000069 Result: Up-regulated in Transcription
  misc_feature: MA Experiment 20000069 PARAMETER Experiment Name: At_100uM_ABA_Mutants_cDNA_P Parameter: Plant Line Value: CS23
  misc_feature: MA Experiment 20000069 PARAMETER Experiment Name: At_100uM_ABA_Mutants_cDNA_P Parameter: Timepoint (hr) Value: 6
  misc_feature: MA Experiment 20000069 PARAMETER Experiment Name: At_100uM_ABA_Mutants_cDNA_P Parameter: Tissue Value: Aerial
  misc_feature: MA Experiment 20000069 PARAMETER Experiment Name: At_100uM_ABA_Mutants_cDNA_P Parameter: Treatment Value: 100uM ABA vs. No Treatment
  misc_feature: MA Experiment ID: 20000070 Result: Up-regulated in Transcription
  misc_feature: MA Experiment 20000070 PARAMETER Experiment Name: At_100uM_ABA_Mutants_cDNA_P Parameter: Plant Line Value: CS24
  misc_feature: MA Experiment 20000070 PARAMETER Experiment Name: At_100uM_ABA_Mutants_cDNA_P Parameter: Timepoint (hr) Value: 6
  misc_feature: MA Experiment 20000070 PARAMETER Experiment Name: At_100uM_ABA_Mutants_cDNA_P Parameter: Tissue Value: Aerial
  misc_feature: MA Experiment 20000070 PARAMETER Experiment Name: At_100uM_ABA_Mutants_cDNA_P Parameter: Treatment Value: 100uM ABA vs. No Treatment
  misc_feature: MA Experiment ID: 20000071 Result: Up-regulated in Transcription
  misc_feature: MA Experiment 20000071 PARAMETER Experiment Name: At_100uM_ABA_Mutants_cDNA_P Parameter: Plant Line Value: CS8104
  misc_feature: MA Experiment 20000071 PARAMETER Experiment Name: At_100uM_ABA_Mutants_cDNA_P Parameter: Timepoint (hr) Value: 6
  misc_feature: MA Experiment 20000071 PARAMETER Experiment Name: At_100uM_ABA_Mutants_cDNA_P Parameter: Tissue Value: Aerial
  misc_feature: MA Experiment 20000071 PARAMETER Experiment Name: At_100uM_ABA_Mutants_cDNA_P Parameter: Treatment Value: 100uM ABA vs. No Treatment
  misc_feature: MA Experiment ID: 20000086 Result: Up-regulated in Transcription
  misc_feature: MA Experiment 20000086 PARAMETER Experiment Name: At_100uM_ABA_Mutants_cDNA_P Parameter: Plant Line Value: CS22
  misc_feature: MA Experiment 20000086 PARAMETER Experiment Name: At_100uM_ABA_Mutants_cDNA_P Parameter: Timepoint (hr) Value: 6
  misc_feature: MA Experiment 20000086 PARAMETER Experiment Name: At_100uM_ABA_Mutants_cDNA_P Parameter: Tissue Value: Aerial
  misc_feature: MA Experiment 20000086 PARAMETER Experiment Name: At_100uM_ABA_Mutants_cDNA_P Parameter: Treatment Value: 100uM ABA vs. No Treatment
  misc_feature: MA Experiment ID: 20000088 Result: Up-regulated in Transcription
  misc_feature: MA Experiment 20000088 PARAMETER Experiment Name: At_100uM_ABA_Mutants_cDNA_P Parameter: Plant Line Value: Landsberg
  misc_feature: MA Experiment 20000088 PARAMETER Experiment Name: At_100uM_ABA_Mutants_cDNA_P Parameter: Timepoint (hr) Value: 6
  misc_feature: MA Experiment 20000088 PARAMETER Experiment Name: At_100uM_ABA_Mutants_cDNA_P Parameter: Tissue Value: Aerial
  misc_feature: MA Experiment 20000088 PARAMETER Experiment Name: At_100uM_ABA_Mutants_cDNA_P Parameter: Treatment Value: 100uM ABA vs. No Treatment
  misc_feature: MA Experiment ID: 20000113 Result: Down-regulated in Transcription
  misc_feature: MA Experiment 20000113 PARAMETER Experiment Name: At_42deg_Heat_cDNA_P Parameter: Temperature (deg C) Value: 42 vs. 22
  misc_feature: MA Experiment 20000113 PARAMETER Experiment Name: At_42deg_Heat_cDNA_P Parameter: Timepoint (hr) Value: 8
  misc_feature: MA Experiment 20000113 PARAMETER Experiment Name: At_42deg_Heat_cDNA_P Parameter: Tissue Value: Aerial
  misc_feature: MA Experiment ID: 20000184 Result: Down-regulated in Transcription
  misc_feature: MA Experiment 20000184 PARAMETER Experiment Name: At_Shoots__P Parameter: Age (day) Value: 7
  misc_feature: MA Experiment 20000184 PARAMETER Experiment Name: At_Shoots__P Parameter: Tissue Value: Shoots vs. Whole Plant
  misc_feature: MA Experiment ID: 20000185 Result: Down-regulated in Transcription
  misc_feature: MA Experiment 20000185 PARAMETER Experiment Name: At_Roots__P Parameter: Age (day) Value: 7 vs. 21
  misc_feature: MA Experiment 20000185 PARAMETER Experiment Name: At_Roots__P Parameter: Organism Value: A. thaliana
  misc_feature: MA Experiment 20000185 PARAMETER Experiment Name: At_Roots__P Parameter: Tissue Value: Roots vs. Whole Plant
  misc_feature: MA Experiment ID: 20000211 Result: Up-regulated in Transcription
  misc_feature: MA Experiment 20000211 PARAMETER Experiment Name: At_0.001percent_MeJA__P Parameter: Age (day) Value: 14
  misc_feature: MA Experiment 20000211 PARAMETER Experiment Name: At_0.001percent_MeJA__P Parameter: Organism Value: A. thaliana
  misc_feature: MA Experiment 20000211 PARAMETER Experiment Name: At_0.001percent_MeJA__P Parameter: Plant Line Value: WS
  misc_feature: MA Experiment 20000211 PARAMETER Experiment Name: At_0.001percent_MeJA__P Parameter: Timepoint (hr) Value: 1
  misc_feature: MA Experiment 20000211 PARAMETER Experiment Name: At_0.001percent_MeJA__P Parameter: Tissue Value: Aerial
  misc_feature: MA Experiment 20000211 PARAMETER Experiment Name: At_0.001percent_MeJA__P Parameter: Treatment Value: 0.001percent MeJA vs. No Treatment
  misc_feature: MA Experiment ID: 20000224 Result: Up-regulated in Transcription
  misc_feature: MA Experiment ID: 20000234 Result: Up-regulated in Transcription
  misc_feature: MA Experiment 20000234 PARAMETER Experiment Name: At_Siliques_P Parameter: Age (day) Value: 21
  misc_feature: MA Experiment 20000234 PARAMETER Experiment Name: At_Siliques_P Parameter: Organism Value: A. thaliana
  misc_feature: MA Experiment 20000234 PARAMETER Experiment Name: At_Siliques_P Parameter: Plant Line Value: WS
  misc_feature: MA Experiment 20000234 PARAMETER Experiment Name: At_Siliques_P Parameter: Tissue Value: Less Than 5mm Siliques vs. Whole Plant
  misc_feature: MA Experiment ID: 20000264 Result: Up-regulated in Transcription
  misc_feature: MA Experiment 20000264 PARAMETER Experiment Name: At_Open_Flower_P Parameter: Age (day) Value: 21
  misc_feature: MA Experiment 20000264 PARAMETER Experiment Name: At_Open_Flower_P Parameter: Plant Line Value: WS
  misc_feature: MA Experiment 20000264 PARAMETER Experiment Name: At_Open_Flower_P Parameter: Tissue Value: Open Flower vs. Whole Plant
  misc_feature: MA Experiment ID: 20000265 Result: Up-regulated in Transcription
  misc_feature: MA Experiment 20000265 PARAMETER Experiment Name: At_Open_Flower_P Parameter: Age (day) Value: 21
  misc_feature: MA Experiment 20000265 PARAMETER Experiment Name: At_Open_Flower_P Parameter: Plant Line Value: WS
  misc_feature: MA Experiment 20000265 PARAMETER Experiment Name: At_Open_Flower_P Parameter: Tissue Value: Closed Flower vs. Whole Plant
  misc_feature: MA Experiment ID: 20000286 Result: Up-regulated in Transcription
  misc_feature: MA Experiment 20000286 PARAMETER Experiment Name: At_Open_Flower_P Parameter: Age (day) Value: 21
  misc_feature: MA Experiment 20000286 PARAMETER Experiment Name: At_Open_Flower_P Parameter: Plant Line Value: WS
  misc_feature: MA Experiment 20000286 PARAMETER Experiment Name: At_Open_Flower_P Parameter: Tissue Value: Half Open vs. Whole Plant
  misc_feature: MA Experiment ID: 20000308 Result: Up-regulated in Transcription
  misc_feature: MA Experiment 20000308 PARAMETER Experiment Name: At_100mM_NaCl__P Parameter: Age (day) Value: 17
  misc_feature: MA Experiment 20000308 PARAMETER Experiment Name: At_100mM_NaCl__P Parameter: Organism Value: A. thaliana
  misc_feature: MA Experiment 20000308 PARAMETER Experiment Name: At_100mM_NaCl__P Parameter: Plant Line Value: WS
  misc_feature: MA Experiment 20000308 PARAMETER Experiment Name: At_100mM_NaCl__P Parameter: Timepoint (hr) Value: 72
  misc_feature: MA Experiment 20000308 PARAMETER Experiment Name: At_100mM_NaCl__P Parameter: Tissue Value: Whole Plant
  misc_feature: MA Experiment 20000308 PARAMETER Experiment Name: At_100mM_NaCl__P Parameter: Treatment Value: 100mM NaCl vs. No Treatment
  misc_feature: MA Experiment ID: 20000439 Result: Down-regulated in Transcription
  misc_feature: MA Experiment 20000439 PARAMETER Experiment Name: At_Roots__P Parameter: Age (day) Value: 14 vs. 21
  misc_feature: MA Experiment 20000439 PARAMETER Experiment Name: At_Roots__P Parameter: Organism Value: A. thaliana
  misc_feature: MA Experiment 20000439 PARAMETER Experiment Name: At_Roots__P Parameter: Tissue Value: Roots vs. Whole Plant
  misc_feature: MA Experiment ID: 20000455 Result: Up-regulated in Transcription
  misc_feature: MA Experiment 20000455 PARAMETER Experiment Name: At_100uM_ABA_P Parameter: Age (day) Value: 16
  misc_feature: MA Experiment 20000455 PARAMETER Experiment Name: At_100uM_ABA_P Parameter: Organism Value: A. thaliana
  misc_feature: MA Experiment 20000455 PARAMETER Experiment Name: At_100uM_ABA_P Parameter: Plant Line Value: WS
  misc_feature: MA Experiment 20000455 PARAMETER Experiment Name: At_100uM_ABA_P Parameter: Timepoint (hr) Value: 48
  misc_feature: MA Experiment 20000455 PARAMETER Experiment Name: At_100uM_ABA_P Parameter: Tissue Value: Aerial
  misc_feature: MA Experiment 20000455 PARAMETER Experiment Name: At_100uM_ABA_P Parameter: Treatment Value: 100uM ABA vs. No Treatment
  misc_feature: MA Experiment ID: 20000495 Result: Up-regulated in Transcription
  misc_feature: MA Experiment 20000495 PARAMETER Experiment Name: At_Guard_Cells_P Parameter: Harvest Date Value: 8/2/2002
  misc_feature: MA Experiment 20000495 PARAMETER Experiment Name: At_Guard_Cells_P Parameter: Organism Value: A. thaliana
  misc_feature: MA Experiment 20000495 PARAMETER Experiment Name: At_Guard_Cells_P Parameter: Tissue Value: Guard Cells vs. Leaves
  misc_feature: MA Experiment ID: 20000794 Result: Down-regulated in Transcription
  misc_feature: MA Experiment 20000794 PARAMETER Experiment Name: At_Petals_P Parameter: Age (day) Value: 23-25 days
  misc_feature: MA Experiment 20000794 PARAMETER Experiment Name: At_Petals_P Parameter: Plant Line Value: WS
  misc_feature: MA Experiment 20000794 PARAMETER Experiment Name: At_Petals_P Parameter: Tissue Value: Petals vs. Whole plant
  misc_feature: MA Experiment ID: 20001248 Result: Down-regulated in Transcription
  misc_feature: MA Experiment 20001248 PARAMETER Experiment Name: At_Far-red-induction_P Parameter: Age (day) Value: 7
  misc_feature: MA Experiment 20001248 PARAMETER Experiment Name: At_Far-red-induction_P Parameter: Light Value: Far-red vs. White
  misc_feature: MA Experiment 20001248 PARAMETER Experiment Name: At_Far-red-induction_P Parameter: Organism Value: A. thaliana
  misc_feature: MA Experiment 20001248 PARAMETER Experiment Name: At_Far-red-induction_P Parameter: Plant Line Value: Columbia
  misc_feature: MA Experiment 20001248 PARAMETER Experiment Name: At_Far-red-induction_P Parameter: Timepoint (hr) Value: 4
  misc_feature: MA Experiment 20001248 PARAMETER Experiment Name: At_Far-red-induction_P Parameter: Tissue Value: Whole Plant
  misc_feature: MA Experiment ID: 20001450 Result: Down-regulated in Transcription
  misc_feature: MA Experiment 20001450 PARAMETER Experiment Name: At_Far-red-induction_P Parameter: Age (day) Value: 7
  misc_feature: MA Experiment 20001450 PARAMETER Experiment Name: At_Far-red-induction_P Parameter: Light Value: Far-red vs. White
  misc_feature: MA Experiment 20001450 PARAMETER Experiment Name: At_Far-red-induction_P Parameter: Organism Value: A. thaliana
  misc_feature: MA Experiment 20001450 PARAMETER Experiment Name: At_Far-red-induction_P Parameter: Plant Line Value: Columbia
  misc_feature: MA Experiment 20001450 PARAMETER Experiment Name: At_Far-red-induction_P Parameter: Timepoint (hr) Value: 8
  misc_feature: MA Experiment 20001450 PARAMETER Experiment Name: At_Far-red-induction_P Parameter: Tissue Value: Whole Plant
  misc_feature: MA Experiment ID: 20001451 Result: Down-regulated in Transcription
  misc_feature: MA Experiment 20001451 PARAMETER Experiment Name: At_Far-red-induction_P Parameter: Age (day) Value: 7
  misc_feature: MA Experiment 20001451 PARAMETER Experiment Name: At_Far-red-induction_P Parameter: Light Value: Far-red vs. White
  misc_feature: MA Experiment 20001451 PARAMETER Experiment Name: At_Far-red-induction_P Parameter: Organism Value: A. thaliana
  misc_feature: MA Experiment 20001451 PARAMETER Experiment Name: At_Far-red-induction_P Parameter: Plant Line Value: Columbia
  misc_feature: MA Experiment 20001451 PARAMETER Experiment Name: At_Far-red-induction_P Parameter: Timepoint (hr) Value: 24
  misc_feature: MA Experiment 20001451 PARAMETER Experiment Name: At_Far-red-induction_P Parameter: Tissue Value: Whole Plant
  misc_feature: MA Experiment ID: 20001555 Result: Up-regulated in Transcription
  misc_feature: MA Experiment 20001555 PARAMETER Experiment Name: At_Drought_Soil_Dry_P Parameter: Age (day) Value: 24
  misc_feature: MA Experiment 20001555 PARAMETER Experiment Name: At_Drought_Soil_Dry_P Parameter: Organism Value: A. thaliana
  misc_feature: MA Experiment 20001555 PARAMETER Experiment Name: At_Drought_Soil_Dry_P Parameter: Plant Line Value: WS
  misc_feature: MA Experiment 20001555 PARAMETER Experiment Name: At_Drought_Soil_Dry_P Parameter: Post Timepoint (hr) Value: None
  misc_feature: MA Experiment 20001555 PARAMETER Experiment Name: At_Drought_Soil_Dry_P Parameter: Post-Treatment Value: None
  misc_feature: MA Experiment 20001555 PARAMETER Experiment Name: At_Drought_Soil_Dry_P Parameter: Timepoint (day) Value: 10
  misc_feature: MA Experiment 20001555 PARAMETER Experiment Name: At_Drought_Soil_Dry_P Parameter: Treatment Value: Drought vs. No Drought
  misc_feature: MA Experiment ID: 20001556 Result: Up-regulated in Transcription
  misc_feature: MA Experiment 20001556 PARAMETER Experiment Name: At_Drought_Soil_Dry_P Parameter: Age (day) Value: 26
  misc_feature: MA Experiment 20001556 PARAMETER Experiment Name: At_Drought_Soil_Dry_P Parameter: Organism Value: A. thaliana
  misc_feature: MA Experiment 20001556 PARAMETER Experiment Name: At_Drought_Soil_Dry_P Parameter: Plant Line Value: WS
  misc_feature: MA Experiment 20001556 PARAMETER Experiment Name: At_Drought_Soil_Dry_P Parameter: Post Timepoint (hr) Value: None
  misc_feature: MA Experiment 20001556 PARAMETER Experiment Name: At_Drought_Soil_Dry_P Parameter: Post-Treatment Value: None
  misc_feature: MA Experiment 20001556 PARAMETER Experiment Name: At_Drought_Soil_Dry_P Parameter: Timepoint (day) Value: 12
  misc_feature: MA Experiment 20001556 PARAMETER Experiment Name: At_Drought_Soil_Dry_P Parameter: Treatment Value: Drought vs. No Drought
  misc_feature: MA Experiment ID: 20001558 Result: Down-regulated in Transcription
  misc_feature: MA Experiment 20001558 PARAMETER Experiment Name: At_Drought_Soil_Dry_P Parameter: Age (day) Value: 27
  misc_feature: MA Experiment 20001558 PARAMETER Experiment Name: At_Drought_Soil_Dry_P Parameter: Organism Value: A. thaliana
  misc_feature: MA Experiment 20001558 PARAMETER Experiment Name: At_Drought_Soil_Dry_P Parameter: Plant Line Value: WS
  misc_feature: MA Experiment 20001558 PARAMETER Experiment Name: At_Drought_Soil_Dry_P Parameter: Post Timepoint (hr) Value: 6
  misc_feature: MA Experiment 20001558 PARAMETER Experiment Name: At_Drought_Soil_Dry_P Parameter: Post-Treatment Value: Re-Water vs. No Drought
  misc_feature: MA Experiment 20001558 PARAMETER Experiment Name: At_Drought_Soil_Dry_P Parameter: Timepoint (day) Value: 13
  misc_feature: MA Experiment 20001558 PARAMETER Experiment Name: At_Drought_Soil_Dry_P Parameter: Treatment Value: Drought vs. No Drought
  misc_feature: MA Experiment ID: 20001559 Result: Up-regulated in Transcription
  misc_feature: MA Experiment 20001559 PARAMETER Experiment Name: At_Drought_Soil_Dry_P Parameter: Age (day) Value: 28
  misc_feature: MA Experiment 20001559 PARAMETER Experiment Name: At_Drought_Soil_Dry_P Parameter: Organism Value: A. thaliana
  misc_feature: MA Experiment 20001559 PARAMETER Experiment Name: At_Drought_Soil_Dry_P Parameter: Plant Line Value: WS
  misc_feature: MA Experiment 20001559 PARAMETER Experiment Name: At_Drought_Soil_Dry_P Parameter: Post Timepoint (hr) Value: 29
  misc_feature: MA Experiment 20001559 PARAMETER Experiment Name: At_Drought_Soil_Dry_P Parameter: Post-Treatment Value: Re-Water vs. No Drought
  misc_feature: MA Experiment 20001559 PARAMETER Experiment Name: At_Drought_Soil_Dry_P Parameter: Timepoint (day) Value: 14
  misc_feature: MA Experiment 20001559 PARAMETER Experiment Name: At_Drought_Soil_Dry_P Parameter: Treatment Value: Drought vs. No Drought
  misc_feature: MA Experiment ID: 20001761 Result: Up-regulated in Transcription
  misc_feature: MA Experiment 20001761 PARAMETER Experiment Name: At_50mM_NH4NO3_L-to-H_P Parameter: Timepoint (hr) Value: 4
  misc_feature: MA Experiment 20001761 PARAMETER Experiment Name: At_50mM_NH4NO3_L-to-H_P Parameter: Tissue Value: Siliques
  misc_feature: MA Experiment 20001761 PARAMETER Experiment Name: At_50mM_NH4NO3_L-to-H_P Parameter: Treatment Value: 50mM NH4NO3 vs 100mM Mannitol
  misc_feature: MA Experiment ID: 20001774 Result: Up-regulated in Transcription
  misc_feature: MA Experiment 20001774 PARAMETER Experiment Name: At_Far-red-enriched-adult_P Parameter: Age (day) Value: 31
  misc_feature: MA Experiment 20001774 PARAMETER Experiment Name: At_Far-red-enriched-adult_P Parameter: Light Value: Far-red enriched vs. White
  misc_feature: MA Experiment 20001774 PARAMETER Experiment Name: At_Far-red-enriched-adult_P Parameter: Organism Value: A. thaliana
  misc_feature: MA Experiment 20001774 PARAMETER Experiment Name: At_Far-red-enriched-adult_P Parameter: Plant Line Value: Columbia
  misc_feature: MA Experiment 20001774 PARAMETER Experiment Name: At_Far-red-enriched-adult_P Parameter: Timepoint (hr) Value: 72
  misc_feature: MA Experiment 20001774 PARAMETER Experiment Name: At_Far-red-enriched-adult_P Parameter: Tissue Value: Aerial
  misc_feature: MA Experiment ID: 20001904 Result: Up-regulated in Transcription
  misc_feature: MA Experiment 20001904 PARAMETER Experiment Name: At_Drought_Reproduction_P Parameter: Age (day) Value: 37
  misc_feature: MA Experiment 20001904 PARAMETER Experiment Name: At_Drought_Reproduction_P Parameter: Organism Value: A. thaliana
  misc_feature: MA Experiment 20001904 PARAMETER Experiment Name: At_Drought_Reproduction_P Parameter: Plant Line Value: WS
  misc_feature: MA Experiment 20001904 PARAMETER Experiment Name: At_Drought_Reproduction_P Parameter: Timepoint (day) Value: 7
  misc_feature: MA Experiment 20001904 PARAMETER Experiment Name: At_Drought_Reproduction_P Parameter: Tissue Value: Rosettes
  misc_feature: MA Experiment 20001904 PARAMETER Experiment Name: At_Drought_Reproduction_P Parameter: Treatment Value: Drought vs. No Drought
  misc_feature: MA Experiment ID: 20001906 Result: Down-regulated in Transcription
  misc_feature: MA Experiment 20001906 PARAMETER Experiment Name: At_Drought_Reproduction_P Parameter: Age (day) Value: 35
  misc_feature: MA Experiment 20001906 PARAMETER Experiment Name: At_Drought_Reproduction_P Parameter: Organism Value: A. thaliana
  misc_feature: MA Experiment 20001906 PARAMETER Experiment Name: At_Drought_Reproduction_P Parameter: Plant Line Value: WS
  misc_feature: MA Experiment 20001906 PARAMETER Experiment Name: At_Drought_Reproduction_P Parameter: Timepoint (day) Value: 5
  misc_feature: MA Experiment 20001906 PARAMETER Experiment Name: At_Drought_Reproduction_P Parameter: Tissue Value: Siliques
  misc_feature: MA Experiment 20001906 PARAMETER Experiment Name: At_Drought_Reproduction_P Parameter: Treatment Value: Drought vs. No Drought
  misc_feature: MA Experiment ID: 20001908 Result: Down-regulated in Transcription
  misc_feature: MA Experiment 20001908 PARAMETER Experiment Name: At_Drought_Reproduction_P Parameter: Age (day) Value: 40
  misc_feature: MA Experiment 20001908 PARAMETER Experiment Name: At_Drought_Reproduction_P Parameter: Organism Value: A. thaliana
  misc_feature: MA Experiment 20001908 PARAMETER Experiment Name: At_Drought_Reproduction_P Parameter: Plant Line Value: WS
  misc_feature: MA Experiment 20001908 PARAMETER Experiment Name: At_Drought_Reproduction_P Parameter: Timepoint (day) Value: 10
  misc_feature: MA Experiment 20001908 PARAMETER Experiment Name: At_Drought_Reproduction_P Parameter: Tissue Value: Siliques
  misc_feature: MA Experiment 20001908 PARAMETER Experiment Name: At_Drought_Reproduction_P Parameter: Treatment Value: Drought vs. No Drought
  misc_feature: Pfam Name: Glyco_hydro_1 Pfam Description: Glycosyl hydrolase family 1
gagctctccttcatttcatcctcaacaaattcctacaccaatatctttagctagagagaaaaaaagagtgaggaaactagagagagagaccacccaataatggtgaggttcgagaaggttcatttagtgttagggttagctctggttctaactctggtcggagctccgaccaaagcccaaggacctgtttgcggtgcaggcctgcctgacaaatttagcagattaaacttccctgaaggcttcatttggggaaccgcaacagcagcatttcaggttgaaggagctgttaatgaaggttgcagaggtccaagcatgtgggatactttcactaagaagttcccacatagatgtgaaaatcataacgctgatgttgctgtggatttctatcatcgttacaaggaagatatccagttgatgaaagaccttaacactgatgcttttagactttctattgcgtggcccagaatattcccccatggaaggatgtctaagggaataagcaaagtaggagtccaattctaccacgacctcatcgatgagcttctcaaaaacaatataataccattagttacagtctttcattgggatactccccaagacttggaagatgaatatggtggtttcttaagtggtcgcatcgtgcaagattttaccgaatatgcgaatttcactttccacgaatatggacacaaagtgaaacattggatcacattcaatgagccatgggtgtttagtcgtgccggttacgacaacggaaagaaagctccgggacgttgttcaccgtacatccccggttatggacagcattgtcaagatgggcggtctggatacgaagcttatcaagtcagtcacaacttactcttgtcgcatgcttacgccgttgacgcattcagaaaatgcaaacagtgtgctggaggtaaaataggaattgcacacagtccagcttggttcgaaccacaagaccttgagcatgttggaggttccattgaacgtgtgcttgatttcatcctaggatggcatttggctccaacaacttatggagattatccacaatcgatgaaggatcgtgtcggtcatagattgccaaaattcacagaagctgagaagaagttgctgaagggttctacagattacgtaggaatgaattactatacttcagtgtttgcaaaagaaattagccctgatcctaagaatcctagttggactactgattctcttgttgattgggatagcaagagtgtggatggatacaaaattggtagcaagccgtttaatggtaaactggatgtgtattcaaaaggtttgagataccttttgaagtatattaaggataactatggcgacccagaagttatcattgccgagaatggatacggtgaagaccttggagagaagcacaatgacgtaaactttgggacacaagatcacaacaggaaatattatatccaaaggcatctcttgagtatgcacgacgccatttgcaaggacaaagtgaacgttacgggatactttgtgtggtcgttgatggacaactttgagtggcaagatgggtacaaagcgaggttcgggctttactacatcgatttccagaacaacttgacccgtcaccaaaaggtttcgggcaaatggtattccgaattcctcaaaccacaatttccaacctccaagctgagggaagaactctaggtgatcaagaatccaaatcttgaatcctatatatcgggacaaaataattgagtagcaagagtcttgaagatgttcttgaggatattatcagtttgtgtcattgtgtattctaatgatcgttttcatctaccggtccttcctatgttagaaggacttgtgagttgttcgagttttaataatatcaataaatgtcttcttttt

SEQ ID NO: 76131 - protein, 528 aa, Arabidopsis thaliana
  peptide (1)..(528): Ceres Seq. ID no. 7106557
  misc_feature: Pfam Name: Glyco_hydro_1 Pfam Description: Glycosyl hydrolase family 1
  misc_feature (1)..(528): Homolog of NCBI NO: 12043529 NR Description: beta-glucosidase 1 [Arabidopsis thaliana]
  misc_feature (1)..(528): Homolog of NCBI NO: 15218992 NR Description: glycosyl hydrolase family 1, beta-glucosidase protein id: At1g52400.1, supported by cDNA: gi_14532461,
  misc_feature (1)..(528): Homolog of NCBI NO: 12229686 NR Description: Beta-glucosidase homolog precursor
  misc_feature (1)..(528): Homolog of NCBI NO: 23397037 NR Description: putative beta-glucosidase [Arabidopsis thaliana]
  misc_feature (10)..(528): Homolog of NCBI NO: 22331243 NR Description: glycosyl hydrolase family 1; protein id: supported by cDNA: gi_16604492, supported by cDNA: gi_17381179,
  misc_feature (10)..(528): Homolog of NCBI NO: 16604493 NR Description: AT3g21370/MHC9_5 [Arabidopsis thaliana]
  misc_feature (1)..(515): Homolog of NCBI NO: 25404995 NR Description: protein T4O12.15 [imported] - Arabidopsis >gi|8778810|gb|AAF26759.2|AC007396_8 T4O12.15 [Arabidopsis
  misc_feature (1)..(515): Homolog of NCBI NO: 15222905 NR Description: glycosyl hydrolase family 1, protein id: At1g75940.1, supported by cDNA: gi_2746340
  misc_feature (10)..(507): Homolog of NCBI NO: 1076442 NR Description: beta-glucosidase (EC 3.2.1.21) - rape
  misc_feature (1)..(515): Homolog of NCBI NO: 25289457 NR Description: probable beta-glucosidase (EC 3.2.1.21) ATA27 - Arabidopsis thaliana >gi|2746341|gb|AAC39504.1| ATA27
MVRFEKVHLVLGLALVLTLVGAPTKAQGPVCGAGLPDKFSRLNFPEGFIWGTATAAFQVEGAVNEGCRGPSMWDTFTKKFPHRCENHNADVAVDFYHRYKEDIQLMKDLNTDAFRLSIAWPRIFPHGRMSKGISKVGVQFYHDLIDELLKNNIIPLVTVFHWDTPQDLEDEYGGFLSGRIVQDFTEYANFTFHEYGHKVKHWITFNEPWVFSRAGYDNGKKAPGRCSPYIPGYGQHCQDGRSGYEAYQVSHNLLLSHAYAVDAFRKCKQCAGGKIGIAHSPAWFEPQDLEHVGGSIERVLDFILGWHLAPTTYGDYPQSMKDRVGHRLPKFTEAEKKLLKGSTDYVGMNYYTSVFAKEISPDPKNPSWTTDSLVDWDSKSVDGYKIGSKPFNGKLDVYSKGLRYLLKYIKDNYGDPEVIIAENGYGEDLGEKHNDVNFGTQDHNRKYYIQRHLLSMHDAICKDKVNVTGYFVWSLMDNFEWQDGYKARFGLYYIDFQNNLTRHQKVSGKWYSEFLKPQFPTSKLREEL

SEQ ID NO: 76132 - protein, 457 aa, Arabidopsis thaliana
  peptide (1)..(457): Ceres Seq. ID no. 7106558
  misc_feature: Pfam Name: Glyco_hydro_1 Pfam Description: Glycosyl hydrolase family 1
  misc_feature (1)..(457): Homolog of NCBI NO: 12043529 NR Description: beta-glucosidase 1 [Arabidopsis thaliana]
  misc_feature (1)..(457): Homolog of NCBI NO: 15218992 NR Description: glycosyl hydrolase family 1, beta-glucosidase protein id: At1g52400.1, supported by cDNA: gi_14532461,
  misc_feature (1)..(457): Homolog of NCBI NO: 12229686 NR Description: Beta-glucosidase homolog precursor
  misc_feature (1)..(457): Homolog of NCBI NO: 23397037 NR Description: putative beta-glucosidase [Arabidopsis thaliana]
  misc_feature (1)..(457): Homolog of NCBI NO: 22331243 NR Description: glycosyl hydrolase family 1; protein id: supported by cDNA: gi_16604492, supported by cDNA: gi_17381179,
  misc_feature (1)..(457): Homolog of NCBI NO: 16604493 NR Description: AT3g21370/MHC9_5 [Arabidopsis thaliana]
  misc_feature (1)..(444): Homolog of NCBI NO: 25404995 NR Description: protein T4O12.15 [imported] - Arabidopsis >gi|8778810|gb|AAF26759.2|AC007396_8 T4O12.15 [Arabidopsis
  misc_feature (1)..(444): Homolog of NCBI NO: 15222905 NR Description: glycosyl hydrolase family 1, protein id: At1g75940.1, supported by cDNA: gi_2746340
  misc_feature (1)..(436): Homolog of NCBI NO: 1076442 NR Description: beta-glucosidase (EC 3.2.1.21) - rape
  misc_feature (1)..(444): Homolog of NCBI NO: 25289457 NR Description: probable beta-glucosidase (EC 3.2.1.21) ATA27 - Arabidopsis thaliana >gi|2746341|gb|AAC39504.1| ATA27
MWDTFTKKFPHRCENHNADVAVDFYHRYKEDIQLMKDLNTDAFRLSIAWPRIFPHGRMSKGISKVGVQFYHDLIDELLKNNIIPLVTVFHWDTPQDLEDEYGGFLSGRIVQDFTEYANFTFHEYGHKVKHWITFNEPWVFSRAGYDNGKKAPGRCSPYIPGYGQHCQDGRSGYEAYQVSHNLLLSHAYAVDAFRKCKQCAGGKIGIAHSPAWFEPQDLEHVGGSIERVLDFILGWHLAPTTYGDYPQSMKDRVGHRLPKFTEAEKKLLKGSTDYVGMNYYTSVFAKEISPDPKNPSWTTDSLVDWDSKSVDGYKIGSKPFNGKLDVYSKGLRYLLKYIKDNYGDPEVIIAENGYGEDLGEKHNDVNFGTQDHNRKYYIQRHLLSMHDAICKDKVNVTGYFVWSLMDNFEWQDGYKARFGLYYIDFQNNLTRHQKVSGKWYSEFLKPQFPTSKLREEL

SEQ ID NO: 76133 - protein, 423 aa, Arabidopsis thaliana
  peptide (1)..(423): Ceres Seq. ID no. 7106559
  misc_feature: Pfam Name: Glyco_hydro_1 Pfam Description: Glycosyl hydrolase family 1
  misc_feature (1)..(423): Homolog of NCBI NO: 12043529 NR Description: beta-glucosidase 1 [Arabidopsis thaliana]
  misc_feature (1)..(423): Homolog of NCBI NO: 15218992 NR Description: glycosyl hydrolase family 1, beta-glucosidase protein id: At1g52400.1, supported by cDNA: gi_14532461,
  misc_feature (1)..(423): Homolog of NCBI NO: 12229686 NR Description: Beta-glucosidase homolog precursor
  misc_feature (1)..(423): Homolog of NCBI NO: 23397037 NR Description: putative beta-glucosidase [Arabidopsis thaliana]
  misc_feature (1)..(423): Homolog of NCBI NO: 22331243 NR Description: glycosyl hydrolase family 1; protein id: supported by cDNA: gi_16604492, supported by cDNA: gi_17381179,
  misc_feature (1)..(423): Homolog of NCBI NO: 16604493 NR Description: AT3g21370/MHC9_5 [Arabidopsis thaliana]
  misc_feature (1)..(410): Homolog of NCBI NO: 25404995 NR Description: protein T4O12.15 [imported] - Arabidopsis >gi|8778810|gb|AAF26759.2|AC007396_8 T4O12.15 [Arabidopsis
  misc_feature (1)..(410): Homolog of NCBI NO: 15222905 NR Description: glycosyl hydrolase family 1, protein id: At1g75940.1, supported by cDNA: gi_2746340
  misc_feature (1)..(402): Homolog of NCBI NO: 1076442 NR Description: beta-glucosidase (EC 3.2.1.21) - rape
  misc_feature (1)..(410): Homolog of NCBI NO: 25289457 NR Description: probable beta-glucosidase (EC 3.2.1.21) ATA27 - Arabidopsis thaliana >gi|2746341|gb|AAC39504.1| ATA27
MKDLNTDAFRLSIAWPRIFPHGRMSKGISKVGVQFYHDLIDELLKNNIIPLVTVFHWDTPQDLEDEYGGFLSGRIVQDFTEYANFTFHEYGHKVKHWITFNEPWVFSRAGYDNGKKAPGRCSPYIPGYGQHCQDGRSGYEAYQVSHNLLLSHAYAVDAFRKCKQCAGGKIGIAHSPAWFEPQDLEHVGGSIERVLDFILGWHLAPTTYGDYPQSMKDRVGHRLPKFTEAEKKLLKGSTDYVGMNYYTSVFAKEISPDPKNPSWTTDSLVDWDSKSVDGYKIGSKPFNGKLDVYSKGLRYLLKYIKDNYGDPEVIIAENGYGEDLGEKHNDVNFGTQDHNRKYYIQRHLLSMHDAICKDKVNVTGYFVWSLMDNFEWQDGYKARFGLYYIDFQNNLTRHQKVSGKWYSEFLKPQFPTSKLREEL

SEQ ID NO: 76134 - DNA, 1718 bp, Arabidopsis thaliana
  misc_feature (1)..(1718): Ceres Seq. ID no. 7106572
  misc_feature: MA Experiment ID: 108434 Result: Down-regulated in Transcription
  misc_feature: MA Experiment 108434 PARAMETER Experiment Name: At_Root_Tips_cDNA_P Parameter: Tissue Value: Root Tips
  misc_feature: MA Experiment ID: 108462 Result: Up-regulated in Transcription
  misc_feature: MA Experiment 108462 PARAMETER Experiment Name: At_Germinating_Seeds_cDNA_P Parameter: Age (day) Value: 2 vs. 0
  misc_feature: MA Experiment 108462 PARAMETER Experiment Name: At_Germinating_Seeds_cDNA_P Parameter: Tissue Value: Germinating Seeds
  misc_feature: MA Experiment ID: 108463 Result: Up-regulated in Transcription
  misc_feature: MA Experiment 108463 PARAMETER Experiment Name: At_Germinating_Seeds_cDNA_P Parameter: Age (day) Value: 3 vs. 0
  misc_feature: MA Experiment 108463 PARAMETER Experiment Name: At_Germinating_Seeds_cDNA_P Parameter: Tissue Value: Germinating Seeds
  misc_feature: MA Experiment ID: 108464 Result: Up-regulated in Transcription
  misc_feature: MA Experiment 108464 PARAMETER Experiment Name: At_Germinating_Seeds_cDNA_P Parameter: Age (day) Value: 4 vs. 0
  misc_feature: MA Experiment 108464 PARAMETER Experiment Name: At_Germinating_Seeds_cDNA_P Parameter: Tissue Value: Germinating Seeds
  misc_feature: MA Experiment ID: 108488 Result: Down-regulated in Transcription
  misc_feature: MA Experiment ID: 108572 Result: Up-regulated in Transcription
  misc_feature: MA Experiment 108572 PARAMETER Experiment Name: At_Drought_cDNA_P Parameter: Timepoint (hr) Value: 1
  misc_feature: MA Experiment 108572 PARAMETER Experiment Name: At_Drought_cDNA_P Parameter: Tissue Value: Aerial
  misc_feature: MA Experiment 108572 PARAMETER Experiment Name: At_Drought_cDNA_P Parameter: Treatment Value: Drought vs. No Drought
  misc_feature: MA Experiment ID: 108573 Result: Up-regulated in Transcription
  misc_feature: MA Experiment 108573 PARAMETER Experiment Name: At_Drought_cDNA_P Parameter: Timepoint (hr) Value: 6
  misc_feature: MA Experiment 108573 PARAMETER Experiment Name: At_Drought_cDNA_P Parameter: Tissue Value: Aerial
  misc_feature: MA Experiment 108573 PARAMETER Experiment Name: At_Drought_cDNA_P Parameter: Treatment Value: Drought vs. No Drought
  misc_feature: MA Experiment ID: 108605 Result: Up-regulated in Transcription
  misc_feature: MA Experiment 108605 PARAMETER Experiment Name: At_100uM_ABA_cDNA_P Parameter: Timepoint (hr) Value: 6
  misc_feature: MA Experiment 108605 PARAMETER Experiment Name: At_100uM_ABA_cDNA_P Parameter: Tissue Value: Aerial
  misc_feature: MA Experiment 108605 PARAMETER Experiment Name: At_100uM_ABA_cDNA_P Parameter: Treatment Value: 100uM ABA vs. No Treatment
  misc_feature: MA Experiment ID: 108607 Result: Up-regulated in Transcription
  misc_feature: MA Experiment 108607 PARAMETER Experiment Name: At_100uM_ABA_cDNA_P Parameter: Timepoint (hr) Value: 4
  misc_feature: MA Experiment 108607 PARAMETER Experiment Name: At_100uM_ABA_cDNA_P Parameter: Tissue Value: Aerial
  misc_feature: MA Experiment 108607 PARAMETER Experiment Name: At_100uM_ABA_cDNA_P Parameter: Treatment Value: 100uM ABA vs. No Treatment
  misc_feature: MA Experiment ID: 108609 Result: Up-regulated in Transcription
  misc_feature: MA Experiment 108609 PARAMETER Experiment Name: At_100uM_ABA_cDNA_P Parameter: Timepoint (hr) Value: 24
  misc_feature: MA Experiment 108609 PARAMETER Experiment Name: At_100uM_ABA_cDNA_P Parameter: Tissue Value: Aerial
  misc_feature: MA Experiment 108609 PARAMETER Experiment Name: At_100uM_ABA_cDNA_P Parameter: Treatment Value: 100uM ABA vs. No Treatment
  misc_feature: MA Experiment ID: 20000069 Result: Up-regulated in Transcription
  misc_feature: MA Experiment 20000069 PARAMETER Experiment Name: At_100uM_ABA_Mutants_cDNA_P Parameter: Plant Line Value: CS23
  misc_feature: MA Experiment 20000069 PARAMETER Experiment Name: At_100uM_ABA_Mutants_cDNA_P Parameter: Timepoint (hr) Value: 6
  misc_feature: MA Experiment 20000069 PARAMETER Experiment Name: At_100uM_ABA_Mutants_cDNA_P Parameter: Tissue Value: Aerial
  misc_feature: MA Experiment 20000069 PARAMETER Experiment Name: At_100uM_ABA_Mutants_cDNA_P Parameter: Treatment Value: 100uM ABA vs. No Treatment
  misc_feature: MA Experiment ID: 20000070 Result: Up-regulated in Transcription
  misc_feature: MA Experiment 20000070 PARAMETER Experiment Name: At_100uM_ABA_Mutants_cDNA_P Parameter: Plant Line Value: CS24
  misc_feature: MA Experiment 20000070 PARAMETER Experiment Name: At_100uM_ABA_Mutants_cDNA_P Parameter: Timepoint (hr) Value: 6
  misc_feature: MA Experiment 20000070 PARAMETER Experiment Name: At_100uM_ABA_Mutants_cDNA_P Parameter: Tissue Value: Aerial
  misc_feature: MA Experiment 20000070 PARAMETER Experiment Name: At_100uM_ABA_Mutants_cDNA_P Parameter: Treatment Value: 100uM ABA vs. No Treatment
  misc_feature: MA Experiment ID: 20000071 Result: Up-regulated in Transcription
  misc_feature: MA Experiment 20000071 PARAMETER Experiment Name: At_100uM_ABA_Mutants_cDNA_P Parameter: Plant Line Value: CS8104
  misc_feature: MA Experiment 20000071 PARAMETER Experiment Name: At_100uM_ABA_Mutants_cDNA_P Parameter: Timepoint (hr) Value: 6
  misc_feature: MA Experiment 20000071 PARAMETER Experiment Name: At_100uM_ABA_Mutants_cDNA_P Parameter: Tissue Value: Aerial
  misc_feature: MA Experiment 20000071 PARAMETER Experiment Name: At_100uM_ABA_Mutants_cDNA_P Parameter: Treatment Value: 100uM ABA vs. No Treatment
  misc_feature: MA Experiment ID: 20000072 Result: Up-regulated in Transcription
  misc_feature: MA Experiment 20000072 PARAMETER Experiment Name: At_100uM_ABA_Mutants_cDNA_P Parameter: Plant Line Value: CS8105
  misc_feature: MA Experiment 20000072 PARAMETER Experiment Name: At_100uM_ABA_Mutants_cDNA_P Parameter: Timepoint (hr) Value: 6
  misc_feature: MA Experiment 20000072 PARAMETER Experiment Name: At_100uM_ABA_Mutants_cDNA_P Parameter: Tissue Value: Aerial
  misc_feature: MA Experiment 20000072 PARAMETER Experiment Name: At_100uM_ABA_Mutants_cDNA_P Parameter: Treatment Value: 100uM ABA vs. No Treatment
  misc_feature: MA Experiment ID: 20000086 Result: Up-regulated in Transcription
  misc_feature: MA Experiment 20000086 PARAMETER Experiment Name: At_100uM_ABA_Mutants_cDNA_P Parameter: Plant Line Value: CS22
  misc_feature: MA Experiment 20000086 PARAMETER Experiment Name: At_100uM_ABA_Mutants_cDNA_P Parameter: Timepoint (hr) Value: 6
  misc_feature: MA Experiment 20000086 PARAMETER Experiment Name: At_100uM_ABA_Mutants_cDNA_P Parameter: Tissue Value: Aerial
  misc_feature: MA Experiment 20000086 PARAMETER Experiment Name: At_100uM_ABA_Mutants_cDNA_P Parameter: Treatment Value: 100uM ABA vs. No Treatment
  misc_feature: MA Experiment ID: 20000087 Result: Up-regulated in Transcription
  misc_feature: MA Experiment 20000087 PARAMETER Experiment Name: At_100uM_ABA_Mutants_cDNA_P Parameter: Plant Line Value: WS
  misc_feature: MA Experiment 20000087 PARAMETER Experiment Name: At_100uM_ABA_Mutants_cDNA_P Parameter: Timepoint (hr) Value: 6
  misc_feature: MA Experiment 20000087 PARAMETER Experiment Name: At_100uM_ABA_Mutants_cDNA_P Parameter: Tissue Value: Aerial
  misc_feature: MA Experiment 20000087 PARAMETER Experiment Name: At_100uM_ABA_Mutants_cDNA_P Parameter: Treatment Value: 100uM ABA vs. No Treatment
  misc_feature: MA Experiment ID: 20000088 Result: Up-regulated in Transcription
  misc_feature: MA Experiment 20000088 PARAMETER Experiment Name: At_100uM_ABA_Mutants_cDNA_P Parameter: Plant Line Value: Landsberg
  misc_feature: MA Experiment 20000088 PARAMETER Experiment Name: At_100uM_ABA_Mutants_cDNA_P Parameter: Timepoint (hr) Value: 6
  misc_feature: MA Experiment 20000088 PARAMETER Experiment Name: At_100uM_ABA_Mutants_cDNA_P Parameter: Tissue Value: Aerial
  misc_feature: MA Experiment 20000088 PARAMETER Experiment Name: At_100uM_ABA_Mutants_cDNA_P Parameter: Treatment Value: 100uM ABA vs. No Treatment
  misc_feature: MA Experiment ID: 20000089 Result: Up-regulated in Transcription
  misc_feature: MA Experiment ID: 20000111 Result: Down-regulated in Transcription
  misc_feature: MA Experiment 20000111 PARAMETER Experiment Name: At_42deg_Heat_cDNA_P Parameter: Temperature (deg C) Value: 42 vs. 22
  misc_feature: MA Experiment 20000111 PARAMETER Experiment Name: At_42deg_Heat_cDNA_P Parameter: Timepoint (hr) Value: 6
  misc_feature: MA Experiment 20000111 PARAMETER Experiment Name: At_42deg_Heat_cDNA_P Parameter: Tissue Value: Aerial
  misc_feature: MA Experiment ID: 20000113 Result: Down-regulated in Transcription
  misc_feature: MA Experiment 20000113 PARAMETER Experiment Name: At_42deg_Heat_cDNA_P Parameter: Temperature (deg C) Value: 42 vs. 22
  misc_feature: MA Experiment 20000113 PARAMETER Experiment Name: At_42deg_Heat_cDNA_P Parameter: Timepoint (hr) Value: 8
  misc_feature: MA Experiment 20000113 PARAMETER Experiment Name: At_42deg_Heat_cDNA_P Parameter: Tissue Value: Aerial
  misc_feature: MA Experiment ID: 20000117 Result: Up-regulated in Transcription
  misc_feature: MA Experiment 20000117 PARAMETER Experiment Name: At_100uM_ABA_Mutants_cDNA_P Parameter: Plant Line Value: Columbia
  misc_feature: MA Experiment 20000117 PARAMETER Experiment Name: At_100uM_ABA_Mutants_cDNA_P Parameter: Timepoint (hr) Value: 6
  misc_feature: MA Experiment 20000117 PARAMETER Experiment Name: At_100uM_ABA_Mutants_cDNA_P Parameter: Tissue Value: Aerial
  misc_feature: MA Experiment 20000117 PARAMETER Experiment Name: At_100uM_ABA_Mutants_cDNA_P Parameter: Treatment Value: 100uM ABA vs. No Treatment
  misc_feature: MA Experiment ID: 20000169 Result: Up-regulated in Transcription
  misc_feature: MA Experiment 20000169 PARAMETER Experiment Name: At_100uM_ABA_P Parameter: Age (day) Value: 14
  misc_feature: MA Experiment 20000169 PARAMETER Experiment Name: At_100uM_ABA_P Parameter: Organism Value: A. thaliana
  misc_feature: MA Experiment 20000169 PARAMETER Experiment Name: At_100uM_ABA_P Parameter: Plant Line Value: WS
  misc_feature: MA Experiment 20000169 PARAMETER Experiment Name: At_100uM_ABA_P Parameter: Timepoint (hr) Value: 6
  misc_feature: MA Experiment 20000169 PARAMETER Experiment Name: At_100uM_ABA_P Parameter: Tissue Value: Aerial
  misc_feature: MA Experiment 20000169 PARAMETER Experiment Name: At_100uM_ABA_P Parameter: Treatment Value: 100uM ABA vs. No Treatment
  misc_feature: MA Experiment ID: 20000173 Result: Down-regulated in Transcription
  misc_feature: MA Experiment 20000173 PARAMETER Experiment Name: At_42deg_Heat_P Parameter: Age (day) Value: 14
  misc_feature: MA Experiment 20000173 PARAMETER Experiment Name: At_42deg_Heat_P Parameter: Organism Value: A. thaliana
  misc_feature: MA Experiment 20000173 PARAMETER Experiment Name: At_42deg_Heat_P Parameter: Plant Line Value: WS
  misc_feature: MA Experiment 20000173 PARAMETER Experiment Name: At_42deg_Heat_P Parameter: Temperature (deg C) Value: 42 vs. 22
  misc_feature: MA Experiment 20000173 PARAMETER Experiment Name: At_42deg_Heat_P Parameter: Timepoint (hr) Value: 6
  misc_feature: MA Experiment 20000173 PARAMETER Experiment Name: At_42deg_Heat_P Parameter: Tissue Value: Aerial
  misc_feature: MA Experiment ID: 20000179 Result: Up-regulated in Transcription
  misc_feature: MA Experiment 20000179 PARAMETER Experiment Name: At_Germinating_Seeds_P Parameter: Age (hr) Value: 6 vs. 0
  misc_feature: MA Experiment 20000179 PARAMETER Experiment Name: At_Germinating_Seeds_P Parameter: Tissue Value: Germinating Seeds
  misc_feature: MA Experiment ID: 20000180 Result: Up-regulated in Transcription
  misc_feature: MA Experiment 20000180 PARAMETER Experiment Name: At_Germinating_Seeds_P Parameter: Age (hr) Value: 24 vs. 0
  misc_feature: MA Experiment 20000180 PARAMETER Experiment Name: At_Germinating_Seeds_P Parameter: Tissue Value: Germinating Seeds
  misc_feature: MA Experiment ID: 20000184 Result: Down-regulated in Transcription
  misc_feature: MA Experiment 20000184 PARAMETER Experiment Name: At_Shoots__P Parameter: Age (day) Value: 7
  misc_feature: MA Experiment 20000184 PARAMETER Experiment Name: At_Shoots__P Parameter: Tissue Value: Shoots vs. Whole Plant
  misc_feature: MA Experiment ID: 20000224 Result: Up-regulated in Transcription
  misc_feature: MA Experiment ID: 20000436 Result: Up-regulated in Transcription
  misc_feature: MA Experiment 20000436 PARAMETER Experiment Name: At_Drought_P Parameter: Age (day) Value: 7
  misc_feature: MA Experiment 20000436 PARAMETER Experiment Name: At_Drought_P Parameter: Organism Value: A. thaliana
  misc_feature: MA Experiment 20000436 PARAMETER Experiment Name: At_Drought_P Parameter: Plant Line Value: WS
  misc_feature: MA Experiment 20000436 PARAMETER Experiment Name: At_Drought_P Parameter: Timepoint (hr) Value: 12
  misc_feature: MA Experiment 20000436 PARAMETER Experiment Name: At_Drought_P Parameter: Tissue Value: Whole Plant
  misc_feature: MA Experiment 20000436 PARAMETER Experiment Name: At_Drought_P Parameter: Treatment Value: Drought vs. No Drought
  misc_feature: MA Experiment ID: 20000437 Result: Up-regulated in Transcription
  misc_feature: MA Experiment 20000437 PARAMETER Experiment Name: At_Drought_P Parameter: Age (day) Value: 8
  misc_feature: MA Experiment 20000437 PARAMETER Experiment Name: At_Drought_P Parameter: Organism Value: A. thaliana
  misc_feature: MA Experiment 20000437 PARAMETER Experiment Name: At_Drought_P Parameter: Plant Line Value: WS
  misc_feature: MA Experiment 20000437 PARAMETER Experiment Name: At_Drought_P Parameter: Timepoint (hr) Value: 24
  misc_feature: MA Experiment 20000437 PARAMETER Experiment Name: At_Drought_P Parameter: Tissue Value: Whole Plant
  misc_feature: MA Experiment 20000437 PARAMETER Experiment Name: At_Drought_P Parameter: Treatment Value: Drought vs. No Drought
  misc_feature: MA Experiment ID: 20000453 Result: Up-regulated in Transcription
  misc_feature: MA Experiment 20000453 PARAMETER Experiment Name: At_100uM_ABA_P Parameter: Age (day) Value: 15
  misc_feature: MA Experiment 20000453 PARAMETER Experiment Name: At_100uM_ABA_P Parameter: Organism Value: A. thaliana
  misc_feature: MA Experiment 20000453 PARAMETER Experiment Name: At_100uM_ABA_P Parameter: Plant Line Value: WS
  misc_feature: MA Experiment 20000453 PARAMETER Experiment Name: At_100uM_ABA_P Parameter: Timepoint (hr) Value: 24
  misc_feature: MA Experiment 20000453 PARAMETER Experiment Name: At_100uM_ABA_P Parameter: Tissue Value: Aerial
  misc_feature: MA Experiment 20000453 PARAMETER Experiment Name: At_100uM_ABA_P Parameter: Treatment Value: 100uM ABA vs. No Treatment
  misc_feature: MA Experiment ID: 20000794 Result: Up-regulated in Transcription
  misc_feature: MA Experiment 20000794 PARAMETER Experiment Name: At_Petals_P Parameter: Age (day) Value: 23-25 days
  misc_feature: MA Experiment 20000794 PARAMETER Experiment Name: At_Petals_P Parameter: Plant Line Value: WS
  misc_feature: MA Experiment 20000794 PARAMETER Experiment Name: At_Petals_P Parameter: Tissue Value: Petals vs. Whole plant
  misc_feature: MA Experiment ID: 20001905 Result: Up-regulated in Transcription
  misc_feature: MA Experiment 20001905 PARAMETER Experiment Name: At_Drought_Reproduction_P Parameter: Age (day) Value: 40
  misc_feature: MA Experiment 20001905 PARAMETER Experiment Name: At_Drought_Reproduction_P Parameter: Organism Value: A. thaliana
  misc_feature: MA Experiment 20001905 PARAMETER Experiment Name: At_Drought_Reproduction_P Parameter: Plant Line Value: WS
  misc_feature: MA Experiment 20001905 PARAMETER Experiment Name: At_Drought_Reproduction_P Parameter: Timepoint (day) Value: 10
  misc_feature: MA Experiment 20001905 PARAMETER Experiment Name: At_Drought_Reproduction_P Parameter: Tissue Value: Rosettes
  misc_feature: MA Experiment 20001905 PARAMETER Experiment Name: At_Drought_Reproduction_P Parameter: Treatment Value: Drought vs. No Drought
  misc_feature: MA Experiment ID: 20001911 Result: Up-regulated in Transcription
  misc_feature: MA Experiment 20001911 PARAMETER Experiment Name: At_Drought_Reproduction_P Parameter: Age (day) Value: 40
  misc_feature: MA Experiment 20001911 PARAMETER Experiment Name: At_Drought_Reproduction_P Parameter: Organism Value: A. thaliana
  misc_feature: MA Experiment 20001911 PARAMETER Experiment Name: At_Drought_Reproduction_P Parameter: Plant Line Value: WS
  misc_feature: MA Experiment 20001911 PARAMETER Experiment Name: At_Drought_Reproduction_P Parameter: Timepoint (day) Value: 10
  misc_feature: MA Experiment 20001911 PARAMETER Experiment Name: At_Drought_Reproduction_P Parameter: Tissue Value: Flowers
  misc_feature: MA Experiment 20001911 PARAMETER Experiment Name: At_Drought_Reproduction_P Parameter: Treatment Value: Drought vs. No Drought
agtgtgagtaatttagatccaggattcttcagattcctctcctttgatcctctctttaacaatctctctctctctgttttcttcgatccgttgtaggagaaaatggtcgttatcaacagtctccgacgcttggcgcgtaccactcaggttcatttgcacagtaggtatgccacttgcatgtctgggaactccacttccaggaggattttcactactgaggcagcacctgagaagaaaaacactgttgggtctaaagggcatgatatgcttgcaccttttactgctggatggcagagtgctgatttagatcccttggtcattgcaaagtctgagggaagttatgtgtatgatgatactgggaaaaaatatcttgactctctcgctggtttatggtgtactgccttaggaggaaatgagccaaggcttgtttctgccgctgttgaacagttgaacaccttgccgttttatcactccttttggaaccgtactactaaaccttctctggatcttgctaaggttcttttagagatgttcacggccaacaaaatggccaaagcattttttacaagcggtggatcagatgccaacgatacccaggtcaagctggtttggtattacaataacgcacttggaaggcccgagaagaaaaagtttatcgcgagaaagaaatcgtaccatggctccactctaatatcagcaagtttgtccggccttcccccgctacaccaaaattttgatttacctgcaccatttgtgttgcacacagattgccctcattattggcgttttcatcttccaggcgaaacggaagaggagttctcaaccagattagccaagaatttagaggatctaatcatcaaagaaggaccagaaactattggtgcttttatagctgaaccagtcatgggtgctgggggtgtgatacctccacctgctacctactttgaaaaggttcaagctgttgttaagaaatatgatatcttgttcattgctgatgaggtgatatgtgcatttggaaggctcgggacaatgtttggctgtgacaaatacaacattaagccagatcttgtgaccttagctaaggcactgtcttcagcatatatgccgattggagccattcttatgagccaagaagtggcagatgtcataaattctcatagcagcaagcttggcgttttctcccatggatttacttattctggtcatccagtttcgtgtgctgtagcaattgaagcgttaaagatatacaaggagaggaacataccagagtatgtcgccaaagttgccccaaggtttcaagatggagttaaagcgtttgcctctggtagtcctattattggagagacaagaggaacaggtttgattcttgggactgagtttgtagacaataaatctccgaacgaaccatttccaccagaatggggtgttggcgcattctttggagccgagtgccagaagcacgggatgttagtccgtgttgcaggtgatggcattttgatgtctccaccgctcattatctcacctgaagagattgatgagttgatttctatctatgggaaagcattgaaggcaacggaagagaaggtaaaagaactcaaggctcagcacaagaagtgaaaagcagagtcaaaatgatgttgatgaaaaatgttttttagattctcaaagtttggatctattgtttttttttttaacacacaacaagtctttaaataagt

SEQ ID NO: 76135 - protein, 504 aa, Arabidopsis thaliana
  peptide (1)..(504): Ceres Seq. ID no. 7106573
  misc_feature (60)..(492): Pfam Name: Aminotransferase class-III Pfam Description: Aminotransferase class-III
  misc_feature (1)..(504): Homolog of NCBI NO: 14030435 NR Description: gamma-aminobutyrate transaminase subunit
  misc_feature (1)..(504): Homolog of NCBI NO: 18403295 NR Description: aminotransferase, putative; protein id: supported by cDNA: gi_14030434, supported by cDNA: gi_14334463 thaliana] >gi|14334464|gb|AAK59430.1| putative aminotransferase
  misc_feature (50)..(504): Homolog of NCBI NO: 11994739 NR Description: aminotransferase-like protein [Arabidopsis
  misc_feature (3)..(501): Homolog of NCBI NO: 29837282 NR Description: gamma-aminobutyrate transaminase subunit
  misc_feature (4)..(501): Homolog of NCBI NO: 33340007 NR Description: putative aminotransferase [Oryza sativa]
  misc_feature (49)..(503): Homolog of NCBI NO: 29837286 NR Description: gamma-aminobutyrate transaminase subunit
  misc_feature (25)..(503): Homolog of NCBI NO: 38344250 NR Description: OSJNBa0008M17.3 [Oryza sativa (japonica
  misc_feature (47)..(504): Homolog of NCBI NO: 19171207 NR Description: viroid RNA-binding protein [Lycopersicon
  misc_feature (52)..(501): Homolog of NCBI NO: 3599491 NR Description: putative aminotransferase [Capsicum chinense]
  misc_feature (47)..(503): Homolog of NCBI NO: 29837284 NR Description: gamma-aminobutyrate transaminase subunit
MVVINSLRRLARTTQVHLHSRYATCMSGNSTSRRIFTTEAAPEKKNTVGSKGHDMLAPFTAGWQSADLDPLVIAKSEGSYVYDDTGKKYLDSLAGLWCTALGGNEPRLVSAAVEQLNTLPFYHSFWNRTTKPSLDLAKVLLEMFTANKMAKAFFTSGGSDANDTQVKLVWYYNNALGRPEKKKFIARKKSYHGSTLISASLSGLPPLHQNFDLPAPFVLHTDCPHYWRFHLPGETEEEFSTRLAKNLEDLIIKEGPETIGAFIAEPVMGAGGVIPPPATYFEKVQAVVKKYDILFIADEVICAFGRLGTMFGCDKYNIKPDLVTLAKALSSAYMPIGAILMSQEVADVINSHSSKLGVFSHGFTYSGHPVSCAVAIEALKIYKERNIPEYVAKVAPRFQDGVKAFASGSPIIGETRGTGLILGTEFVDNKSPNEPFPPEWGVGAFFGAECQKHGMLVRVAGDGILMSPPLIISPEEIDELISIYGKALKATEEKVKELKAQHKK

SEQ ID NO: 76136 - protein, 479 aa, Arabidopsis thaliana; identical to SEQ ID NO: 26478
  peptide (1)..(479): Ceres Seq. ID no. 7106574
  misc_feature (35)..(467): Pfam Name: Aminotransferase class-III Pfam Description: Aminotransferase class-III
  misc_feature (1)..(479): Homolog of NCBI NO: 14030435 NR Description: gamma-aminobutyrate transaminase subunit
  misc_feature (1)..(479): Homolog of NCBI NO: 18403295 NR Description: aminotransferase, putative; protein id: supported by cDNA: gi_14030434, supported by cDNA: gi_14334463 thaliana] >gi|14334464|gb|AAK59430.1| putative aminotransferase
  misc_feature (25)..(479): Homolog of NCBI NO: 11994739 NR Description: aminotransferase-like protein [Arabidopsis
  misc_feature (1)..(476): Homolog of NCBI NO: 29837282 NR Description: gamma-aminobutyrate transaminase subunit
  misc_feature (1)..(476): Homolog of NCBI NO: 33340007 NR Description: putative aminotransferase [Oryza sativa]
  misc_feature (24)..(478): Homolog of NCBI NO: 29837286 NR Description: gamma-aminobutyrate transaminase subunit
  misc_feature (1)..(478): Homolog of NCBI NO: 38344250 NR Description: OSJNBa0008M17.3 [Oryza sativa (japonica
  misc_feature (22)..(479): Homolog of NCBI NO: 19171207 NR Description: viroid RNA-binding protein [Lycopersicon
  misc_feature (27)..(476): Homolog of NCBI NO: 3599491 NR Description: putative aminotransferase [Capsicum chinense]
  misc_feature (22)..(478): Homolog of NCBI NO: 29837284 NR Description: gamma-aminobutyrate transaminase subunit

SEQ ID NO: 76137 - protein, 450 aa, Arabidopsis thaliana; identical to SEQ ID NO: 26479
  peptide (1)..(450): Ceres Seq. ID no. 7106575
  misc_feature (6)..(438): Pfam Name: Aminotransferase class-III Pfam Description: Aminotransferase class-III
  misc_feature (1)..(450): Homolog of NCBI NO: 14030435 NR Description: gamma-aminobutyrate transaminase subunit
  misc_feature (1)..(450): Homolog of NCBI NO: 18403295 NR Description: aminotransferase, putative; protein id: supported by cDNA: gi_14030434, supported by cDNA: gi_14334463 thaliana] >gi|14334464|gb|AAK59430.1| putative aminotransferase
  misc_feature (1)..(450): Homolog of NCBI NO: 11994739 NR Description: aminotransferase-like protein [Arabidopsis
  misc_feature (1)..(447): Homolog of NCBI NO: 29837282 NR Description: gamma-aminobutyrate transaminase subunit
  misc_feature (1)..(447): Homolog of NCBI NO: 33340007 NR Description: putative aminotransferase [Oryza sativa]
  misc_feature (1)..(449): Homolog of NCBI NO: 29837286 NR Description: gamma-aminobutyrate transaminase subunit
  misc_feature (1)..(449): Homolog of NCBI NO: 38344250 NR Description: OSJNBa0008M17.3 [Oryza sativa (japonica
  misc_feature (1)..(450): Homolog of NCBI NO: 19171207 NR Description: viroid RNA-binding protein [Lycopersicon
  misc_feature (1)..(447): Homolog of NCBI NO: 3599491 NR Description: putative aminotransferase [Capsicum chinense]
  misc_feature (1)..(449): Homolog of NCBI NO: 29837284 NR Description: gamma-aminobutyrate transaminase subunit

SEQ ID NO: 76138 - DNA, 1219 bp, Arabidopsis thaliana
  misc_feature (1)..(1219): Ceres Seq. ID no. 7106592
  misc_feature: MA Experiment ID: 108434 Result: Up-regulated in Transcription
  misc_feature: MA Experiment 108434 PARAMETER Experiment Name: At_Root_Tips_cDNA_P Parameter: Tissue Value: Root Tips
  misc_feature: MA Experiment ID: 108461 Result: Up-regulated in Transcription
  misc_feature: MA Experiment 108461 PARAMETER Experiment Name: At_Germinating_Seeds_cDNA_P Parameter: Age (day) Value: 1 vs. 0
  misc_feature: MA Experiment 108461 PARAMETER Experiment Name: At_Germinating_Seeds_cDNA_P Parameter: Tissue Value: Germinating Seeds
  misc_feature: MA Experiment ID: 108462 Result: Up-regulated in Transcription
  misc_feature: MA Experiment 108462 PARAMETER Experiment Name: At_Germinating_Seeds_cDNA_P Parameter: Age (day) Value: 2 vs. 0
  misc_feature: MA Experiment 108462 PARAMETER Experiment Name: At_Germinating_Seeds_cDNA_P Parameter: Tissue Value: Germinating Seeds
  misc_feature: MA Experiment ID: 108595 Result: Down-regulated in Transcription
  misc_feature: MA Experiment 108595 PARAMETER Experiment Name: At_Ler-pi_Ovule_cDNA_P Parameter: Plant Line Value: null
  misc_feature: MA Experiment ID: 20000180 Result: Up-regulated in Transcription
  misc_feature: MA Experiment 20000180 PARAMETER Experiment Name: At_Germinating_Seeds_P Parameter: Age (hr) Value: 24 vs. 0
  misc_feature: MA Experiment 20000180 PARAMETER Experiment Name: At_Germinating_Seeds_P Parameter: Tissue Value: Germinating Seeds
  misc_feature: MA Experiment ID: 20000184 Result: Up-regulated in Transcription
  misc_feature: MA Experiment 20000184 PARAMETER Experiment Name: At_Shoots__P Parameter: Age (day) Value: 7
  misc_feature: MA Experiment 20000184 PARAMETER Experiment Name: At_Shoots__P Parameter: Tissue Value: Shoots vs. Whole Plant
  misc_feature: MA Experiment ID: 20000234 Result: Up-regulated in Transcription
  misc_feature: MA Experiment 20000234 PARAMETER Experiment Name: At_Siliques_P Parameter: Age (day) Value: 21
  misc_feature: MA Experiment 20000234 PARAMETER Experiment Name: At_Siliques_P Parameter: Organism Value: A. thaliana
  misc_feature: MA Experiment 20000234 PARAMETER Experiment Name: At_Siliques_P Parameter: Plant Line Value: WS
  misc_feature: MA Experiment 20000234 PARAMETER Experiment Name: At_Siliques_P Parameter: Tissue Value: Less Than 5mm Siliques vs. Whole Plant
  misc_feature: MA Experiment ID: 20000286 Result: Up-regulated in Transcription
  misc_feature: MA Experiment 20000286 PARAMETER Experiment Name: At_Open_Flower_P Parameter: Age (day) Value: 21
  misc_feature: MA Experiment 20000286 PARAMETER Experiment Name: At_Open_Flower_P Parameter: Plant Line Value: WS
  misc_feature: MA Experiment 20000286 PARAMETER Experiment Name: At_Open_Flower_P Parameter: Tissue Value: Half Open vs. Whole Plant
  misc_feature: MA Experiment ID: 20000438 Result: Up-regulated in Transcription
  misc_feature: MA Experiment 20000438 PARAMETER Experiment Name: At_Shoots__P Parameter: Age (day) Value: 14
  misc_feature: MA Experiment 20000438 PARAMETER Experiment Name: At_Shoots__P Parameter: Tissue Value: Shoots vs. Whole Plant
  misc_feature: MA Experiment ID: 20001560 Result: Up-regulated in Transcription
  misc_feature: MA Experiment 20001560 PARAMETER Experiment Name: At_Drought_Soil_Dry_P Parameter: Age (day) Value: 28
  misc_feature: MA Experiment 20001560 PARAMETER Experiment Name: At_Drought_Soil_Dry_P Parameter: Organism Value: A. thaliana
  misc_feature: MA Experiment 20001560 PARAMETER Experiment Name: At_Drought_Soil_Dry_P Parameter: Plant Line Value: WS
  misc_feature: MA Experiment 20001560 PARAMETER Experiment Name: At_Drought_Soil_Dry_P Parameter: Post Timepoint (hr) Value: None
  misc_feature: MA Experiment 20001560 PARAMETER Experiment Name: At_Drought_Soil_Dry_P Parameter: Post-Treatment Value: None
  misc_feature: MA Experiment 20001560 PARAMETER Experiment Name: At_Drought_Soil_Dry_P Parameter: Timepoint (day) Value: 14
  misc_feature: MA Experiment 20001560 PARAMETER Experiment Name: At_Drought_Soil_Dry_P Parameter: Treatment Value: Drought vs. No Drought
  misc_feature: MA Experiment ID: 20001911 Result: Down-regulated in Transcription
  misc_feature: MA Experiment 20001911 PARAMETER Experiment Name: At_Drought_Reproduction_P Parameter: Age (day) Value: 40
  misc_feature: MA Experiment 20001911 PARAMETER Experiment Name: At_Drought_Reproduction_P Parameter: Organism Value: A. thaliana
  misc_feature: MA Experiment 20001911 PARAMETER Experiment Name: At_Drought_Reproduction_P Parameter: Plant Line Value: WS
  misc_feature: MA Experiment 20001911 PARAMETER Experiment Name: At_Drought_Reproduction_P Parameter: Timepoint (day) Value: 10
  misc_feature: MA Experiment 20001911 PARAMETER Experiment Name: At_Drought_Reproduction_P Parameter: Tissue Value: Flowers
  misc_feature: MA Experiment 20001911 PARAMETER Experiment Name: At_Drought_Reproduction_P Parameter: Treatment Value: Drought vs. No Drought
ccacgcgtccggtgaactgttgttgttgtgctctttggtttcatcgagagagaacctaaacccgatctgaaccaataacaataagaagacgaatggcgtcttcgtcgttctcagtcacatctccagctgctgctgcttccgtctatgcagtcactcaaacctcctcgcacttcccaatccaaaaccgctctcgcagagtttctttccgtctctctgctaagcccaagcttcgctttctctccaagcctagtcgcagtagctaccctgtggtgaaagcacaatctaacaaggttagtactggtgcatcatcaaatgctgccaaagttgatgggccatcatcagctgaaggaaaggagaaaaactcattgaaggagtcgtctgcttcttctcctgaattagctacagaagagtctatttctgagttccttacccaagtaacaactcttgtcaagcttgtggattcaagagacattgttgagttgcagttgaaacaactcgactgtgaactagtcattcgaaaaaaagaagccttacctcaacctcaagctcctgcatcttatgttatgatgcagcaaccaaatcaaccatcttatgcccagcaaatggctcctcctgctgcacctgctgctgccgcaccagccccttctacgccagcctctctgcctccaccatccccacctactccagccaaatcgtcacttcctactgttaaaagccccatggctggcacattctaccgtagtcctgcacctggtgaaccaccctttattaaggttggagacaaagtgcagaaggggcaagttctatgcattgttgaagccatgaagttaatgaatgaaatagagtctgaccataccggaaccgtagtcgatattgtcgcagaagacggcaagcctgtcagcctcgacactcctctgtttgtggttcaaccgtagaatcggcaccatgagaaatggagaaaagaagctctactaaattcattctctgtgctttggtaatacaaaatttgctgagacttctaaaaacgtttccccttcgctgtcactgttaaagtctgttaggtttgttagtttggtgaggaagaattgagttttctttagtttctctattcgttaaaaaaaaaaagatgagacatttttttccataagctctgtttttatttctttcctatatacacgaactcttcttgttctgttctatttgcaaattatccaatttc

SEQ ID NO: 76139 - protein, 280 aa, Arabidopsis thaliana
  peptide (1)..(280): Ceres Seq. ID no. 7106593
  misc_feature (204)..(278): Pfam Name: Biotin-requiring enzyme Pfam Description: Biotin-requiring enzyme
  misc_feature (1)..(280): Homolog of NCBI NO: 1066348 NR Description: acetyl-CoA carboxylase biotin-containing subunit
  misc_feature (1)..(280): Homolog of NCBI NO: 15237339 NR Description: biotin carboxyl carrier protein 1 (BCCP1); id: At5g16390.1, supported by cDNA: 38996., supported by cDNA: supported by cDNA: gi_15451073, supported by cDNA: gi_18377417
  misc_feature (1)..(280): Homolog of NCBI NO: 1588550 NR Description: Ac-CoA carboxylase
  misc_feature (1)..(275): Homolog of NCBI NO: 1916613 NR Description: acetyl-CoA carboxylase
  misc_feature (84)..(280): Homolog of NCBI NO: 2129784 NR Description: biotin carboxyl carrier protein (clone BP1) - (fragment) >gi|1070000|emb|CAA62261.1| biotin carboxyl carrier
  misc_feature (3)..(280): Homolog of NCBI NO: 29169309 NR Description: biotin carboxylase carrier protein [Lycopersicon
MASSSFSVTSPAAAASVYAVTQTSSHFPIQNRSRRVSFRLSAKPKLRFLSKPSRSSYPVVKAQSNKVSTGASSNAAKVDGPSSAEGKEKNSLKESSASSPELATEESISEFLTQVTTLVKLVDSRDIVELQLKQLDCELVIRKKEALPQPQAPASYVMMQQPNQPSYAQQMAPPAAPAAAAPAPSTPASLPPPSPPTPAKSSLPTVKSPMAGTFYRSPAPGEPPFIKVGDKVQKGQVLCIVEAMKLMNEIESDHTGTVVDIVAEDGKPVSLDTPLFVVQP

SEQ ID NO: 76140 - DNA, 1730 bp, Arabidopsis thaliana
  misc_feature (1)..(1730): Ceres Seq. ID no. 7106618
  misc_feature: MA Experiment ID: 20000182 Result: Down-regulated in Transcription
  misc_feature: MA Experiment 20000182 PARAMETER Experiment Name: At_2mM_SA_P Parameter: Age (day) Value: 14
  misc_feature: MA Experiment 20000182 PARAMETER Experiment Name: At_2mM_SA_P Parameter: Organism Value: A. thaliana
  misc_feature: MA Experiment 20000182 PARAMETER Experiment Name: At_2mM_SA_P Parameter: Plant Line Value: WS
  misc_feature: MA Experiment 20000182 PARAMETER Experiment Name: At_2mM_SA_P Parameter: Timepoint (hr) Value: 6
  misc_feature: MA Experiment 20000182 PARAMETER Experiment Name: At_2mM_SA_P Parameter: Tissue Value: Aerial
  misc_feature: MA Experiment 20000182 PARAMETER Experiment Name: At_2mM_SA_P Parameter: Treatment Value: 2mM SA vs. No Treatment
  misc_feature: MA Experiment ID: 20000265 Result: Up-regulated in Transcription
  misc_feature: MA Experiment 20000265 PARAMETER Experiment Name: At_Open_Flower_P Parameter: Age (day) Value: 21
  misc_feature: MA Experiment 20000265 PARAMETER Experiment Name: At_Open_Flower_P Parameter: Plant Line Value: WS
  misc_feature: MA Experiment 20000265 PARAMETER Experiment Name: At_Open_Flower_P Parameter: Tissue Value: Closed Flower vs. Whole Plant
  misc_feature: MA Experiment ID: 20001248 Result: Down-regulated in Transcription
  misc_feature: MA Experiment 20001248 PARAMETER Experiment Name: At_Far-red-induction_P Parameter: Age (day) Value: 7
  misc_feature: MA Experiment 20001248 PARAMETER Experiment Name: At_Far-red-induction_P Parameter: Light Value: Far-red vs. White
  misc_feature: MA Experiment 20001248 PARAMETER Experiment Name: At_Far-red-induction_P Parameter: Organism Value: A. thaliana
  misc_feature: MA Experiment 20001248 PARAMETER Experiment Name: At_Far-red-induction_P Parameter: Plant Line Value: Columbia
  misc_feature: MA Experiment 20001248 PARAMETER Experiment Name: At_Far-red-induction_P Parameter: Timepoint (hr) Value: 4
  misc_feature: MA Experiment 20001248 PARAMETER Experiment Name: At_Far-red-induction_P Parameter: Tissue Value: Whole Plant
  misc_feature: MA Experiment ID: 20001760 Result: Up-regulated in Transcription
  misc_feature: MA Experiment 20001760 PARAMETER Experiment Name: At_50mM_NH4NO3_L-to-H_P Parameter: Timepoint (hr) Value: 2
  misc_feature: MA Experiment 20001760 PARAMETER Experiment Name: At_50mM_NH4NO3_L-to-H_P Parameter: Tissue Value: Siliques
  misc_feature: MA Experiment 20001760 PARAMETER Experiment Name: At_50mM_NH4NO3_L-to-H_P Parameter: Treatment Value: 50mM NH4NO3 vs 100mM Mannitol
ggcacgagctgcatactggtcattgattggttaatcagagctctctcttttcttttcctatctctagagactagagaaatggctctctatctctcttcttcacgactcatcacctttctctctttcatcttgcttctctccaatggcttctcgtcctcttcctctcgccctagcatccaccatcgtcaccacctggacaaccacaattacaaagacgctctctccaaatccattctcttcttcgaaggtcaaagatccggaaagcttcctccaaaccagagaatgacttggagaagcaactctggtctctctgatggctctgctctcaacgtggatttggtgggaggatactacgatgcaggggacaatatgaagtttggattcccaatggcattcacaaccacaatgctctcatggagtttaattgagtttggtggtctcatgaaatctgagttaccaaacgcaaaagacgctattcgttgggctactgactttctcctcaaagccacttcacatcctgataccatttatgttcaggttggtgatcctaacatggaccatgcttgttgggagagaccagaagacatggacacaccaagaagtgtgtttaaagtcgacaagaacaatcctggttctgatatcgccggtgaaatcgccgccgctcttgccgctgcttcaattgttttcagaaaatgtgatccttcttactccaatcacctcctccaacgagccattacggtttttacatttgcggacaaatacagaggaccctacagtgcaggtctggccccagaagtttgtccattctactgttcttactctggatatcaggatgaattgttatggggagctgcttggttacaaaaagcaacaaataacccaacatatctcaattacatcaaagctaatggacaaatccttggagctgatgagtttgataacatgtttagttgggataataagcacgttggtgctagaatccttctctccaaggagtttctgattcagaaagtgaagtcacttgaagaatacaaagagcatgctgatagtttcatttgctctgttatacctggagcatcctcttcccaatatacaccaggtgggctattgttcaagatgggtgagagcaacatgcaatacgtgacgtctacatcgttcttgctcttgacctacgccaaatacttaacctctgctcgcaccgtcgcttattgcggtggctccgtcgtcacccctgcccgcctccgctccatcgcaaagaaacaggtggattatctacttggaggcaacccgttgaagatgtcatacatggttggttatggtctgaaatatccacgtcggattcaccaccgtggctcatctctcccctccgttgcagtccacccgaccaggatccagtgccacgacggcttctccttgtttacctctcaatctcctaatcctaacgacctagtcggtgcagtagtcggtggtccggaccagaacgatcaattccctgacgaacggtccgactacggacggtcagagccagcaacttacattaacgctccacttgttggagctttggcttatcttgctcgatcctaaggccaactttaactaagcttaaaccgcatttaattgttggtttacaatgttaattagtagtaatgattttataaatgaatggccaagattgtccgatccggctgaatgaatgttttagatgatgtggtatttgattttaattttct

SEQ ID NO: 76141 - protein, 527 aa, Arabidopsis thaliana
  peptide (1)..(527): Ceres Seq. ID no. 7106619
  misc_feature (69)..(524): Pfam Name: Glycosyl hydrolase family 9 Pfam Description: Glycosyl hydrolase family 9
  misc_feature (27)..(527): Homolog of NCBI NO: 25350173 NR Description: cellulase (EC 3.2.1.4) [imported] - Arabidopsis
  misc_feature (27)..(527): Homolog of NCBI NO: 15218612 NR Description: glycosyl hydrolase family 9 ATCEL2); protein id: At1g02800.1, supported by cDNA: gi_3132890
  misc_feature (27)..(527): Homolog of NCBI NO: 15235301 NR Description: glycosyl hydrolase family 9; protein id: supported by cDNA: gi_19310535, supported by cDNA: gi_20855940
  misc_feature (27)..(527): Homolog of NCBI NO: 11358947 NR Description: endo-1,3(4)-beta-glucanase (EC 3.2.1.6) - garden
  misc_feature (42)..(527): Homolog of NCBI NO: 1362091 NR Description: cellulase (EC 3.2.1.4) precursor - tomato
  misc_feature (27)..(527): Homolog of NCBI NO: 6009979 NR Description: endo-1,4-beta-glucanase [Pisum sativum]
  misc_feature (35)..(527): Homolog of NCBI NO: 34894544 NR Description: putative endo-1,3(4)-beta-glucanase [Oryza sativa
  misc_feature (39)..(527): Homolog of NCBI NO: 7484476 NR Description: cellulase (EC 3.2.1.4) 1 precursor - Monterey pine
  misc_feature (67)..(527): Homolog of NCBI NO: 11357128 NR Description: cellulase (EC 3.2.1.4) 2 precursor - Monterey pine
  misc_feature (67)..(525): Homolog of NCBI NO: 4691450 NR Description: endo-1,4-beta glucanase [Populus alba]
GTSCILVIDWLIRALSFLFLSLETREMALYLSSSRLITFLSFILLLSNGFSSSSSRPSIHHRHHLDNHNYKDALSKSILFFEGQRSGKLPPNQRMTWRSNSGLSDGSALNVDLVGGYYDAGDNMKFGFPMAFTTTMLSWSLIEFGGLMKSELPNAKDAIRWATDFLLKATSHPDTIYVQVGDPNMDHACWERPEDMDTPRSVFKVDKNNPGSDIAGEIAAALAAASIVFRKCDPSYSNHLLQRAITVFTFADKYRGPYSAGLAPEVCPFYCSYSGYQDELLWGAAWLQKATNNPTYLNYIKANGQILGADEFDNMFSWDNKHVGARILLSKEFLIQKVKSLEEYKEHADSFICSVIPGASSSQYTPGGLLFKMGESNMQYVTSTSFLLLTYAKYLTSARTVAYCGGSVVTPARLRSIAKKQVDYLLGGNPLKMSYMVGYGLKYPRRIHHRGSSLPSVAVHPTRIQCHDGFSLFTSQSPNPNDLVGAVVGGPDQNDQFPDERSDYGRSEPATYINAPLVGALAYLARS

SEQ ID NO: 76142 - protein, 501 aa, Arabidopsis thaliana
  peptide (1)..(501): Ceres Seq. ID no. 7106620
  misc_feature (43)..(498): Pfam Name: Glycosyl hydrolase family 9 Pfam Description: Glycosyl hydrolase family 9
  misc_feature (1)..(501): Homolog of NCBI NO: 25350173 NR Description: cellulase (EC 3.2.1.4) [imported] - Arabidopsis
  misc_feature (1)..(501): Homolog of NCBI NO: 15218612 NR Description: glycosyl hydrolase family 9 ATCEL2); protein id: At1g02800.1, supported by cDNA: gi_3132890
  misc_feature (1)..(501): Homolog of NCBI NO: 15235301 NR Description: glycosyl hydrolase family 9; protein id: supported by cDNA: gi_19310535, supported by cDNA: gi_20855940
  misc_feature (1)..(501): Homolog of NCBI NO: 11358947 NR Description: endo-1,3(4)-beta-glucanase (EC 3.2.1.6) - garden
  misc_feature (16)..(501): Homolog of NCBI NO: 1362091 NR Description: cellulase (EC 3.2.1.4) precursor - tomato
  misc_feature (1)..(501): Homolog of NCBI NO: 6009979 NR Description: endo-1,4-beta-glucanase [Pisum sativum]
  misc_feature (9)..(501): Homolog of NCBI NO: 34894544 NR Description: putative endo-1,3(4)-beta-glucanase [Oryza sativa
  misc_feature (13)..(501): Homolog of NCBI NO: 7484476 NR Description: cellulase (EC 3.2.1.4) 1 precursor - Monterey pine
  misc_feature (41)..(501): Homolog of NCBI NO: 11357128 NR Description: cellulase (EC 3.2.1.4) 2 precursor - Monterey pine
  misc_feature (41)..(499): Homolog of NCBI NO: 4691450 NR Description: endo-1,4-beta glucanase [Populus alba]
MALYLSSSRLITFLSFILLLSNGFSSSSSRPSIHHRHHLDNHNYKDALSKSILFFEGQRSGKLPPNQRMTWRSNSGLSDGSALNVDLVGGYYDAGDNMKFGFPMAFTTTMLSWSLIEFGGLMKSELPNAKDAIRWATDFLLKATSHPDTIYVQVGDPNMDHACWERPEDMDTPRSVFKVDKNNPGSDIAGEIAAALAAASIVFRKCDPSYSNHLLQRAITVFTFADKYRGPYSAGLAPEVCPFYCSYSGYQDELLWGAAWLQKATNNPTYLNYIKANGQILGADEFDNMFSWDNKHVGARILLSKEFLIQKVKSLEEYKEHADSFICSVIPGASSSQYTPGGLLFKMGESNMQYVTSTSFLLLTYAKYLTSARTVAYCGGSVVTPARLRSIAKKQVDYLLGGNPLKMSYMVGYGLKYPRRIHHRGSSLPSVAVHPTRIQCHDGFSLFTSQSPNPNDLVGAVVGGPDQNDQFPDERSDYGRSEPATYINAPLVGALAYLARS

SEQ ID NO: 76143 - protein, 433 aa, Arabidopsis thaliana
  peptide (1)..(433): Ceres Seq. ID no. 7106621
  misc_feature (1)..(430): Pfam Name: Glycosyl hydrolase family 9 Pfam Description: Glycosyl hydrolase family 9
  misc_feature (1)..(433): Homolog of NCBI NO: 25350173 NR Description: cellulase (EC 3.2.1.4) [imported] - Arabidopsis
  misc_feature (1)..(433): Homolog of NCBI NO: 15218612 NR Description: glycosyl hydrolase family 9 ATCEL2); protein id: At1g02800.1, supported by cDNA: gi_3132890
  misc_feature (1)..(433): Homolog of NCBI NO: 15235301 NR Description: glycosyl hydrolase family 9; protein id: supported by cDNA: gi_19310535, supported by cDNA: gi_20855940
  misc_feature (1)..(433): Homolog of NCBI NO: 11358947 NR Description: endo-1,3(4)-beta-glucanase (EC 3.2.1.6) - garden
  misc_feature (1)..(433): Homolog of NCBI NO: 1362091 NR Description: cellulase (EC 3.2.1.4) precursor - tomato
  misc_feature (1)..(433): Homolog of NCBI NO: 6009979 NR Description: endo-1,4-beta-glucanase [Pisum sativum]
  misc_feature (1)..(433): Homolog of NCBI NO: 34894544 NR Description: putative endo-1,3(4)-beta-glucanase [Oryza sativa
  misc_feature (1)..(433): Homolog of NCBI NO: 7484476 NR Description: cellulase (EC 3.2.1.4) 1 precursor - Monterey pine
  misc_feature (1)..(433): Homolog of NCBI NO: 11357128 NR Description: cellulase (EC 3.2.1.4) 2 precursor - Monterey pine
  misc_feature (1)..(431): Homolog of NCBI NO: 4691450 NR Description: endo-1,4-beta glucanase [Populus alba]
MTWRSNSGLSDGSALNVDLVGGYYDAGDNMKFGFPMAFTTTMLSWSLIEFGGLMKSELPNAKDAIRWATDFLLKATSHPDTIYVQVGDPNMDHACWERPEDMDTPRSVFKVDKNNPGSDIAGEIAAALAAASIVFRKCDPSYSNHLLQRAITVFTFADKYRGPYSAGLAPEVCPFYCSYSGYQDELLWGAAWLQKATNNPTYLNYIKANGQILGADEFDNMFSWDNKHVGARILLSKEFLIQKVKSLEEYKEHADSFICSVIPGASSSQYTPGGLLFKMGESNMQYVTSTSFLLLTYAKYLTSARTVAYCGGSVVTPARLRSIAKKQVDYLLGGNPLKMSYMVGYGLKYPRRIHHRGSSLPSVAVHPTRIQCHDGFSLFTSQSPNPNDLVGAVVGGPDQNDQFPDERSDYGRSEPATYINAPLVGALAYLARS

SEQ ID NO: 76144 - DNA, 1899 bp, Arabidopsis thaliana
  misc_feature (1)..(1899): Ceres Seq. ID no. 7106710
  misc_feature: MA Experiment ID: 108434 Result: Up-regulated in Transcription
  misc_feature: MA Experiment 108434 PARAMETER Experiment Name: At_Root_Tips_cDNA_P Parameter: Tissue Value: Root Tips
  misc_feature: MA Experiment ID: 108585 Result: Up-regulated in Transcription
  misc_feature: MA Experiment 108585 PARAMETER Experiment Name: At_5mM_NaNP_cDNA_P Parameter: Timepoint (hr) Value: 6
  misc_feature: MA Experiment 108585 PARAMETER Experiment Name: At_5mM_NaNP_cDNA_P Parameter: Tissue Value: Aerial
  misc_feature: MA Experiment 108585 PARAMETER Experiment Name: At_5mM_NaNP_cDNA_P Parameter: Treatment Value: null
  misc_feature: MA Experiment ID: 20000069 Result: Down-regulated in Transcription
  misc_feature: MA Experiment 20000069 PARAMETER Experiment Name: At_100uM_ABA_Mutants_cDNA_P Parameter: Plant Line Value: CS23
  misc_feature: MA Experiment 20000069 PARAMETER Experiment Name: At_100uM_ABA_Mutants_cDNA_P Parameter: Timepoint (hr) Value: 6
  misc_feature: MA Experiment 20000069 PARAMETER Experiment Name: At_100uM_ABA_Mutants_cDNA_P Parameter: Tissue Value: Aerial
  misc_feature: MA Experiment 20000069 PARAMETER Experiment Name: At_100uM_ABA_Mutants_cDNA_P Parameter: Treatment Value: 100uM ABA vs. No Treatment
  misc_feature: MA Experiment ID: 20000113 Result: Down-regulated in Transcription
  misc_feature: MA Experiment 20000113 PARAMETER Experiment Name: At_42deg_Heat_cDNA_P Parameter: Temperature (deg C) Value: 42 vs. 22
  misc_feature: MA Experiment 20000113 PARAMETER Experiment Name: At_42deg_Heat_cDNA_P Parameter: Timepoint (hr) Value: 8
  misc_feature: MA Experiment 20000113 PARAMETER Experiment Name: At_42deg_Heat_cDNA_P Parameter: Tissue Value: Aerial
  misc_feature: MA Experiment ID: 20000224 Result: Down-regulated in Transcription
  misc_feature: Pfam Name: p450 Pfam Description: Cytochrome P450
cgatgatgaagataccccaccaaacccaaaaaaagagatctctcgaggatccgaattcgcggccgcgtcgacgcgaaagcgacgatttcttctccatcgtgagagcaaatctccagagccgttttctcttcttcttcttcctcctcgtgccgtctctgaaactccatcatcgtatcaatcaaattgcttcctcctccaaattgaaaaacaatggaattggattcggagaacaaattgttgaagacgggtttggttatagtggcgacacttgttatagccaaactcatcttctctttcttcacttctgattctaagaagaagcgtcttcctcctactcttaaagcttggcctccattggttggaagtcttatcaaattcttgaaaggacctattattatgcttagagaggaataccctaagcttggaagtgtgtttactgttaatcttgttcacaaaaagattacttttcttattggtcctgaagtctctgctcattttttcaaagcttctgaatctgatcttagtcagcaggaagtgtatcagttcaatgtccctacttttggtcctggagttgttttcgatgttgattattctgttcgtcaggagcagtttcggttcttcactgaggcacttagagttaacaagttgaagggttatgtggatatgatggttactgaagctgaggattacttctctaaatggggagagagtggtgaagttgatattaaggttgagctagagaggctcatcatcttgactgcaagtagatgtttactgggtcgagaagttcgtgatcagctttttgatgatgtctctgctttgttccatgaccttgacaatggaatgcttcccatcagtgttctcttcccatatctcccaattccagctcaccgccgtcgtgaccgtgcccgagaaaagctttcggagattttcgcaaaaatcattgggtcgagaaaacgctctggaaaaacagagaacgacatgctgcagtgtttcatcgaatcaaagtacaaagatggtagacagacaaccgaatctgaagtcactggtttgctcattgctgctctgtttgcaggacaacacacgagctctatcacttccacctggaccggtgcttatctgatgcgatacaaagagtacttctcagctgctcttgatgagcagaagaacctgattgcgaaacatggagacaagatcgatcatgatatcttatccgagatggatgttctctaccgctgcattaaggaagcgttgaggcttcaccctccactcatcatgttaatgagagcctcgcacagtgatttcagcgtgacagctcgggatggaaaaacttacgatatcccaaagggtcacatcgttgcaacctcccctgcatttgccaaccgcttaccgcacatcttcaaagaccccgacacctacgacccagaaagattctcccctggaagagaagaggacaaagccgcaggggcattctcgtacattgcattcggagggggaaggcacgggtgccttggagagccgtttgcttacctgcagatcaaagccatatggagtcatttgttgaggaacttcgagcttgagctagtttcaccgttccctgagattgactggaacgctatggtggttggagttaaaggcaatgtgatggtgcgttacaagaggcgccagctttcttaaagacaagtttaaggttattgcagctttggatttttctctctggtttctgctttgcttttgtccctctctggttttagttttgttgttgaataattcttctgtttttataaactgttgttactctttaattgaaaaaaaaaaaaaaaaaaaaaaaaaaaaagggcggccgctctagaggaaccaagctacgtacgcgtgcatgcgacgtcatagctcttctat

SEQ ID NO: 76145 - protein, 488 aa, Arabidopsis thaliana; identical to SEQ ID NO: 39837
  peptide (1)..(488): Ceres Seq. ID no. 7106711
  misc_feature: Pfam Name: p450 Pfam Description: Cytochrome P450
  misc_feature (1)..(488): Homolog of NCBI NO: 15221075 NR Description: putative obtusifoliol 14-alpha demethylase; id: At1g11680.1, supported by cDNA: 110306., supported by cDNA: supported by cDNA: gi_15292852, supported by cDNA:
  misc_feature (1)..(488): Homolog of NCBI NO: 18000074 NR Description: obtusifoliol-14-demethylase [Nicotiana tabacum]
  misc_feature (1)..(488): Homolog of NCBI NO: 27461067 NR Description: obtusifoliol-14-demethylase [Nicotiana tabacum]
  misc_feature (6)..(487): Homolog of NCBI NO: 27542762 NR Description: cytochrome P450-like protein [Sorghum bicolor]
  misc_feature (6)..(487): Homolog of NCBI NO: 5921924 NR Description: Cytochrome P450 51 (CYPL1) (P450-L1A1)
  misc_feature (38)..(487): Homolog of NCBI NO: 6166036 NR Description: Cytochrome P450 51 (CYPL1) (P450-L1A1)
  misc_feature (65)..(487): Homolog of NCBI NO: 4586676 NR Description: sterol 14-demethylase [Oryza sativa (japonica
  misc_feature (9)..(488): Homolog of NCBI NO: 15227817 NR Description: putative obtusifoliol 14-alpha demethylase; id: At2g17330.1 [Arabidopsis thaliana] >gi|25282617|pir||H84550
  misc_feature (179)..(487): Homolog of NCBI NO: 7489685 NR Description: probable obtusifoliol 14-alpha-demethylase CYP51
  misc_feature (1)..(485): Homolog of NCBI NO: 6978751 NR Description: cytochrome P450, subfamily 51; Cytochrom P450

SEQ ID NO: 76146 - protein, 426 aa, Arabidopsis thaliana; identical to SEQ ID NO: 39838
  peptide (1)..(426): Ceres Seq. ID no. 7106712
  misc_feature: Pfam Name: p450 Pfam Description: Cytochrome P450
  misc_feature (1)..(426): Homolog of NCBI NO: 15221075 NR Description: putative obtusifoliol 14-alpha demethylase; id: At1g11680.1, supported by cDNA: 110306., supported by cDNA: supported by cDNA: gi_15292852, supported by cDNA:
  misc_feature (1)..(426): Homolog of NCBI NO: 18000074 NR Description: obtusifoliol-14-demethylase [Nicotiana tabacum]
  misc_feature (1)..(426): Homolog of NCBI NO: 27461067 NR Description: obtusifoliol-14-demethylase [Nicotiana tabacum]
  misc_feature (1)..(425): Homolog of NCBI NO: 27542762 NR Description: cytochrome P450-like protein [Sorghum bicolor]
  misc_feature (1)..(425): Homolog of NCBI NO: 5921924 NR Description: Cytochrome P450 51 (CYPL1) (P450-L1A1)
  misc_feature (1)..(425): Homolog of NCBI NO: 6166036 NR Description: Cytochrome P450 51 (CYPL1) (P450-L1A1)
  misc_feature (3)..(425): Homolog of NCBI NO: 4586676 NR Description: sterol 14-demethylase [Oryza sativa (japonica
  misc_feature (1)..(426): Homolog of NCBI NO: 15227817 NR Description: putative obtusifoliol 14-alpha demethylase; id: At2g17330.1 [Arabidopsis thaliana] >gi|25282617|pir||H84550
  misc_feature (117)..(425): Homolog of NCBI NO: 7489685 NR Description: probable obtusifoliol 14-alpha-demethylase CYP51
  misc_feature (1)..(423): Homolog of NCBI NO: 6978751 NR Description: cytochrome P450, subfamily 51; Cytochrom P450

SEQ ID NO: 76147 - protein, 337 aa, Arabidopsis thaliana; identical to SEQ ID NO: 39839
  peptide (1)..(337): Ceres Seq. ID no. 7106713
  misc_feature: Pfam Name: p450 Pfam Description: Cytochrome P450
  misc_feature (1)..(337): Homolog of NCBI NO: 15221075 NR Description: putative obtusifoliol 14-alpha demethylase; id: At1g11680.1, supported by cDNA: 110306., supported by cDNA: supported by cDNA: gi_15292852, supported by cDNA:
  misc_feature (1)..(337): Homolog of NCBI NO: 18000074 NR Description: obtusifoliol-14-demethylase [Nicotiana tabacum]
  misc_feature (1)..(337): Homolog of NCBI NO: 27461067 NR Description: obtusifoliol-14-demethylase [Nicotiana tabacum]
  misc_feature (1)..(336): Homolog of NCBI NO: 27542762 NR Description: cytochrome P450-like protein [Sorghum bicolor]
  misc_feature (1)..(336): Homolog of NCBI NO: 5921924 NR Description: Cytochrome P450 51 (CYPL1) (P450-L1A1)
  misc_feature (1)..(336): Homolog of NCBI NO: 6166036 NR Description: Cytochrome P450 51 (CYPL1) (P450-L1A1)
  misc_feature (1)..(336): Homolog of NCBI NO: 4586676 NR Description: sterol 14-demethylase [Oryza sativa (japonica
  misc_feature (1)..(337): Homolog of NCBI NO: 15227817 NR Description: putative obtusifoliol 14-alpha demethylase; id: At2g17330.1 [Arabidopsis thaliana] >gi|25282617|pir||H84550
  misc_feature (28)..(336): Homolog of NCBI NO: 7489685 NR Description: probable obtusifoliol 14-alpha-demethylase CYP51
  misc_feature (1)..(334): Homolog of NCBI NO: 6978751 NR Description: cytochrome P450, subfamily 51; Cytochrom P450

SEQ ID NO: 76148 - DNA, 1048 bp, Arabidopsis thaliana
  misc_feature (1)..(1048): Ceres Seq. ID no. 7106757
  misc_feature: MA Experiment ID: 20000180 Result: Up-regulated in Transcription
  misc_feature: MA Experiment 20000180 PARAMETER Experiment Name: At_Germinating_Seeds_P Parameter: Age (hr) Value: 24 vs. 0
  misc_feature: MA Experiment 20000180 PARAMETER Experiment Name: At_Germinating_Seeds_P Parameter: Tissue Value: Germinating Seeds
  misc_feature: MA Experiment ID: 20000264 Result: Down-regulated in Transcription
  misc_feature: MA Experiment 20000264 PARAMETER Experiment Name: At_Open_Flower_P Parameter: Age (day) Value: 21
  misc_feature: MA Experiment 20000264 PARAMETER Experiment Name: At_Open_Flower_P Parameter: Plant Line Value: WS
  misc_feature: MA Experiment 20000264 PARAMETER Experiment Name: At_Open_Flower_P Parameter: Tissue Value: Open Flower vs. Whole Plant
  misc_feature: MA Experiment ID: 20000265 Result: Down-regulated in Transcription
  misc_feature: MA Experiment 20000265 PARAMETER Experiment Name: At_Open_Flower_P Parameter: Age (day) Value: 21
  misc_feature: MA Experiment 20000265 PARAMETER Experiment Name: At_Open_Flower_P Parameter: Plant Line Value: WS
  misc_feature: MA Experiment 20000265 PARAMETER Experiment Name: At_Open_Flower_P Parameter: Tissue Value: Closed Flower vs. Whole Plant
  misc_feature: MA Experiment ID: 20000437 Result: Down-regulated in Transcription
  misc_feature: MA Experiment 20000437 PARAMETER Experiment Name: At_Drought_P Parameter: Age (day) Value: 8
  misc_feature: MA Experiment 20000437 PARAMETER Experiment Name: At_Drought_P Parameter: Organism Value: A. thaliana
  misc_feature: MA Experiment 20000437 PARAMETER Experiment Name: At_Drought_P Parameter: Plant Line Value: WS
  misc_feature: MA Experiment 20000437 PARAMETER Experiment Name: At_Drought_P Parameter: Timepoint (hr) Value: 24
  misc_feature: MA Experiment 20000437 PARAMETER Experiment Name: At_Drought_P Parameter: Tissue Value: Whole Plant
  misc_feature: MA Experiment 20000437 PARAMETER Experiment Name: At_Drought_P Parameter: Treatment Value: Drought vs. No Drought
  misc_feature: MA Experiment ID: 20000441 Result: Up-regulated in Transcription
  misc_feature: MA Experiment 20000441 PARAMETER Experiment Name: At_1uM_BR-BRZ__P Parameter: Tissue Value: Shoot Apices
  misc_feature: MA Experiment 20000441 PARAMETER Experiment Name: At_1uM_BR-BRZ__P Parameter: Treatment Value: 1uM BR vs. No Treatment
  misc_feature: MA Experiment ID: 20000445 Result: Down-regulated in Transcription
  misc_feature: MA Experiment 20000445 PARAMETER Experiment Name: At_100uM_NAA__P Parameter: Age (day) Value: 14
  misc_feature: MA Experiment 20000445 PARAMETER Experiment Name: At_100uM_NAA__P Parameter: Organism Value: A. thaliana
  misc_feature: MA Experiment 20000445 PARAMETER Experiment Name: At_100uM_NAA__P Parameter: Plant Line Value: WS
  misc_feature: MA Experiment 20000445 PARAMETER Experiment Name: At_100uM_NAA__P Parameter: Timepoint (hr) Value: 6
  misc_feature: MA Experiment 20000445 PARAMETER Experiment Name: At_100uM_NAA__P Parameter: Tissue Value: Aerial
  misc_feature: MA Experiment 20000445 PARAMETER Experiment Name: At_100uM_NAA__P Parameter: Treatment Value: 100uM NAA vs. No Treatment
  misc_feature: MA Experiment ID: 20001450 Result: Up-regulated in Transcription
  misc_feature: MA Experiment 20001450 PARAMETER Experiment Name: At_Far-red-induction_P Parameter: Age (day) Value: 7
  misc_feature: MA Experiment 20001450 PARAMETER Experiment Name: At_Far-red-induction_P Parameter: Light Value: Far-red vs. White
  misc_feature: MA Experiment 20001450 PARAMETER Experiment Name: At_Far-red-induction_P Parameter: Organism Value: A. thaliana
  misc_feature: MA Experiment 20001450 PARAMETER Experiment Name: At_Far-red-induction_P Parameter: Plant Line Value: Columbia
  misc_feature: MA Experiment 20001450 PARAMETER Experiment Name: At_Far-red-induction_P Parameter: Timepoint (hr) Value: 8
  misc_feature: MA Experiment 20001450 PARAMETER Experiment Name: At_Far-red-induction_P Parameter: Tissue Value: Whole Plant
  misc_feature: MA Experiment ID: 20001451 Result: Up-regulated in Transcription
  misc_feature: MA Experiment 20001451 PARAMETER Experiment Name: At_Far-red-induction_P Parameter: Age (day) Value: 7
  misc_feature: MA Experiment 20001451 PARAMETER Experiment Name: At_Far-red-induction_P Parameter: Light Value: Far-red vs. White
  misc_feature: MA Experiment 20001451 PARAMETER Experiment Name: At_Far-red-induction_P Parameter: Organism Value: A. thaliana
  misc_feature: MA Experiment 20001451 PARAMETER Experiment Name: At_Far-red-induction_P Parameter: Plant Line Value: Columbia
  misc_feature: MA Experiment 20001451 PARAMETER Experiment Name: At_Far-red-induction_P Parameter: Timepoint (hr) Value: 24
  misc_feature: MA Experiment 20001451 PARAMETER Experiment Name: At_Far-red-induction_P Parameter: Tissue Value: Whole Plant
  misc_feature: MA Experiment ID: 20001555 Result: Down-regulated in Transcription
  misc_feature: MA Experiment 20001555 PARAMETER Experiment Name: At_Drought_Soil_Dry_P Parameter: Age (day) Value: 24
  misc_feature: MA Experiment 20001555 PARAMETER Experiment Name: At_Drought_Soil_Dry_P Parameter: Organism Value: A. thaliana
  misc_feature: MA Experiment 20001555 PARAMETER Experiment Name: At_Drought_Soil_Dry_P Parameter: Plant Line Value: WS
  misc_feature: MA Experiment 20001555 PARAMETER Experiment Name: At_Drought_Soil_Dry_P Parameter: Post Timepoint (hr) Value: None
  misc_feature: MA Experiment 20001555 PARAMETER Experiment Name: At_Drought_Soil_Dry_P Parameter: Post-Treatment Value: None
  misc_feature: MA Experiment 20001555 PARAMETER Experiment Name: At_Drought_Soil_Dry_P Parameter: Timepoint (day) Value: 10
  misc_feature: MA Experiment 20001555 PARAMETER Experiment Name: At_Drought_Soil_Dry_P Parameter: Treatment Value: Drought vs. No Drought
  misc_feature: MA Experiment ID: 20001556 Result: Down-regulated in Transcription
  misc_feature: MA Experiment 20001556 PARAMETER Experiment Name: At_Drought_Soil_Dry_P Parameter: Age (day) Value: 26
  misc_feature: MA Experiment 20001556 PARAMETER Experiment Name: At_Drought_Soil_Dry_P Parameter: Organism Value: A. thaliana
  misc_feature: MA Experiment 20001556 PARAMETER Experiment Name: At_Drought_Soil_Dry_P Parameter: Plant Line Value: WS
  misc_feature: MA Experiment 20001556 PARAMETER Experiment Name: At_Drought_Soil_Dry_P Parameter: Post Timepoint (hr) Value: None
  misc_feature: MA Experiment 20001556 PARAMETER Experiment Name: At_Drought_Soil_Dry_P Parameter: Post-Treatment Value: None
  misc_feature: MA Experiment 20001556 PARAMETER Experiment Name: At_Drought_Soil_Dry_P Parameter: Timepoint (day) Value: 12
  misc_feature: MA Experiment 20001556 PARAMETER Experiment Name: At_Drought_Soil_Dry_P Parameter: Treatment Value: Drought vs. No Drought
  misc_feature: MA Experiment ID: 20001557 Result: Down-regulated in Transcription
  misc_feature: MA Experiment 20001557 PARAMETER Experiment Name: At_Drought_Soil_Dry_P Parameter: Age (day) Value: 27
  misc_feature: MA Experiment 20001557 PARAMETER Experiment Name: At_Drought_Soil_Dry_P Parameter: Organism Value: A. thaliana
  misc_feature: MA Experiment 20001557 PARAMETER Experiment Name: At_Drought_Soil_Dry_P Parameter: Plant Line Value: WS
  misc_feature: MA Experiment 20001557 PARAMETER Experiment Name: At_Drought_Soil_Dry_P Parameter: Post Timepoint (hr) Value: 3
  misc_feature: MA Experiment 20001557 PARAMETER Experiment Name: At_Drought_Soil_Dry_P Parameter: Post-Treatment Value: Re-Water vs. No Drought
  misc_feature: MA Experiment 20001557 PARAMETER Experiment Name: At_Drought_Soil_Dry_P Parameter: Timepoint (day) Value: 13
  misc_feature: MA Experiment 20001557 PARAMETER Experiment Name: At_Drought_Soil_Dry_P Parameter: Treatment Value: Drought vs. No Drought
  misc_feature: MA Experiment ID: 20001559 Result: Down-regulated in Transcription
  misc_feature: MA Experiment 20001559 PARAMETER Experiment Name: At_Drought_Soil_Dry_P Parameter: Age (day) Value: 28
  misc_feature: MA Experiment 20001559 PARAMETER Experiment Name: At_Drought_Soil_Dry_P Parameter: Organism Value: A. thaliana
  misc_feature: MA Experiment 20001559 PARAMETER Experiment Name: At_Drought_Soil_Dry_P Parameter: Plant Line Value: WS
  misc_feature: MA Experiment 20001559 PARAMETER Experiment Name: At_Drought_Soil_Dry_P Parameter: Post Timepoint (hr) Value: 29
  misc_feature: MA Experiment 20001559 PARAMETER Experiment Name: At_Drought_Soil_Dry_P Parameter: Post-Treatment Value: Re-Water vs. No Drought
  misc_feature: MA Experiment 20001559 PARAMETER Experiment Name: At_Drought_Soil_Dry_P Parameter: Timepoint (day) Value: 14
  misc_feature: MA Experiment 20001559 PARAMETER Experiment Name: At_Drought_Soil_Dry_P Parameter: Treatment Value: Drought vs. No Drought
  misc_feature: MA Experiment ID: 20001757 Result: Up-regulated in Transcription
  misc_feature: MA Experiment 20001757 PARAMETER Experiment Name: At_50mM_NH4NO3_L-to-H_P Parameter: Timepoint (hr) Value: 6
  misc_feature: MA Experiment 20001757 PARAMETER Experiment Name: At_50mM_NH4NO3_L-to-H_P Parameter: Tissue Value: Leaf
  misc_feature: MA Experiment 20001757 PARAMETER Experiment Name: At_50mM_NH4NO3_L-to-H_P Parameter: Treatment Value: 50mM NH4NO3 vs 100mM Mannitol
  misc_feature: MA Experiment ID: 20001905 Result: Down-regulated in Transcription
  misc_feature: MA Experiment 20001905 PARAMETER Experiment Name: At_Drought_Reproduction_P Parameter: Age (day) Value: 40
  misc_feature: MA Experiment 20001905 PARAMETER Experiment Name: At_Drought_Reproduction_P Parameter: Organism Value: A. thaliana
  misc_feature: MA Experiment 20001905 PARAMETER Experiment Name: At_Drought_Reproduction_P Parameter: Plant Line Value: WS
  misc_feature: MA Experiment 20001905 PARAMETER Experiment Name: At_Drought_Reproduction_P Parameter: Timepoint (day) Value: 10
  misc_feature: MA Experiment 20001905 PARAMETER Experiment Name: At_Drought_Reproduction_P Parameter: Tissue Value: Rosettes
  misc_feature: MA Experiment 20001905 PARAMETER Experiment Name: At_Drought_Reproduction_P Parameter: Treatment Value: Drought vs. No Drought
  misc_feature: MA Experiment ID: 20001907 Result: Down-regulated in Transcription
  misc_feature: MA Experiment 20001907 PARAMETER Experiment Name: At_Drought_Reproduction_P Parameter: Age (day) Value: 37
  misc_feature: MA Experiment 20001907 PARAMETER Experiment Name: At_Drought_Reproduction_P Parameter: Organism Value: A. thaliana
  misc_feature: MA Experiment 20001907 PARAMETER Experiment Name: At_Drought_Reproduction_P Parameter: Plant Line Value: WS
  misc_feature: MA Experiment 20001907 PARAMETER Experiment Name: At_Drought_Reproduction_P Parameter: Timepoint (day) Value: 7
  misc_feature: MA Experiment 20001907 PARAMETER Experiment Name: At_Drought_Reproduction_P Parameter: Tissue Value: Siliques
  misc_feature: MA Experiment 20001907 PARAMETER Experiment Name: At_Drought_Reproduction_P Parameter: Treatment Value: Drought vs. No Drought
  misc_feature: MA Experiment ID: 20001911 Result: Down-regulated in Transcription
  misc_feature: MA Experiment 20001911 PARAMETER Experiment Name: At_Drought_Reproduction_P Parameter: Age (day) Value: 40
  misc_feature: MA Experiment 20001911 PARAMETER Experiment Name: At_Drought_Reproduction_P Parameter: Organism Value: A. thaliana
  misc_feature: MA Experiment 20001911 PARAMETER Experiment Name: At_Drought_Reproduction_P Parameter: Plant Line Value: WS
  misc_feature: MA Experiment 20001911 PARAMETER Experiment Name: At_Drought_Reproduction_P Parameter: Timepoint (day) Value: 10
  misc_feature: MA Experiment 20001911 PARAMETER Experiment Name: At_Drought_Reproduction_P Parameter: Tissue Value: Flowers
  misc_feature: MA Experiment 20001911 PARAMETER Experiment Name: At_Drought_Reproduction_P Parameter: Treatment Value: Drought vs. No Drought
  misc_feature: Pfam Name: MIP Pfam Description: Major intrinsic protein
agctttctccgatcatgccgaccagaaacatcgccattggtggagtccaagaagaggtctatcaccccaacgcacttagggcggcgctcgctgagtttatctcgactttgatcttcgtcttcgccggctcaggctccggaattgctttcaacaagatcactgacaatggagcaaccactccttccggcctcgtcgccgctgccttagctcatgctttcggtctctttgtcgctgtctctgttggcgctaacattgccgctgccttagctcatgctttcggtctctttgtcgctgtctctgttggcgctaacatttccggtggccacgttaaccctgccgttaccttcggtgttttactcggtgggaacatcactctcctccgtggtattctctactggattgctcagcttcttggctccgtcgccgcttgtttcctccttagctttgccaccggtggcgagccaattccagcgttcggtctctctgccggagtcggatcattaaacgctctcgtcttcgagatcgtgatgaccttcgggctcgtctacaccgtctacgccacagccgttgaccccaagaacggtagtctcggaacaatcgcaccaatcgccataggtttcatcgttggagctaacatcctcgccggtggagctttcagcggagcttccatgaacccagccgttgctttcggaccagccgtcgtaagctggacgtggaccaaccactgggtttactgggctggtcctcttattggtggtggactcgccggaattatctacgactttgtcttcatcgatgaaaatgcccacgagcaattgcctaccaccgattactgaagacgtcaaattcaacgttgttaatctgatgaatttttcgtgatttgcttttttaatttgcatcgtaatgggtttctggccgttggatcatttttagatgaatctttgtctattgattgatcatttatgtgtctttgggtttgttgttggagttgtaatatctctggaaggcttttgtgcaattgtattgtacggtttaataactataattg

SEQ ID NO: 76149 - protein, 277 aa, Arabidopsis thaliana
  peptide (1)..(277): Ceres Seq. ID no. 7106758
  misc_feature: Pfam Name: MIP Pfam Description: Major intrinsic protein
  misc_feature (5)..(277): Homolog of NCBI NO: 2246621 NR Description: salt-stress induced tonoplast intrinsic protein
  misc_feature (84)..(277): Homolog of NCBI NO: 15231569 NR Description: gamma tonoplast intrinsic protein; protein id: supported by cDNA: gi_16226820, supported by cDNA: gi_16930518, by cDNA: gi_19310528, supported by cDNA: gi_3688798
  misc_feature (84)..(277): Homolog of NCBI NO: 11357300 NR Description: gamma tonoplast intrinsic protein 2 [imported] - thaliana >gi|3688799|gb|AAC62397.1| gamma tonoplast intrinsic
  misc_feature (84)..(277): Homolog of NCBI NO: 5081419 NR Description: tonoplast intrinsic protein [Brassica napus]
  misc_feature (84)..(277): Homolog of NCBI NO: 1514977 NR Description: VM23 [Raphanus sativus]
  misc_feature (84)..(277): Homolog of NCBI NO: 475048 NR Description: tonoplast intrinsic protein gamma (gamma-TIP)
  misc_feature (84)..(277): Homolog of NCBI NO: 21593151 NR Description: putative aquaporin (tonoplast intrinsic protein
  misc_feature (84)..(277): Homolog of NCBI NO: 15228041 NR Description: putative aquaporin (tonoplast intrinsic protein protein id: At2g36830.1, supported by cDNA: 36633., supported by gi_13877818, supported by cDNA: gi_16323491 [Arabidopsis
  misc_feature (84)..(277): Homolog of NCBI NO: 22858917 NR Description: tonoplast intrinsic protein bobTIP26-2 [Brassica
  misc_feature (84)..(277): Homolog of NCBI NO: 21284370 NR Description: tonoplast intrinsic protein bobTIP26-1 [Brassica
LSPIMPTRNIAIGGVQEEVYHPNALRAALAEFISTLIFVFAGSGSGIAFNKITDNGATTPSGLVAAALAHAFGLFVAVSVGANIAAALAHAFGLFVAVSVGANISGGHVNPAVTFGVLLGGNITLLRGILYWIAQLLGSVAACFLLSFATGGEPIPAFGLSAGVGSLNALVFEIVMTFGLVYTVYATAVDPKNGSLGTIAPIAIGFIVGANILAGGAFSGASMNPAVAFGPAVVSWTWTNHWVYWAGPLIGGGLAGIIYDFVFIDENAHEQLPTTDY

SEQ ID NO: 76150 - protein, 273 aa, Arabidopsis thaliana
  peptide (1)..(273): Ceres Seq. ID no. 7106759
  misc_feature: Pfam Name: MIP Pfam Description: Major intrinsic protein
  misc_feature (1)..(273): Homolog of NCBI NO: 2246621 NR Description: salt-stress induced tonoplast intrinsic protein
  misc_feature (80)..(273): Homolog of NCBI NO: 15231569 NR Description: gamma tonoplast intrinsic protein; protein id: supported by cDNA: gi_16226820, supported by cDNA: gi_16930518, by cDNA: gi_19310528, supported by cDNA: gi_3688798
  misc_feature (80)..(273): Homolog of NCBI NO: 11357300 NR Description: gamma tonoplast intrinsic protein 2 [imported] - thaliana >gi|3688799|gb|AAC62397.1| gamma tonoplast intrinsic
  misc_feature (80)..(273): Homolog of NCBI NO: 5081419 NR Description: tonoplast intrinsic protein [Brassica napus]
  misc_feature (80)..(273): Homolog of NCBI NO: 1514977 NR Description: VM23 [Raphanus sativus]
  misc_feature (80)..(273): Homolog of NCBI NO: 475048 NR Description: tonoplast intrinsic protein gamma (gamma-TIP)
  misc_feature (80)..(273): Homolog of NCBI NO: 21593151 NR Description: putative aquaporin (tonoplast intrinsic protein
  misc_feature (80)..(273): Homolog of NCBI NO: 15228041 NR Description: putative aquaporin (tonoplast intrinsic protein protein id: At2g36830.1, supported by cDNA: 36633., supported by gi_13877818, supported by cDNA: gi_16323491 [Arabidopsis
  misc_feature (80)..(273): Homolog of NCBI NO: 22858917 NR Description: tonoplast intrinsic protein bobTIP26-2 [Brassica
  misc_feature (80)..(273): Homolog of NCBI NO: 21284370 NR Description: tonoplast intrinsic protein bobTIP26-1 [Brassica
MPTRNIAIGGVQEEVYHPNALRAALAEFISTLIFVFAGSGSGIAFNKITDNGATTPSGLVAAALAHAFGLFVAVSVGANIAAALAHAFGLFVAVSVGANISGGHVNPAVTFGVLLGGNITLLRGILYWIAQLLGSVAACFLLSFATGGEPIPAFGLSAGVGSLNALVFEIVMTFGLVYTVYATAVDPKNGSLGTIAPIAIGFIVGANILAGGAFSGASMNPAVAFGPAVVSWTWTNHWVYWAGPLIGGGLAGIIYDFVFIDENAHEQLPTTDY

SEQ ID NO: 76151 - DNA, 1194 bp, Arabidopsis thaliana
  misc_feature (1)..(1194): Ceres Seq. ID no. 7106947
  misc_feature: MA Experiment ID: 108434 Result: Down-regulated in Transcription
  misc_feature: MA Experiment 108434 PARAMETER Experiment Name: At_Root_Tips_cDNA_P Parameter: Tissue Value: Root Tips
  misc_feature: MA Experiment ID: 108574 Result: Up-regulated in Transcription
  misc_feature: MA Experiment 108574 PARAMETER Experiment Name: At_Wounding__cDNA_P Parameter: Timepoint (hr) Value: 1
  misc_feature: MA Experiment 108574 PARAMETER Experiment Name: At_Wounding__cDNA_P Parameter: Tissue Value: Aerial
  misc_feature: MA Experiment 108574 PARAMETER Experiment Name: At_Wounding__cDNA_P Parameter: Treatment Value: Wounding vs. No Wounding
  misc_feature: MA Experiment ID: 108595 Result: Up-regulated in Transcription
  misc_feature: MA Experiment 108595 PARAMETER Experiment Name: At_Ler-pi_Ovule_cDNA_P Parameter: Plant Line Value: null
  misc_feature: MA Experiment ID: 108605 Result: Up-regulated in Transcription
  misc_feature: MA Experiment 108605 PARAMETER Experiment Name: At_100uM_ABA_cDNA_P Parameter: Timepoint (hr) Value: 6
  misc_feature: MA Experiment 108605 PARAMETER Experiment Name: At_100uM_ABA_cDNA_P Parameter: Tissue Value: Aerial
  misc_feature: MA Experiment 108605 PARAMETER Experiment Name: At_100uM_ABA_cDNA_P Parameter: Treatment Value: 100uM ABA vs. No Treatment
  misc_feature: MA Experiment ID: 108607 Result: Up-regulated in Transcription
  misc_feature: MA Experiment 108607 PARAMETER Experiment Name: At_100uM_ABA_cDNA_P Parameter: Timepoint (hr) Value: 4
  misc_feature: MA Experiment 108607 PARAMETER Experiment Name: At_100uM_ABA_cDNA_P Parameter: Tissue Value: Aerial
  misc_feature: MA Experiment 108607 PARAMETER Experiment Name: At_100uM_ABA_cDNA_P Parameter: Treatment Value: 100uM ABA vs. No Treatment
  misc_feature: MA Experiment ID: 108609 Result: Up-regulated in Transcription
  misc_feature: MA Experiment 108609 PARAMETER Experiment Name: At_100uM_ABA_cDNA_P Parameter: Timepoint (hr) Value: 24
  misc_feature: MA Experiment 108609 PARAMETER Experiment Name: At_100uM_ABA_cDNA_P Parameter: Tissue Value: Aerial
  misc_feature: MA Experiment 108609 PARAMETER Experiment Name: At_100uM_ABA_cDNA_P Parameter: Treatment Value: 100uM ABA vs. No Treatment
  misc_feature: MA Experiment ID: 108668 Result: Up-regulated in Transcription
  misc_feature: MA Experiment 108668 PARAMETER Experiment Name: At_2mM_SA_cDNA_P Parameter: Plant Line Value: WS
  misc_feature: MA Experiment 108668 PARAMETER Experiment Name: At_2mM_SA_cDNA_P Parameter: Timepoint (hr) Value: 6
  misc_feature: MA Experiment 108668 PARAMETER Experiment Name: At_2mM_SA_cDNA_P Parameter: Treatment Value: 2mM SA vs. No Treatment
  misc_feature: MA Experiment ID: 20000070 Result: Up-regulated in Transcription
  misc_feature: MA Experiment 20000070 PARAMETER Experiment Name: At_100uM_ABA_Mutants_cDNA_P Parameter: Plant Line Value: CS24
  misc_feature: MA Experiment 20000070 PARAMETER Experiment Name: At_100uM_ABA_Mutants_cDNA_P Parameter: Timepoint (hr) Value: 6
  misc_feature: MA Experiment 20000070 PARAMETER Experiment Name: At_100uM_ABA_Mutants_cDNA_P Parameter: Tissue Value: Aerial
  misc_feature: MA Experiment 20000070 PARAMETER Experiment Name: At_100uM_ABA_Mutants_cDNA_P Parameter: Treatment Value: 100uM ABA vs. No Treatment
  misc_feature: MA Experiment ID: 20000307 Result: Down-regulated in Transcription
  misc_feature: MA Experiment 20000307 PARAMETER Experiment Name: At_Germinating_Seeds_Sub_P Parameter: Age (hr) Value: 24 vs. 0
  misc_feature: MA Experiment 20000307 PARAMETER Experiment Name: At_Germinating_Seeds_Sub_P Parameter: Organism Value: A. thaliana
  misc_feature: MA Experiment 20000307 PARAMETER Experiment Name: At_Germinating_Seeds_Sub_P Parameter: Plant Line Value: WS
  misc_feature: MA Experiment 20000307 PARAMETER Experiment Name: At_Germinating_Seeds_Sub_P Parameter: Tissue Value: Germinating Seeds
  misc_feature: MA Experiment ID: 20000314 Result: Up-regulated in Transcription
  misc_feature: MA Experiment 20000314 PARAMETER Experiment Name: At_14day_Shoots-Roots_Sub_P Parameter: Age (day) Value: 14
  misc_feature: MA Experiment 20000314 PARAMETER Experiment Name: At_14day_Shoots-Roots_Sub_P Parameter: Organism Value: A. thaliana
  misc_feature: MA Experiment 20000314 PARAMETER Experiment Name: At_14day_Shoots-Roots_Sub_P Parameter: Plant Line Value: WS
  misc_feature: MA Experiment 20000314 PARAMETER Experiment Name: At_14day_Shoots-Roots_Sub_P Parameter: Tissue Value: Roots vs. Whole Plant
  misc_feature: MA Experiment ID: 20000346 Result: Up-regulated in Transcription
  misc_feature: MA Experiment 20000346 PARAMETER Experiment Name: At_2mM_SA_Sub_P Parameter: Age (day) Value: 14
  misc_feature: MA Experiment 20000346 PARAMETER Experiment Name: At_2mM_SA_Sub_P Parameter: Organism Value: A. thaliana
  misc_feature: MA Experiment 20000346 PARAMETER Experiment Name: At_2mM_SA_Sub_P Parameter: Plant Line Value: WS
  misc_feature: MA Experiment 20000346 PARAMETER Experiment Name: At_2mM_SA_Sub_P Parameter: Timepoint (hr) Value: 1
  misc_feature: MA Experiment 20000346 PARAMETER Experiment Name: At_2mM_SA_Sub_P Parameter: Tissue Value: Aerial
  misc_feature: MA Experiment 20000346 PARAMETER Experiment Name: At_2mM_SA_Sub_P Parameter: Treatment Value: 2mM SA vs. No Treatment
  misc_feature: MA Experiment ID: 20000347 Result: Up-regulated in Transcription
  misc_feature: MA Experiment 20000347 PARAMETER Experiment Name: At_2mM_SA_Sub_P Parameter: Age (day) Value: 14
  misc_feature: MA Experiment 20000347 PARAMETER Experiment Name: At_2mM_SA_Sub_P Parameter: Organism Value: A. thaliana
  misc_feature: MA Experiment 20000347 PARAMETER Experiment Name: At_2mM_SA_Sub_P Parameter: Plant Line Value: WS
  misc_feature: MA Experiment 20000347 PARAMETER Experiment Name: At_2mM_SA_Sub_P Parameter: Timepoint (hr) Value: 6
  misc_feature: MA Experiment 20000347 PARAMETER Experiment Name: At_2mM_SA_Sub_P Parameter: Tissue Value: Aerial
  misc_feature: MA Experiment 20000347 PARAMETER Experiment Name: At_2mM_SA_Sub_P Parameter: Treatment Value: 2mM SA vs. No Treatment
  misc_feature: MA Experiment ID: 20000348 Result: Up-regulated in Transcription
  misc_feature: MA Experiment 20000348 PARAMETER Experiment Name: At_100uM_ABA_Sub_P Parameter: Age (day) Value: 14
  misc_feature: MA Experiment 20000348 PARAMETER Experiment Name: At_100uM_ABA_Sub_P Parameter: Organism Value: A. thaliana
  misc_feature: MA Experiment 20000348 PARAMETER Experiment Name: At_100uM_ABA_Sub_P Parameter: Plant Line Value: WS
  misc_feature: MA Experiment 20000348 PARAMETER Experiment Name: At_100uM_ABA_Sub_P Parameter: Timepoint (hr) Value: 1
  misc_feature: MA Experiment 20000348 PARAMETER Experiment Name: At_100uM_ABA_Sub_P Parameter: Tissue Value: Aerial
  misc_feature: MA Experiment 20000348 PARAMETER Experiment Name: At_100uM_ABA_Sub_P Parameter: Treatment Value: 100uM ABA vs. No Treatment
  misc_feature: MA Experiment ID: 20000349 Result: Up-regulated in Transcription
  misc_feature: MA Experiment 20000349 PARAMETER Experiment Name: At_100uM_ABA_Sub_P Parameter: Age (day) Value: 14
  misc_feature: MA Experiment 20000349 PARAMETER Experiment Name: At_100uM_ABA_Sub_P Parameter: Organism Value: A. thaliana
  misc_feature: MA Experiment 20000349 PARAMETER Experiment Name: At_100uM_ABA_Sub_P Parameter: Plant Line Value: WS
  misc_feature: MA Experiment 20000349 PARAMETER Experiment Name: At_100uM_ABA_Sub_P Parameter: Timepoint (hr) Value: 6
  misc_feature: MA Experiment 20000349 PARAMETER Experiment Name: At_100uM_ABA_Sub_P Parameter: Tissue Value: Aerial
  misc_feature: MA Experiment 20000349 PARAMETER Experiment Name: At_100uM_ABA_Sub_P Parameter: Treatment Value: 100uM ABA vs. No Treatment
  misc_feature: MA Experiment ID: 20000352 Result: Up-regulated in Transcription
  misc_feature: MA Experiment 20000352 PARAMETER Experiment Name: At_Drought_Sub_P Parameter: Age (day) Value: 7
  misc_feature: MA Experiment 20000352 PARAMETER Experiment Name: At_Drought_Sub_P Parameter: Organism Value: A. thaliana
  misc_feature: MA Experiment 20000352 PARAMETER Experiment Name: At_Drought_Sub_P Parameter: Plant Line Value: WS
  misc_feature: MA Experiment 20000352 PARAMETER Experiment Name: At_Drought_Sub_P Parameter: Timepoint (hr) Value: 6
  misc_feature: MA Experiment 20000352 PARAMETER Experiment Name: At_Drought_Sub_P Parameter: Tissue Value: Whole Plant
  misc_feature: MA Experiment 20000352 PARAMETER Experiment Name: At_Drought_Sub_P Parameter: Treatment Value: Drought vs. No Drought
  misc_feature: MA Experiment ID: 20000355 Result: Down-regulated in Transcription
  misc_feature: MA Experiment 20000355 PARAMETER Experiment Name: At_Siliques_Sub_P Parameter: Age (day) Value: 21
  misc_feature: MA Experiment 20000355 PARAMETER Experiment Name: At_Siliques_Sub_P Parameter: Organism Value: A. thaliana
  misc_feature: MA Experiment 20000355 PARAMETER Experiment Name: At_Siliques_Sub_P Parameter: Plant Line Value: WS
  misc_feature: MA Experiment 20000355 PARAMETER Experiment Name: At_Siliques_Sub_P Parameter: Tissue Value: Less Than 5mm Siliques vs. Whole Plant
gaattcggcacgagaccttgtaaaccattaagaggctttgctcaattaacaagaaagaaaaaatgcttgtcgacgggaaactcgtctgcgtcaccggagccggcggctacattgcttcttggatcgttaagttactcttagagagaggctacaccgttagaggaaccgtaaggaacccaactgatcccaagaacaaccatctcagagagcttcaaggagccaaggaaagactcactcttcacagtgcagatcttctcgactacgaagctctctgtgccacaatcgacggttgcgatggcgttttccacactgcctctccgatgaccgacgatcccgagacaatgttggagccggcggtgaacggagccaagttcgtgattgacgcagcggctaaagccaaggtcaagcgcgtggttttcacgtcatcaattggtgcagtttacatgaaccctaaccgtgacactcaagccattgttgacgaaaactgctggagtgatcttgatttctgcaaaaacactaagaattggtattgctacgggaagatgttggcggaacaatcggcatgggagacggccaaagcaaaaggtgtggacttagtggtgctaaatccggttttggttctcggaccaccgctccagtcagcgatcaacgctagtctagtccatattctcaagtacctcaccggttcagccaagacctacgctaacttgactcaggtctacgtggacgtccgtgacgtggcactaggccatgttctggtctacgaagcaccctccgcctcaggccgttacatcttcgccgagaccgcacttgaccgcggagaggttgttgagattctggccaaattcttcccggagtatccacttcccaccaagtgttcggacgagaagaatccgagggctaagccatacaagtttactacccaaaagataaaagacttaggcttggaatttaaacccatcaagcaatctctttacgaatctgtcaagagcttgcaagagaaaggccatcttcctctacctcaagattcgaaccaaaacgaagtcatcatcgaatcttaggacacgatccacgaccctagaatctgatcatacctacatgaaaagctttattcttaagtaatacatacgttttgattttgactaaagtattgttaaatcttaaatcattatatatagctgattgttctttctt

SEQ ID NO: 76152 - protein, 332 aa, Arabidopsis thaliana
  peptide (1)..(332): Ceres Seq. ID no. 7106948
  misc_feature (10)..(189): Pfam Name: NAD dependent epimerase/dehydratase family Pfam Description: NAD dependent epimerase/dehydratase family
  misc_feature (1)..(332): Homolog of NCBI NO: 12407990 NR Description: cinnamoyl CoA reductase CCR2 [Arabidopsis
  misc_feature (1)..(332): Homolog of NCBI NO: 15220833 NR Description: cinnamoyl CoA reductase, putative; protein id: supported by cDNA: 32255., supported by cDNA: gi_12407989
  misc_feature (1)..(331): Homolog of NCBI NO: 21592757 NR Description: cinnamoyl CoA reductase, putative [Arabidopsis
  misc_feature (5)..(328): Homolog of NCBI NO: 15218377 NR Description: cinnamoyl CoA reductase, puitative; protein id: supported by cDNA: 34141., supported by cDNA: gi_12034896, by cDNA: gi_12083325, supported by cDNA: gi_17224972 [Arabidopsis
  misc_feature (5)..(328): Homolog of NCBI NO: 12034897 NR Description: cinnamoyl CoA reductase isoform 1 [Arabidopsis
  misc_feature (5)..(331): Homolog of NCBI NO: 9998901 NR Description: cinnamoyl-CoA reductase [Populus balsamifera
  misc_feature (5)..(331): Homolog of NCBI NO: 40233135 NR Description: cinnamoyl CoA reductase [Populus tomentosa]
  misc_feature (5)..(331): Homolog of NCBI NO: 2960364 NR Description: cinnamoyl CoA reductase [Populus balsamifera
  misc_feature (9)..(331): Homolog of NCBI NO: 7239228 NR Description: cinnamoyl CoA reductase; CCR [Populus tremuloides]
  misc_feature (5)..(325): Homolog of NCBI NO: 25140434 NR Description: cinnamoyl CoA reductase [Solanum tuberosum]
MLVDGKLVCVTGAGGYIASWIVKLLLERGYTVRGTVRNPTDPKNNHLRELQGAKERLTLHSADLLDYEALCATIDGCDGVFHTASPMTDDPETMLEPAVNGAKFVIDAAAKAKVKRVVFTSSIGAVYMNPNRDTQAIVDENCWSDLDFCKNTKNWYCYGKMLAEQSAWETAKAKGVDLVVLNPVLVLGPPLQSAINASLVHILKYLTGSAKTYANLTQVYVDVRDVALGHVLVYEAPSASGRYIFAETALDRGEVVEILAKFFPEYPLPTKCSDEKNPRAKPYKFTTQKIKDLGLEFKPIKQSLYESVKSLQEKGHLPLPQDSNQNEVIIES

SEQ ID NO: 76153 - protein, 246 aa, Arabidopsis thaliana
  peptide (1)..(246): Ceres Seq. ID no. 7106949
  misc_feature (1)..(103): Pfam Name: NAD dependent epimerase/dehydratase family Pfam Description: NAD dependent epimerase/dehydratase family
  misc_feature (1)..(246): Homolog of NCBI NO: 12407990 NR Description: cinnamoyl CoA reductase CCR2 [Arabidopsis
  misc_feature (1)..(246): Homolog of NCBI NO: 15220833 NR Description: cinnamoyl CoA reductase, putative; protein id: supported by cDNA: 32255., supported by cDNA: gi_12407989
  misc_feature (1)..(245): Homolog of NCBI NO: 21592757 NR Description: cinnamoyl CoA reductase, putative [Arabidopsis
  misc_feature (1)..(242): Homolog of NCBI NO: 15218377 NR Description: cinnamoyl CoA reductase, puitative; protein id: supported by cDNA: 34141., supported by cDNA: gi_12034896, by cDNA: gi_12083325, supported by cDNA: gi_17224972 [Arabidopsis
  misc_feature (1)..(242): Homolog of NCBI NO: 12034897 NR Description: cinnamoyl CoA reductase isoform 1 [Arabidopsis
  misc_feature (1)..(245): Homolog of NCBI NO: 9998901 NR Description: cinnamoyl-CoA reductase [Populus balsamifera
  misc_feature (1)..(245): Homolog of NCBI NO: 40233135 NR Description: cinnamoyl CoA reductase [Populus tomentosa]
  misc_feature (1)..(245): Homolog of NCBI NO: 2960364 NR Description: cinnamoyl CoA reductase [Populus balsamifera
  misc_feature (1)..(245): Homolog of NCBI NO: 7239228 NR Description: cinnamoyl CoA reductase; CCR [Populus tremuloides]
  misc_feature (1)..(239): Homolog of NCBI NO: 25140434 NR Description: cinnamoyl CoA reductase [Solanum tuberosum]
MTDDPETMLEPAVNGAKFVIDAAAKAKVKRVVFTSSIGAVYMNPNRDTQAIVDENCWSDLDFCKNTKNWYCYGKMLAEQSAWETAKAKGVDLVVLNPVLVLGPPLQSAINASLVHILKYLTGSAKTYANLTQVYVDVRDVALGHVLVYEAPSASGRYIFAETALDRGEVVEILAKFFPEYPLPTKCSDEKNPRAKPYKFTTQKIKDLGLEFKPIKQSLYESVKSLQEKGHLPLPQDSNQNEVIIES

SEQ ID NO: 76154 - protein, 239 aa, Arabidopsis thaliana
  peptide (1)..(239): Ceres Seq. ID no. 7106950
  misc_feature (1)..(96): Pfam Name: NAD dependent epimerase/dehydratase family Pfam Description: NAD dependent epimerase/dehydratase family
  misc_feature (1)..(239): Homolog of NCBI NO: 12407990 NR Description: cinnamoyl CoA reductase CCR2 [Arabidopsis
  misc_feature (1)..(239): Homolog of NCBI NO: 15220833 NR Description: cinnamoyl CoA reductase, putative; protein id: supported by cDNA: 32255., supported by cDNA: gi_12407989
  misc_feature (1)..(238): Homolog of NCBI NO: 21592757 NR Description: cinnamoyl CoA reductase, putative [Arabidopsis
  misc_feature (1)..(235): Homolog of NCBI NO: 15218377 NR Description: cinnamoyl CoA reductase, puitative; protein id: supported by cDNA: 34141., supported by cDNA: gi_12034896, by cDNA: gi_12083325, supported by cDNA: gi_17224972 [Arabidopsis
  misc_feature (1)..(235): Homolog of NCBI NO: 12034897 NR Description: cinnamoyl CoA reductase isoform 1 [Arabidopsis
  misc_feature (1)..(238): Homolog of NCBI NO: 9998901 NR Description: cinnamoyl-CoA reductase [Populus balsamifera
  misc_feature (1)..(238): Homolog of NCBI NO: 40233135 NR Description: cinnamoyl CoA reductase [Populus tomentosa]
  misc_feature (1)..(238): Homolog of NCBI NO: 2960364 NR Description: cinnamoyl CoA reductase [Populus balsamifera
  misc_feature (1)..(238): Homolog of NCBI NO: 7239228 NR Description: cinnamoyl CoA reductase; CCR [Populus tremuloides]
  misc_feature (1)..(232): Homolog of NCBI NO: 25140434 NR Description: cinnamoyl CoA reductase [Solanum tuberosum]
MLEPAVNGAKFVIDAAAKAKVKRVVFTSSIGAVYMNPNRDTQAIVDENCWSDLDFCKNTKNWYCYGKMLAEQSAWETAKAKGVDLVVLNPVLVLGPPLQSAINASLVHILKYLTGSAKTYANLTQVYVDVRDVALGHVLVYEAPSASGRYIFAETALDRGEVVEILAKFFPEYPLPTKCSDEKNPRAKPYKFTTQKIKDLGLEFKPIKQSLYESVKSLQEKGHLPLPQDSNQNEVIIES

SEQ ID NO: 76155 - DNA, 1253 bp, Arabidopsis thaliana
  misc_feature (1)..(1253): Ceres Seq. ID no. 7106951
  misc_feature: MA Experiment ID: 108434 Result: Down-regulated in Transcription
  misc_feature: MA Experiment 108434 PARAMETER Experiment Name: At_Root_Tips_cDNA_P Parameter: Tissue Value: Root Tips
  misc_feature: MA Experiment ID: 108464 Result: Up-regulated in Transcription
  misc_feature: MA Experiment 108464 PARAMETER Experiment Name: At_Germinating_Seeds_cDNA_P Parameter: Age (day) Value: 4 vs. 0
  misc_feature: MA Experiment 108464 PARAMETER Experiment Name: At_Germinating_Seeds_cDNA_P Parameter: Tissue Value: Germinating Seeds
  misc_feature: MA Experiment ID: 108577 Result: Down-regulated in Transcription
  misc_feature: MA Experiment 108577 PARAMETER Experiment Name: At_42deg_Heat_cDNA_P Parameter: Temperature (deg C) Value: 42 vs. 22
  misc_feature: MA Experiment 108577 PARAMETER Experiment Name: At_42deg_Heat_cDNA_P Parameter: Timepoint (hr) Value: 6
  misc_feature: MA Experiment 108577 PARAMETER Experiment Name: At_42deg_Heat_cDNA_P Parameter: Tissue Value: Aerial
  misc_feature: MA Experiment ID: 108595 Result: Up-regulated in Transcription
  misc_feature: MA Experiment 108595 PARAMETER Experiment Name: At_Ler-pi_Ovule_cDNA_P Parameter: Plant Line Value: null
  misc_feature: MA Experiment ID: 108605 Result: Up-regulated in Transcription
  misc_feature: MA Experiment 108605 PARAMETER Experiment Name: At_100uM_ABA_cDNA_P Parameter: Timepoint (hr) Value: 6
  misc_feature: MA Experiment 108605 PARAMETER Experiment Name: At_100uM_ABA_cDNA_P Parameter: Tissue Value: Aerial
  misc_feature: MA Experiment 108605 PARAMETER Experiment Name: At_100uM_ABA_cDNA_P Parameter: Treatment Value: 100uM ABA vs. No Treatment
  misc_feature: MA Experiment ID: 108607 Result: Up-regulated in Transcription
  misc_feature: MA Experiment 108607 PARAMETER Experiment Name: At_100uM_ABA_cDNA_P Parameter: Timepoint (hr) Value: 4
  misc_feature: MA Experiment 108607 PARAMETER Experiment Name: At_100uM_ABA_cDNA_P Parameter: Tissue Value: Aerial
  misc_feature: MA Experiment 108607 PARAMETER Experiment Name: At_100uM_ABA_cDNA_P Parameter: Treatment Value: 100uM ABA vs. No Treatment
  misc_feature: MA Experiment ID: 20000069 Result: Up-regulated in Transcription
  misc_feature: MA Experiment 20000069 PARAMETER Experiment Name: At_100uM_ABA_Mutants_cDNA_P Parameter: Plant Line Value: CS23
  misc_feature: MA Experiment 20000069 PARAMETER Experiment Name: At_100uM_ABA_Mutants_cDNA_P Parameter: Timepoint (hr) Value: 6
  misc_feature: MA Experiment 20000069 PARAMETER Experiment Name: At_100uM_ABA_Mutants_cDNA_P Parameter: Tissue Value: Aerial
  misc_feature: MA Experiment 20000069 PARAMETER Experiment Name: At_100uM_ABA_Mutants_cDNA_P Parameter: Treatment Value: 100uM ABA vs. No Treatment
  misc_feature: MA Experiment ID: 20000070 Result: Up-regulated in Transcription
  misc_feature: MA Experiment 20000070 PARAMETER Experiment Name: At_100uM_ABA_Mutants_cDNA_P Parameter: Plant Line Value: CS24
  misc_feature: MA Experiment 20000070 PARAMETER Experiment Name: At_100uM_ABA_Mutants_cDNA_P Parameter: Timepoint (hr) Value: 6
  misc_feature: MA Experiment 20000070 PARAMETER Experiment Name: At_100uM_ABA_Mutants_cDNA_P Parameter: Tissue Value: Aerial
  misc_feature: MA Experiment 20000070 PARAMETER Experiment Name: At_100uM_ABA_Mutants_cDNA_P Parameter: Treatment Value: 100uM ABA vs. No Treatment
  misc_feature: MA Experiment ID: 20000071 Result: Up-regulated in Transcription
  misc_feature: MA Experiment 20000071 PARAMETER Experiment Name: At_100uM_ABA_Mutants_cDNA_P Parameter: Plant Line Value: CS8104
  misc_feature: MA Experiment 20000071 PARAMETER Experiment Name: At_100uM_ABA_Mutants_cDNA_P Parameter: Timepoint (hr) Value: 6
  misc_feature: MA Experiment 20000071 PARAMETER Experiment Name: At_100uM_ABA_Mutants_cDNA_P Parameter: Tissue Value: Aerial
  misc_feature: MA Experiment 20000071 PARAMETER Experiment Name: At_100uM_ABA_Mutants_cDNA_P Parameter: Treatment Value: 100uM ABA vs. No Treatment
  misc_feature: MA Experiment ID: 20000072 Result: Up-regulated in Transcription
  misc_feature: MA Experiment 20000072 PARAMETER Experiment Name: At_100uM_ABA_Mutants_cDNA_P Parameter: Plant Line Value: CS8105
  misc_feature: MA Experiment 20000072 PARAMETER Experiment Name: At_100uM_ABA_Mutants_cDNA_P Parameter: Timepoint (hr) Value: 6
  misc_feature: MA Experiment 20000072 PARAMETER Experiment Name: At_100uM_ABA_Mutants_cDNA_P Parameter: Tissue Value: Aerial
  misc_feature: MA Experiment 20000072 PARAMETER Experiment Name: At_100uM_ABA_Mutants_cDNA_P Parameter: Treatment Value: 100uM ABA vs. No Treatment
  misc_feature: MA Experiment ID: 20000086 Result: Up-regulated in Transcription
  misc_feature: MA Experiment 20000086 PARAMETER Experiment Name: At_100uM_ABA_Mutants_cDNA_P Parameter: Plant Line Value: CS22
  misc_feature: MA Experiment 20000086 PARAMETER Experiment Name: At_100uM_ABA_Mutants_cDNA_P Parameter: Timepoint (hr) Value: 6
  misc_feature: MA Experiment 20000086 PARAMETER Experiment Name: At_100uM_ABA_Mutants_cDNA_P Parameter: Tissue Value: Aerial
  misc_feature: MA Experiment 20000086 PARAMETER Experiment Name: At_100uM_ABA_Mutants_cDNA_P Parameter: Treatment Value: 100uM ABA vs. No Treatment
  misc_feature: MA Experiment ID: 20000087 Result: Up-regulated in Transcription
  misc_feature: MA Experiment 20000087 PARAMETER Experiment Name: At_100uM_ABA_Mutants_cDNA_P Parameter: Plant Line Value: WS
  misc_feature: MA Experiment 20000087 PARAMETER Experiment Name: At_100uM_ABA_Mutants_cDNA_P Parameter: Timepoint (hr) Value: 6
  misc_feature: MA Experiment 20000087 PARAMETER Experiment Name: At_100uM_ABA_Mutants_cDNA_P Parameter: Tissue Value: Aerial
  misc_feature: MA Experiment 20000087 PARAMETER Experiment Name: At_100uM_ABA_Mutants_cDNA_P Parameter: Treatment Value: 100uM ABA vs. No Treatment
  misc_feature: MA Experiment ID: 20000088 Result: Up-regulated in Transcription
  misc_feature: MA Experiment 20000088 PARAMETER Experiment Name: At_100uM_ABA_Mutants_cDNA_P Parameter: Plant Line Value: Landsberg
  misc_feature: MA Experiment 20000088 PARAMETER Experiment Name: At_100uM_ABA_Mutants_cDNA_P Parameter: Timepoint (hr) Value: 6
  misc_feature: MA Experiment 20000088 PARAMETER Experiment Name: At_100uM_ABA_Mutants_cDNA_P Parameter: Tissue Value: Aerial
  misc_feature: MA Experiment 20000088 PARAMETER Experiment Name: At_100uM_ABA_Mutants_cDNA_P Parameter: Treatment Value: 100uM ABA vs. No Treatment
  misc_feature: MA Experiment ID: 20000111 Result: Down-regulated in Transcription
  misc_feature: MA Experiment 20000111 PARAMETER Experiment Name: At_42deg_Heat_cDNA_P Parameter: Temperature (deg C) Value: 42 vs. 22
  misc_feature: MA Experiment 20000111 PARAMETER Experiment Name: At_42deg_Heat_cDNA_P Parameter: Timepoint (hr) Value: 6
  misc_feature: MA Experiment 20000111 PARAMETER Experiment Name: At_42deg_Heat_cDNA_P Parameter: Tissue Value: Aerial
  misc_feature: MA Experiment ID: 20000117 Result: Up-regulated in Transcription
  misc_feature: MA Experiment 20000117 PARAMETER Experiment Name: At_100uM_ABA_Mutants_cDNA_P Parameter: Plant Line Value: Columbia
  misc_feature: MA Experiment 20000117 PARAMETER Experiment Name: At_100uM_ABA_Mutants_cDNA_P Parameter: Timepoint (hr) Value: 6
  misc_feature: MA Experiment 20000117 PARAMETER Experiment Name: At_100uM_ABA_Mutants_cDNA_P Parameter: Tissue Value: Aerial
  misc_feature: MA Experiment 20000117 PARAMETER Experiment Name: At_100uM_ABA_Mutants_cDNA_P Parameter: Treatment Value: 100uM ABA vs. No Treatment
gtcgaccacgcctccgtctttatctctcttttcctcttaaccatccactaatcaaacactaaaacctagaaaaaaaaaggatcaaatcatggagacggaagaagagatgaaggaaagtagtataagcatggtggaggcaaagttgcctccgggattcagatttcacccgaaggacgatgagcttgtctgcgattacttgatgagacgatcgcttcacaataatcatcgaccacctcttgtcctgatccaagtcgatctcaacaagtgtgagccttgggacatcccaaaaatggcatgcgtgggagggaaggattggtatttctacagccaaagagaccgaaaatacgcgacggggctgagaactaaccgagcaacggccaccggatattggaaagccaccggcaaagacagaaccattctaagaaagggtaagctagttgggatgaggaagacattggttttctatcaaggtcgagctcctcgaggccgtaaaaccgattgggtcatgcacgaattccgtctccaaggatctcatcatcctcccaatcattctctgagctctccaaaggaagactgggtcttgtgtagggtattccataagaatacggaaggagttatatgtagagacaacatgggaagctgttttgatgagacagcctctgcatcgcttcctccactgatggatccttacatcaactttgaccaagaaccctcttcttatctcagtgatgatcatcactacatcatcaatgagcacgtaccctgcttctccaatttgtcacagaaccaaaccttaaactcgaacctaaccaactcagtctctgaactcaagattccatgcaagaaccctaaccccttgtttactggtggttcagcctcagccacgctcacaggcctcgactcattctgttcttcagatcagatggttctcagagctctactcagtcagctcactaagattgatggaagcctcgggcctaaagaatcacagagttatggagaaggtagctcggagagcctcctgaccgacatcggtattccaagcactgtttggaattgctgatgatcgagtgtaacgagagttactattgctatattcctatccatgattggaacaattcttcggggggaaataacgtgtgcttgtctgattgtacaaacatttcctcactcttgtacccacggtagattcatgtaaaataccacttatgacgctagacatacatatatttcatcgtagttccatttgtttc

SEQ ID NO: 76156 - protein, 324 aa, Arabidopsis thaliana; identical to SEQ ID NO: 43483
  peptide (1)..(324): Ceres Seq. ID no. 7106952
  misc_feature (19)..(146): Pfam Name: No apical meristem (NAM) protein Pfam Description: No apical meristem (NAM) protein
  misc_feature (1)..(324): Homolog of NCBI NO: 15222818 NR Description: NAC1; protein id: At1g56010.1, supported by cDNA: supported by cDNA: gi_6649235 [Arabidopsis thaliana] NAC1 [Arabidopsis thaliana] >gi|8778319|gb|AAF79328.1|AC002304_21
  misc_feature (1)..(324): Homolog of NCBI NO: 25404083 NR Description: hypothetical protein T6H22.19 [imported] - thaliana >gi|6056383|gb|AAF02847.1|AC009894_18 Similar to NAM
  misc_feature (68)..(324): Homolog of NCBI NO: 30696045 NR Description: NAC1 / No apical meristem (NAM) protein family thaliana] >gi|29028858|gb|AAO64808.1| At1g56010 [Arabidopsis
  misc_feature (1)..(245): Homolog of NCBI NO: 15795128 NR Description: NAM (no apical meristem) protein-like
  misc_feature (249)..(323): Homolog of NCBI NO: 15795128 NR Description: NAM (no apical meristem) protein-like
  misc_feature (10)..(323): Homolog of NCBI NO: 15148912 NR Description: NAC domain protein NAC1 [Phaseolus vulgaris]
  misc_feature (10)..(230): Homolog of NCBI NO: 38636961 NR Description: putative NAC domain protein NAC1 [Oryza sativa
  misc_feature (19)..(315): Homolog of NCBI NO: 15240252 NR Description: NAM, no apical meristem, - like protein; protein At5g61430.1, supported by cDNA: 12970., supported by cDNA:
  misc_feature (19)..(315): Homolog of NCBI NO: 21537315 NR Description: NAM, no apical meristem,-like protein
  misc_feature (15)..(248): Homolog of NCBI NO: 15229637 NR Description: organ separation protein, putative; protein id: [Arabidopsis thaliana] >gi|11994103|dbj|BAB01106.1| contains to NAM (no apical meristem) protein~gene_id:MYF24.12 [Arabidopsis

SEQ ID NO: 76157 - protein, 318 aa, Arabidopsis thaliana; identical to SEQ ID NO: 43484
  peptide (1)..(318): Ceres Seq. ID no. 7106953
  misc_feature (13)..(140): Pfam Name: No apical meristem (NAM) protein Pfam Description: No apical meristem (NAM) protein
  misc_feature (1)..(318): Homolog of NCBI NO: 15222818 NR Description: NAC1; protein id: At1g56010.1, supported by cDNA: supported by cDNA: gi_6649235 [Arabidopsis thaliana] NAC1 [Arabidopsis thaliana] >gi|8778319|gb|AAF79328.1|AC002304_21
  misc_feature (1)..(318): Homolog of NCBI NO: 25404083 NR Description: hypothetical protein T6H22.19 [imported] - thaliana >gi|6056383|gb|AAF02847.1|AC009894_18 Similar to NAM
  misc_feature (62)..(318): Homolog of NCBI NO: 30696045 NR Description: NAC1 / No apical meristem (NAM) protein family thaliana] >gi|29028858|gb|AAO64808.1| At1g56010 [Arabidopsis
  misc_feature (1)..(239): Homolog of NCBI NO: 15795128 NR Description: NAM (no apical meristem) protein-like
  misc_feature (243)..(317): Homolog of NCBI NO: 15795128 NR Description: NAM (no apical meristem) protein-like
  misc_feature (4)..(317): Homolog of NCBI NO: 15148912 NR Description: NAC domain protein NAC1 [Phaseolus vulgaris]
  misc_feature (4)..(224): Homolog of NCBI NO: 38636961 NR Description: putative NAC domain protein NAC1 [Oryza sativa
  misc_feature (13)..(309): Homolog of NCBI NO: 15240252 NR Description: NAM, no apical meristem, - like protein; protein At5g61430.1, supported by cDNA: 12970., supported by cDNA:
  misc_feature (13)..(309): Homolog of NCBI NO: 21537315 NR Description: NAM, no apical meristem,-like protein
  misc_feature (9)..(242): Homolog of NCBI NO: 15229637 NR Description: organ separation protein, putative; protein id: [Arabidopsis thaliana] >gi|11994103|dbj|BAB01106.1| contains to NAM (no apical meristem) protein~gene_id:MYF24.12 [Arabidopsis

SEQ ID NO: 76158 - protein, 311 aa, Arabidopsis thaliana; identical to SEQ ID NO: 43485
  peptide (1)..(311): Ceres Seq. ID no. 7106954
  misc_feature (6)..(133): Pfam Name: No apical meristem (NAM) protein Pfam Description: No apical meristem (NAM) protein
  misc_feature (1)..(311): Homolog of NCBI NO: 15222818 NR Description: NAC1; protein id: At1g56010.1, supported by cDNA: supported by cDNA: gi_6649235 [Arabidopsis thaliana] NAC1 [Arabidopsis thaliana] >gi|8778319|gb|AAF79328.1|AC002304_21
  misc_feature (1)..(311): Homolog of NCBI NO: 25404083 NR Description: hypothetical protein T6H22.19 [imported] - thaliana >gi|6056383|gb|AAF02847.1|AC009894_18 Similar to NAM
  misc_feature (55)..(311): Homolog of NCBI NO: 30696045 NR Description: NAC1 / No apical meristem (NAM) protein family thaliana] >gi|29028858|gb|AAO64808.1| At1g56010 [Arabidopsis
  misc_feature (1)..(232): Homolog of NCBI NO: 15795128 NR Description: NAM (no apical meristem) protein-like
  misc_feature (236)..(310): Homolog of NCBI NO: 15795128 NR Description: NAM (no apical meristem) protein-like
  misc_feature (1)..(310): Homolog of NCBI NO: 15148912 NR Description: NAC domain protein NAC1 [Phaseolus vulgaris]
  misc_feature (1)..(217): Homolog of NCBI NO: 38636961 NR Description: putative NAC domain protein NAC1 [Oryza sativa
  misc_feature (6)..(302): Homolog of NCBI NO: 15240252 NR Description: NAM, no apical meristem, - like protein; protein At5g61430.1, supported by cDNA: 12970., supported by cDNA:
  misc_feature (6)..(302): Homolog of NCBI NO: 21537315 NR Description: NAM, no apical meristem,-like protein
  misc_feature (2)..(235): Homolog of NCBI NO: 15229637 NR Description: organ separation protein, putative; protein id: [Arabidopsis thaliana] >gi|11994103|dbj|BAB01106.1| contains to NAM (no apical meristem) protein~gene_id:MYF24.12 [Arabidopsis

SEQ ID NO: 76159 - DNA, 1397 bp, Arabidopsis thaliana
  misc_feature (1)..(1397): Ceres Seq. ID no. 7106981
  misc_feature: MA Experiment ID: 108434 Result: Up-regulated in Transcription
  misc_feature: MA Experiment 108434 PARAMETER Experiment Name: At_Root_Tips_cDNA_P Parameter: Tissue Value: Root Tips
  misc_feature: MA Experiment ID: 108461 Result: Up-regulated in Transcription
  misc_feature: MA Experiment 108461 PARAMETER Experiment Name: At_Germinating_Seeds_cDNA_P Parameter: Age (day) Value: 1 vs. 0
  misc_feature: MA Experiment 108461 PARAMETER Experiment Name: At_Germinating_Seeds_cDNA_P Parameter: Tissue Value: Germinating Seeds
  misc_feature: MA Experiment ID: 108561 Result: Down-regulated in Transcription
  misc_feature: MA Experiment 108561 PARAMETER Experiment Name: At_100uM_ABA_cDNA_P Parameter: Timepoint (hr) Value: 6
  misc_feature: MA Experiment 108561 PARAMETER Experiment Name: At_100uM_ABA_cDNA_P Parameter: Tissue Value: Aerial
  misc_feature: MA Experiment 108561 PARAMETER Experiment Name: At_100uM_ABA_cDNA_P Parameter: Treatment Value: 100uM ABA vs. No Treatment
  misc_feature: MA Experiment ID: 108577 Result: Down-regulated in Transcription
  misc_feature: MA Experiment 108577 PARAMETER Experiment Name: At_42deg_Heat_cDNA_P Parameter: Temperature (deg C) Value: 42 vs. 22
  misc_feature: MA Experiment 108577 PARAMETER Experiment Name: At_42deg_Heat_cDNA_P Parameter: Timepoint (hr) Value: 6
  misc_feature: MA Experiment 108577 PARAMETER Experiment Name: At_42deg_Heat_cDNA_P Parameter: Tissue Value: Aerial
  misc_feature: MA Experiment ID: 108579 Result: Up-regulated in Transcription
  misc_feature: MA Experiment 108579 PARAMETER Experiment Name: At_4deg_Cold_cDNA_P Parameter: Temperature (deg C) Value: 4 vs. 22
  misc_feature: MA Experiment 108579 PARAMETER Experiment Name: At_4deg_Cold_cDNA_P Parameter: Timepoint (hr) Value: 6
  misc_feature: MA Experiment 108579 PARAMETER Experiment Name: At_4deg_Cold_cDNA_P Parameter: Tissue Value: Aerial
  misc_feature: MA Experiment ID: 108595 Result: Down-regulated in Transcription
  misc_feature: MA Experiment 108595 PARAMETER Experiment Name: At_Ler-pi_Ovule_cDNA_P Parameter: Plant Line Value: null
  misc_feature: MA Experiment ID: 108607 Result: Down-regulated in Transcription
  misc_feature: MA Experiment 108607 PARAMETER Experiment Name: At_100uM_ABA_cDNA_P Parameter: Timepoint (hr) Value: 4
  misc_feature: MA Experiment 108607 PARAMETER Experiment Name: At_100uM_ABA_cDNA_P Parameter: Tissue Value: Aerial
  misc_feature: MA Experiment 108607 PARAMETER Experiment Name: At_100uM_ABA_cDNA_P Parameter: Treatment Value: 100uM ABA vs. No Treatment
  misc_feature: MA Experiment ID: 20000072 Result: Down-regulated in Transcription
  misc_feature: MA Experiment 20000072 PARAMETER Experiment Name: At_100uM_ABA_Mutants_cDNA_P Parameter: Plant Line Value: CS8105
  misc_feature: MA Experiment 20000072 PARAMETER Experiment Name: At_100uM_ABA_Mutants_cDNA_P Parameter: Timepoint (hr) Value: 6
  misc_feature: MA Experiment 20000072 PARAMETER Experiment Name: At_100uM_ABA_Mutants_cDNA_P Parameter: Tissue Value: Aerial
  misc_feature: MA Experiment 20000072 PARAMETER Experiment Name: At_100uM_ABA_Mutants_cDNA_P Parameter: Treatment Value: 100uM ABA vs. No Treatment
  misc_feature: MA Experiment ID: 20000111 Result: Down-regulated in Transcription
  misc_feature: MA Experiment 20000111 PARAMETER Experiment Name: At_42deg_Heat_cDNA_P Parameter: Temperature (deg C) Value: 42 vs. 22
  misc_feature: MA Experiment 20000111 PARAMETER Experiment Name: At_42deg_Heat_cDNA_P Parameter: Timepoint (hr) Value: 6
  misc_feature: MA Experiment 20000111 PARAMETER Experiment Name: At_42deg_Heat_cDNA_P Parameter: Tissue Value: Aerial
  misc_feature: MA Experiment ID: 20000306 Result: Up-regulated in Transcription
  misc_feature: MA Experiment 20000306 PARAMETER Experiment Name: At_Germinating_Seeds_Sub_P Parameter: Age (hr) Value: 6 vs. 0
  misc_feature: MA Experiment 20000306 PARAMETER Experiment Name: At_Germinating_Seeds_Sub_P Parameter: Organism Value: A. thaliana
  misc_feature: MA Experiment 20000306 PARAMETER Experiment Name: At_Germinating_Seeds_Sub_P Parameter: Plant Line Value: WS
  misc_feature: MA Experiment 20000306 PARAMETER Experiment Name: At_Germinating_Seeds_Sub_P Parameter: Tissue Value: Germinating Seeds
  misc_feature: MA Experiment ID: 20000307 Result: Up-regulated in Transcription
  misc_feature: MA Experiment 20000307 PARAMETER Experiment Name: At_Germinating_Seeds_Sub_P Parameter: Age (hr) Value: 24 vs. 0
  misc_feature: MA Experiment 20000307 PARAMETER Experiment Name: At_Germinating_Seeds_Sub_P Parameter: Organism Value: A. thaliana
  misc_feature: MA Experiment 20000307 PARAMETER Experiment Name: At_Germinating_Seeds_Sub_P Parameter: Plant Line Value: WS
  misc_feature: MA Experiment 20000307 PARAMETER Experiment Name: At_Germinating_Seeds_Sub_P Parameter: Tissue Value: Germinating Seeds
  misc_feature: MA Experiment ID: 20000327 Result: Down-regulated in Transcription
  misc_feature: MA Experiment 20000327 PARAMETER Experiment Name: At_42deg_Heat_Sub_P Parameter: Age (day) Value: 14
  misc_feature: MA Experiment 20000327 PARAMETER Experiment Name: At_42deg_Heat_Sub_P Parameter: Organism Value: A. thaliana
  misc_feature: MA Experiment 20000327 PARAMETER Experiment Name: At_42deg_Heat_Sub_P Parameter: Plant Line Value: WS
  misc_feature: MA Experiment 20000327 PARAMETER Experiment Name: At_42deg_Heat_Sub_P Parameter: Temperature (deg C) Value: 42 vs. 22
  misc_feature: MA Experiment 20000327 PARAMETER Experiment Name: At_42deg_Heat_Sub_P Parameter: Timepoint (hr) Value: 1
  misc_feature: MA Experiment 20000327 PARAMETER Experiment Name: At_42deg_Heat_Sub_P Parameter: Tissue Value: Aerial
  misc_feature: MA Experiment ID: 20000328 Result: Down-regulated in Transcription
  misc_feature: MA Experiment 20000328 PARAMETER Experiment Name: At_42deg_Heat_Sub_P Parameter: Age (day) Value: 14
  misc_feature: MA Experiment 20000328 PARAMETER Experiment Name: At_42deg_Heat_Sub_P Parameter: Organism Value: A. thaliana
  misc_feature: MA Experiment 20000328 PARAMETER Experiment Name: At_42deg_Heat_Sub_P Parameter: Plant Line Value: WS
  misc_feature: MA Experiment 20000328 PARAMETER Experiment Name: At_42deg_Heat_Sub_P Parameter: Temperature (deg C) Value: 42 vs. 22
  misc_feature: MA Experiment 20000328 PARAMETER Experiment Name: At_42deg_Heat_Sub_P Parameter: Timepoint (hr) Value: 6
  misc_feature: MA Experiment 20000328 PARAMETER Experiment Name: At_42deg_Heat_Sub_P Parameter: Tissue Value: Aerial
  misc_feature: MA Experiment ID: 20000329 Result: Up-regulated in Transcription
  misc_feature: MA Experiment 20000329 PARAMETER Experiment Name: At_4deg_Cold_Sub_P Parameter: Age (day) Value: 14
  misc_feature: MA Experiment 20000329 PARAMETER Experiment Name: At_4deg_Cold_Sub_P Parameter: Organism Value: A. thaliana
  misc_feature: MA Experiment 20000329 PARAMETER Experiment Name: At_4deg_Cold_Sub_P Parameter: Plant Line Value: WS
  misc_feature: MA Experiment 20000329 PARAMETER Experiment Name: At_4deg_Cold_Sub_P Parameter: Temperature (deg C) Value: 4 vs. 22
  misc_feature: MA Experiment 20000329 PARAMETER Experiment Name: At_4deg_Cold_Sub_P Parameter: Timepoint (hr) Value: 6
  misc_feature: MA Experiment 20000329 PARAMETER Experiment Name: At_4deg_Cold_Sub_P Parameter: Tissue Value: Aerial
  misc_feature: MA Experiment ID: 20000347 Result: Down-regulated in Transcription
  misc_feature: MA Experiment 20000347 PARAMETER Experiment Name: At_2mM_SA_Sub_P Parameter: Age (day) Value: 14
  misc_feature: MA Experiment 20000347 PARAMETER Experiment Name: At_2mM_SA_Sub_P Parameter: Organism Value: A. thaliana
  misc_feature: MA Experiment 20000347 PARAMETER Experiment Name: At_2mM_SA_Sub_P Parameter: Plant Line Value: WS
  misc_feature: MA Experiment 20000347 PARAMETER Experiment Name: At_2mM_SA_Sub_P Parameter: Timepoint (hr) Value: 6
  misc_feature: MA Experiment 20000347 PARAMETER Experiment Name: At_2mM_SA_Sub_P Parameter: Tissue Value: Aerial
  misc_feature: MA Experiment 20000347 PARAMETER Experiment Name: At_2mM_SA_Sub_P Parameter: Treatment Value: 2mM SA vs. No Treatment
  misc_feature: MA Experiment ID: 20001807 Result: Up-regulated in Transcription
  misc_feature: MA Experiment 20001807 PARAMETER Experiment Name: At_50mM_NH4NO3_L-to-H_Sub_P Parameter: Timepoint (hr) Value: 6
  misc_feature: MA Experiment 20001807 PARAMETER Experiment Name: At_50mM_NH4NO3_L-to-H_Sub_P Parameter: Tissue Value: Leaf
  misc_feature: MA Experiment 20001807 PARAMETER Experiment Name: At_50mM_NH4NO3_L-to-H_Sub_P Parameter: Treatment Value: 50mM NH4NO3 vs 100mM Mannitol
  misc_feature (1348)..(1348): n is a, c, t, g, unknown, or other
  misc_feature (1357)..(1357): n is a, c, t, g, unknown, or other
ctgaaattaaacaaagcgagaaaaggcgatacaaacgatttcgaatgcttcatcttctcctttgaaaatccttcttctgcttaatgctgctagatatggatctcggtgttcttcttccatcattgcaatctgtttatgtgctggtgttttacttcgtttacttggccgttgccggagaaattctccccgggaaagttattcgcggcgtccttttatcagatggctctcaacttcgttaccgatgcaatggtctattggcactaatattgttggtagctattttgggaatctgtgcaaaacttggcattgtatcacctcttgtggttgcggatagaggacttgagttactctcagctacttttattttctgtgttttggtgacattagcattgtatgttactgggcgaagttcctcgaataagggttcttccctaaagcctcatgtctcaggaaatcttgtacatgactggtggtttggaatacagctgaatcctcagtttatgagcattgatctcaagtttttctttgtcagagccgggatgatgggatggctgcttatcaatctctctattctggcaaaaagtgtgcaggatggttccttgagtcagtcgatgattctttaccagatcttctgtgcgttatatatattggactactttgttcatgaagaatacatgacctctacgtgggacataattgcagagagactaggcttcatgctagtgtttggagatctcctgtggattcctttcacttttagcattcagggctggtggcttttgcacaacaaagtagaactaacagttcctgcgattgtagtcaattgccttgtcttcttgatagggtacatggtttttcgaggagctaacaaacaaaaacatatctttaagaagaacccaaaaacaccaatatggggcaagcctccagtggtagttggtggaaagttactggtttcaggctattggggaattgcaaggcactgtaattaccttggcgacttgatgcttgctctgtccttcagtttgccatgtggaataagttctccggttccatatttctacccgatataccttctgatactattgatatggagagaacgaagagacgaggttcgatgtgcagagaagtacaaggagatatgggcagagtatcttagacttgtcccctggagaatacttccttatgtttattagatgtgccaagagccaagtcatgaatcctttcagattcacctcttgttgtcttattttttccataatcttgttttattttagcaatgctcgaattgaaactttgtagtacacttttgaaaaataacttcagtccttaaaaaaaaaaaaaacctaanttactcccnctgggcggccgctggttttatatttgttgtaaaaattaaa

SEQ ID NO: 76160 - protein, 369 aa, Arabidopsis thaliana; identical to SEQ ID NO: 24309
  peptide (1)..(369): Ceres Seq. ID no. 7106982
  misc_feature (5)..(369): Pfam Name: Ergosterol biosynthesis ERG4/ERG24 family Pfam Description: Ergosterol biosynthesis ERG4/ERG24 family
  misc_feature (1)..(369): Homolog of NCBI NO: 18409727 NR Description: nuclear envelope membrane protein - like; protein At3g52940.1, supported by cDNA: gi_17473515, supported by cDNA:
  misc_feature (5)..(369): Homolog of NCBI NO: 8917585 NR Description: C-14 sterol reductase [Arabidopsis thaliana]
  misc_feature (5)..(213): Homolog of NCBI NO: 11358585 NR Description: nuclear envelope membrane protein-like -
  misc_feature (229)..(369): Homolog of NCBI NO: 11358585 NR Description: nuclear envelope membrane protein-like -
  misc_feature (78)..(366): Homolog of NCBI NO: 11096269 NR Description: sterol C-14 reductase [Dictyostelium discoideum]
  misc_feature (1)..(369): Homolog of NCBI NO: 33320186 NR Description: C-14 sterol reductase [Mus musculus]
  misc_feature (16)..(369): Homolog of NCBI NO: 33417073 NR Description: Unknown (protein for MGC:68849) [Xenopus laevis]
  misc_feature (11)..(369): Homolog of NCBI NO: 439434 NR Description: integral nuclear envelope inner membrane protein
  misc_feature (11)..(369): Homolog of NCBI NO: 37595750 NR Description: lamin B receptor; integral nuclear envelope inner protein [Homo sapiens] >gi|37595752|ref|NP_919424.1| lamin B integral nuclear envelope inner membrane protein [Homo sapiens]
  misc_feature (1)..(369): Homolog of NCBI NO: 20137709 NR Description: Delta(14)-sterol reductase (C-14 sterol

SEQ ID NO: 76161 - protein, 365 aa, Arabidopsis thaliana; identical to SEQ ID NO: 24310
  peptide (1)..(365): Ceres Seq. ID no. 7106983
  misc_feature (1)..(365): Pfam Name: Ergosterol biosynthesis ERG4/ERG24 family Pfam Description: Ergosterol biosynthesis ERG4/ERG24 family
  misc_feature (1)..(365): Homolog of NCBI NO: 18409727 NR Description: nuclear envelope membrane protein - like; protein At3g52940.1, supported by cDNA: gi_17473515, supported by cDNA:
  misc_feature (1)..(365): Homolog of NCBI NO: 8917585 NR Description: C-14 sterol reductase [Arabidopsis thaliana]
  misc_feature (1)..(209): Homolog of NCBI NO: 11358585 NR Description: nuclear envelope membrane protein-like -
  misc_feature (225)..(365): Homolog of NCBI NO: 11358585 NR Description: nuclear envelope membrane protein-like -
  misc_feature (74)..(362): Homolog of NCBI NO: 11096269 NR Description: sterol C-14 reductase [Dictyostelium discoideum]
  misc_feature (1)..(365): Homolog of NCBI NO: 33320186 NR Description: C-14 sterol reductase [Mus musculus]
  misc_feature (12)..(365): Homolog of NCBI NO: 33417073 NR Description: Unknown (protein for MGC:68849) [Xenopus laevis]
  misc_feature (7)..(365): Homolog of NCBI NO: 439434 NR Description: integral nuclear envelope inner membrane protein
  misc_feature (7)..(365): Homolog of NCBI NO: 37595750 NR Description: lamin B receptor; integral nuclear envelope inner protein [Homo sapiens] >gi|37595752|ref|NP_919424.1| lamin B integral nuclear envelope inner membrane protein [Homo sapiens]
  misc_feature (1)..(365): Homolog of NCBI NO: 20137709 NR Description: Delta(14)-sterol reductase (C-14 sterol

SEQ ID NO: 76162 - protein, 230 aa, Arabidopsis thaliana; identical to SEQ ID NO: 24311
  peptide (1)..(230): Ceres Seq. ID no. 7106984
  misc_feature (1)..(230): Pfam Name: Ergosterol biosynthesis ERG4/ERG24 family Pfam Description: Ergosterol biosynthesis ERG4/ERG24 family
  misc_feature (1)..(230): Homolog of NCBI NO: 18409727 NR Description: nuclear envelope membrane protein - like; protein At3g52940.1, supported by cDNA: gi_17473515, supported by cDNA:
  misc_feature (1)..(230): Homolog of NCBI NO: 8917585 NR Description: C-14 sterol reductase [Arabidopsis thaliana]
  misc_feature (1)..(74): Homolog of NCBI NO: 11358585 NR Description: nuclear envelope membrane protein-like -
  misc_feature (90)..(230): Homolog of NCBI NO: 11358585 NR Description: nuclear envelope membrane protein-like -
  misc_feature (1)..(227): Homolog of NCBI NO: 11096269 NR Description: sterol C-14 reductase [Dictyostelium discoideum]
  misc_feature (1)..(230): Homolog of NCBI NO: 33320186 NR Description: C-14 sterol reductase [Mus musculus]
  misc_feature (1)..(230): Homolog of NCBI NO: 33417073 NR Description: Unknown (protein for MGC:68849) [Xenopus laevis]
  misc_feature (1)..(230): Homolog of NCBI NO: 439434 NR Description: integral nuclear envelope inner membrane protein
  misc_feature (1)..(230): Homolog of NCBI NO: 37595750 NR Description: lamin B receptor; integral nuclear envelope inner protein [Homo sapiens] >gi|37595752|ref|NP_919424.1| lamin B integral nuclear envelope inner membrane protein [Homo sapiens]
  misc_feature (1)..(230): Homolog of NCBI NO: 20137709 NR Description: Delta(14)-sterol reductase (C-14 sterol

SEQ ID NO: 76163 - DNA, 1704 bp, Arabidopsis thaliana
  misc_feature (1)..(1704): Ceres Seq. ID no. 7106997
  misc_feature: MA Experiment ID: 108434 Result: Down-regulated in Transcription
  misc_feature: MA Experiment 108434 PARAMETER Experiment Name: At_Root_Tips_cDNA_P Parameter: Tissue Value: Root Tips
  misc_feature: MA Experiment ID: 108435 Result: Down-regulated in Transcription
  misc_feature: MA Experiment 108435 PARAMETER Experiment Name: At_stm_Mutants_cDNA_P Parameter: Plant Line Value: wt Landsburg vs stm
  misc_feature: MA Experiment 108435 PARAMETER Experiment Name: At_stm_Mutants_cDNA_P Parameter: Tissue Value: Shoot Apical Meristem Region
  misc_feature: MA Experiment ID: 108461 Result: Up-regulated in Transcription
  misc_feature: MA Experiment 108461 PARAMETER Experiment Name: At_Germinating_Seeds_cDNA_P Parameter: Age (day) Value: 1 vs. 0
  misc_feature: MA Experiment 108461 PARAMETER Experiment Name: At_Germinating_Seeds_cDNA_P Parameter: Tissue Value: Germinating Seeds
  misc_feature: MA Experiment ID: 108573 Result: Up-regulated in Transcription
  misc_feature: MA Experiment 108573 PARAMETER Experiment Name: At_Drought_cDNA_P Parameter: Timepoint (hr) Value: 6
  misc_feature: MA Experiment 108573 PARAMETER Experiment Name: At_Drought_cDNA_P Parameter: Tissue Value: Aerial
  misc_feature: MA Experiment 108573 PARAMETER Experiment Name: At_Drought_cDNA_P Parameter: Treatment Value: Drought vs. No Drought
  misc_feature: MA Experiment ID: 108577 Result: Down-regulated in Transcription
  misc_feature: MA Experiment 108577 PARAMETER Experiment Name: At_42deg_Heat_cDNA_P Parameter: Temperature (deg C) Value: 42 vs. 22
  misc_feature: MA Experiment 108577 PARAMETER Experiment Name: At_42deg_Heat_cDNA_P Parameter: Timepoint (hr) Value: 6
  misc_feature: MA Experiment 108577 PARAMETER Experiment Name: At_42deg_Heat_cDNA_P Parameter: Tissue Value: Aerial
  misc_feature: MA Experiment ID: 108585 Result: Down-regulated in Transcription
  misc_feature: MA Experiment 108585 PARAMETER Experiment Name: At_5mM_NaNP_cDNA_P Parameter: Timepoint (hr) Value: 6
  misc_feature: MA Experiment 108585 PARAMETER Experiment Name: At_5mM_NaNP_cDNA_P Parameter: Tissue Value: Aerial
  misc_feature: MA Experiment 108585 PARAMETER Experiment Name: At_5mM_NaNP_cDNA_P Parameter: Treatment Value: null
  misc_feature: MA Experiment ID: 108668 Result: Down-regulated in Transcription
  misc_feature: MA Experiment 108668 PARAMETER Experiment Name: At_2mM_SA_cDNA_P Parameter: Plant Line Value: WS
  misc_feature: MA Experiment 108668 PARAMETER Experiment Name: At_2mM_SA_cDNA_P Parameter: Timepoint (hr) Value: 6
  misc_feature: MA Experiment 108668 PARAMETER Experiment Name: At_2mM_SA_cDNA_P Parameter: Treatment Value: 2mM SA vs. No Treatment
  misc_feature: MA Experiment ID: 20000069 Result: Up-regulated in Transcription
  misc_feature: MA Experiment 20000069 PARAMETER Experiment Name: At_100uM_ABA_Mutants_cDNA_P Parameter: Plant Line Value: CS23
  misc_feature: MA Experiment 20000069 PARAMETER Experiment Name: At_100uM_ABA_Mutants_cDNA_P Parameter: Timepoint (hr) Value: 6
  misc_feature: MA Experiment 20000069 PARAMETER Experiment Name: At_100uM_ABA_Mutants_cDNA_P Parameter: Tissue Value: Aerial
  misc_feature: MA Experiment 20000069 PARAMETER Experiment Name: At_100uM_ABA_Mutants_cDNA_P Parameter: Treatment Value: 100uM ABA vs. No Treatment
  misc_feature: MA Experiment ID: 20000070 Result: Up-regulated in Transcription
  misc_feature: MA Experiment 20000070 PARAMETER Experiment Name: At_100uM_ABA_Mutants_cDNA_P Parameter: Plant Line Value: CS24
  misc_feature: MA Experiment 20000070 PARAMETER Experiment Name: At_100uM_ABA_Mutants_cDNA_P Parameter: Timepoint (hr) Value: 6
  misc_feature: MA Experiment 20000070 PARAMETER Experiment Name: At_100uM_ABA_Mutants_cDNA_P Parameter: Tissue Value: Aerial
  misc_feature: MA Experiment 20000070 PARAMETER Experiment Name: At_100uM_ABA_Mutants_cDNA_P Parameter: Treatment Value: 100uM ABA vs. No Treatment
  misc_feature: MA Experiment ID: 20000071 Result: Up-regulated in Transcription
  misc_feature: MA Experiment 20000071 PARAMETER Experiment Name: At_100uM_ABA_Mutants_cDNA_P Parameter: Plant Line Value: CS8104
  misc_feature: MA Experiment 20000071 PARAMETER Experiment Name: At_100uM_ABA_Mutants_cDNA_P Parameter: Timepoint (hr) Value: 6
  misc_feature: MA Experiment 20000071 PARAMETER Experiment Name: At_100uM_ABA_Mutants_cDNA_P Parameter: Tissue Value: Aerial
  misc_feature: MA Experiment 20000071 PARAMETER Experiment Name: At_100uM_ABA_Mutants_cDNA_P Parameter: Treatment Value: 100uM ABA vs. No Treatment
  misc_feature: MA Experiment ID: 20000072 Result: Up-regulated in Transcription
  misc_feature: MA Experiment 20000072 PARAMETER Experiment Name: At_100uM_ABA_Mutants_cDNA_P Parameter: Plant Line Value: CS8105
  misc_feature: MA Experiment 20000072 PARAMETER Experiment Name: At_100uM_ABA_Mutants_cDNA_P Parameter: Timepoint (hr) Value: 6
  misc_feature: MA Experiment 20000072 PARAMETER Experiment Name: At_100uM_ABA_Mutants_cDNA_P Parameter: Tissue Value: Aerial
  misc_feature: MA Experiment 20000072 PARAMETER Experiment Name: At_100uM_ABA_Mutants_cDNA_P Parameter: Treatment Value: 100uM ABA vs. No Treatment
  misc_feature: MA Experiment ID: 20000086 Result: Up-regulated in Transcription
  misc_feature: MA Experiment 20000086 PARAMETER Experiment Name: At_100uM_ABA_Mutants_cDNA_P Parameter: Plant Line Value: CS22
  misc_feature: MA Experiment 20000086 PARAMETER Experiment Name: At_100uM_ABA_Mutants_cDNA_P Parameter: Timepoint (hr) Value: 6
  misc_feature: MA Experiment 20000086 PARAMETER Experiment Name: At_100uM_ABA_Mutants_cDNA_P Parameter: Tissue Value: Aerial
  misc_feature: MA Experiment 20000086 PARAMETER Experiment Name: At_100uM_ABA_Mutants_cDNA_P Parameter: Treatment Value: 100uM ABA vs. No Treatment
  misc_feature: MA Experiment ID: 20000087 Result: Up-regulated in Transcription
  misc_feature: MA Experiment 20000087 PARAMETER Experiment Name: At_100uM_ABA_Mutants_cDNA_P Parameter: Plant Line Value: WS
  misc_feature: MA Experiment 20000087 PARAMETER Experiment Name: At_100uM_ABA_Mutants_cDNA_P Parameter: Timepoint (hr) Value: 6
  misc_feature: MA Experiment 20000087 PARAMETER Experiment Name: At_100uM_ABA_Mutants_cDNA_P Parameter: Tissue Value: Aerial
  misc_feature: MA Experiment 20000087 PARAMETER Experiment Name: At_100uM_ABA_Mutants_cDNA_P Parameter: Treatment Value: 100uM ABA vs. No Treatment
  misc_feature: MA Experiment ID: 20000088 Result: Up-regulated in Transcription
  misc_feature: MA Experiment 20000088 PARAMETER Experiment Name: At_100uM_ABA_Mutants_cDNA_P Parameter: Plant Line Value: Landsberg
  misc_feature: MA Experiment 20000088 PARAMETER Experiment Name: At_100uM_ABA_Mutants_cDNA_P Parameter: Timepoint (hr) Value: 6
  misc_feature: MA Experiment 20000088 PARAMETER Experiment Name: At_100uM_ABA_Mutants_cDNA_P Parameter: Tissue Value: Aerial
  misc_feature: MA Experiment 20000088 PARAMETER Experiment Name: At_100uM_ABA_Mutants_cDNA_P Parameter: Treatment Value: 100uM ABA vs. No Treatment
  misc_feature: MA Experiment ID: 20000089 Result: Up-regulated in Transcription
  misc_feature: MA Experiment ID: 20000090 Result: Up-regulated in Transcription
  misc_feature: MA Experiment ID: 20000111 Result: Down-regulated in Transcription
  misc_feature: MA Experiment 20000111 PARAMETER Experiment Name: At_42deg_Heat_cDNA_P Parameter: Temperature (deg C) Value: 42 vs. 22
  misc_feature: MA Experiment 20000111 PARAMETER Experiment Name: At_42deg_Heat_cDNA_P Parameter: Timepoint (hr) Value: 6
  misc_feature: MA Experiment 20000111 PARAMETER Experiment Name: At_42deg_Heat_cDNA_P Parameter: Tissue Value: Aerial
  misc_feature: MA Experiment ID: 20000113 Result: Down-regulated in Transcription
  misc_feature: MA Experiment 20000113 PARAMETER Experiment Name: At_42deg_Heat_cDNA_P Parameter: Temperature (deg C) Value: 42 vs. 22
  misc_feature: MA Experiment 20000113 PARAMETER Experiment Name: At_42deg_Heat_cDNA_P Parameter: Timepoint (hr) Value: 8
  misc_feature: MA Experiment 20000113 PARAMETER Experiment Name: At_42deg_Heat_cDNA_P Parameter: Tissue Value: Aerial
  misc_feature: MA Experiment ID: 20000117 Result: Up-regulated in Transcription
  misc_feature: MA Experiment 20000117 PARAMETER Experiment Name: At_100uM_ABA_Mutants_cDNA_P Parameter: Plant Line Value: Columbia
  misc_feature: MA Experiment 20000117 PARAMETER Experiment Name: At_100uM_ABA_Mutants_cDNA_P Parameter: Timepoint (hr) Value: 6
  misc_feature: MA Experiment 20000117 PARAMETER Experiment Name: At_100uM_ABA_Mutants_cDNA_P Parameter: Tissue Value: Aerial
  misc_feature: MA Experiment 20000117 PARAMETER Experiment Name: At_100uM_ABA_Mutants_cDNA_P Parameter: Treatment Value: 100uM ABA vs. No Treatment
  misc_feature: Pfam Name: Aldedh Pfam Description: Aldehyde dehydrogenase family
ccacgcgtccgcactagtgttcgtcatctttgttcgattgaagtttgggaagtggtgatggtaataggagcagcagcgcgtgtagccatcggcggttgtcgaaagctcatctcgtcacatacctccctcctcctcgtctcttctcagtgtcgccagatgagtatggacgcacaaagcgtttctgaaaagcttaggagttctggtctattacgaactcaaggtctaattggaggcaagtggcttgactcgtatgacaataagacaatcaaggttaacaatccagcaaccggtgaaattatagctgatgttgcatgtatgggaacaaaagagacaaatgatgctattgcttcttcttatgaagcatttacttcttggagcagattgactgctggagagaggagtaaagttttacggagatggtatgacctcctgattgcacacaaggaagaacttggacaacttataactttggagcaaggaaaaccactcaaggaagccatcggagaggtagcatatggggcaagttttattgagtactatgcggaggaggcaaaacgtgtatatggtgatataattcctccgaatctgtctgatcgccgactgttggttctaaaacagcctgtcggtgttgttggtgcaattaccccttggaacttccccttagccatgattactcggaaggtcggccctgctcttgcttctggatgcacggtggttgttaaaccatctgaacttacgcccctaacagcacttgctgcggctgaacttgcacttcaagctggagttcctccgggggcacttaatgtggtcatgggaaatgctcctgaaattggggatgctttgcttacgagtccacaggtgagaaaaatcacgttcacgggatcaacagcagttgggaagaagttgatggcagctgctgcacctaccgtcaagaaggtttctctagaacttggcggcaacgcaccctctatagtatttgatgatgcagacctggatgtagctgtaaaaggaacgcttgcagcgaaatttaggaatagtggtcagacatgtgtttgtgcgaacagagtacttgtgcaagatggtatctatgataaatttgctgaggccttttctgaagcggttcaaaaattagaagtaggagatgggtttagggatgggacaacccagggtccacttataaatgatgcagcagtgcaaaaggtagagacatttgtacaagatgctgtttctaagggagcaaaaatcatcattggtggcaaaaggcacagtctagggatgactttctatgagcctactgttatccgcgatgtttcggataacatgatcatgtctaaggaggagatttttggacctgtagctccccttattcggttcaaaaccgaggaggacgctatcagaattgctaatgacacaattgcaggacttgctgcttatatattcacaaacagtgtccaaagatcttggcgtgtatttgaagcacttgaatatggacttgtaggggtgaacgaaggactcatatcaacagaggtggctccattcgggggagtgaagcagtctggtcttggaagggaaggatccaagtatggtatggacgaataccttgagatcaaatacgtatgcttgggagatatgaatagacactgatttggtttgtttgaaaagctttagaaattgtaagtttttctcctccactcgtatccttct

SEQ ID NO: 76164 - protein, 547 aa, Arabidopsis thaliana
  peptide (1)..(547): Ceres Seq. ID no. 7106998
  misc_feature: Pfam Name: Aldedh Pfam Description: Aldehyde dehydrogenase family
  misc_feature (20)..(547): Homolog of NCBI NO: 15219379 NR Description: succinic semialdehyde dehydrogenase (gabD), protein id: At1g79440.1, supported by cDNA: gi_15810164, by cDNA: gi_16226914, supported by cDNA: gi_6684441 [Arabidopsis
  misc_feature (55)..(547): Homolog of NCBI NO: 25284177 NR Description: hypothetical protein T8K14.14 [imported] - thaliana >gi|4835765|gb|AAD30232.1|AC007202_14 Is a member of the
  misc_feature (64)..(542): Homolog of NCBI NO: 23014760 NR Description: hypothetical protein [Magnetospirillum
  misc_feature (63)..(542): Homolog of NCBI NO: 16130575 NR Description: succinate-semialdehyde dehydrogenase,
  misc_feature (63)..(542): Homolog of NCBI NO: 15595462 NR Description: succinate-semialdehyde dehydrogenase [Pseudomonas
  misc_feature (63)..(540): Homolog of NCBI NO: 16119363 NR Description: AGR_pAT_197p [Agrobacterium tumefaciens]
  misc_feature (63)..(540): Homolog of NCBI NO: 17938723 NR Description: NAD-dependent succinate aldehyde dehydrogenases
  misc_feature (63)..(540): Homolog of NCBI NO: 17223783 NR Description: AttK [Agrobacterium tumefaciens]
  misc_feature (63)..(542): Homolog of NCBI NO: 15803178 NR Description: succinate-semialdehyde dehydrogenase, activity [Escherichia coli O157:H7 EDL933]
  misc_feature (69)..(542): Homolog of NCBI NO: 27479656 NR Description: Orf17 [Photorhabdus luminescens]
PRVRTSVRHLCSIEVWEVVMVIGAAARVAIGGCRKLISSHTSLLLVSSQCRQMSMDAQSVSEKLRSSGLLRTQGLIGGKWLDSYDNKTIKVNNPATGEIIADVACMGTKETNDAIASSYEAFTSWSRLTAGERSKVLRRWYDLLIAHKEELGQLITLEQGKPLKEAIGEVAYGASFIEYYAEEAKRVYGDIIPPNLSDRRLLVLKQPVGVVGAITPWNFPLAMITRKVGPALASGCTVVVKPSELTPLTALAAAELALQAGVPPGALNVVMGNAPEIGDALLTSPQVRKITFTGSTAVGKKLMAAAAPTVKKVSLELGGNAPSIVFDDADLDVAVKGTLAAKFRNSGQTCVCANRVLVQDGIYDKFAEAFSEAVQKLEVGDGFRDGTTQGPLINDAAVQKVETFVQDAVSKGAKIIIGGKRHSLGMTFYEPTVIRDVSDNMIMSKEEIFGPVAPLIRFKTEEDAIRIANDTIAGLAAYIFTNSVQRSWRVFEALEYGLVGVNEGLISTEVAPFGGVKQSGLGREGSKYGMDEYLEIKYVCLGDMNRH

SEQ ID NO: 76165 - protein, 528 aa, Arabidopsis thaliana; identical to SEQ ID NO: 40529
  peptide (1)..(528): Ceres Seq. ID no. 7106999
  misc_feature: Pfam Name: Aldedh Pfam Description: Aldehyde dehydrogenase family
  misc_feature (1)..(528): Homolog of NCBI NO: 15219379 NR Description: succinic semialdehyde dehydrogenase (gabD), protein id: At1g79440.1, supported by cDNA: gi_15810164, by cDNA: gi_16226914, supported by cDNA: gi_6684441 [Arabidopsis
  misc_feature (36)..(528): Homolog of NCBI NO: 25284177 NR Description: hypothetical protein T8K14.14 [imported] - thaliana >gi|4835765|gb|AAD30232.1|AC007202_14 Is a member of the
  misc_feature (45)..(523): Homolog of NCBI NO: 23014760 NR Description: hypothetical protein [Magnetospirillum
  misc_feature (44)..(523): Homolog of NCBI NO: 16130575 NR Description: succinate-semialdehyde dehydrogenase,
  misc_feature (44)..(523): Homolog of NCBI NO: 15595462 NR Description: succinate-semialdehyde dehydrogenase [Pseudomonas
  misc_feature (44)..(521): Homolog of NCBI NO: 16119363 NR Description: AGR_pAT_197p [Agrobacterium tumefaciens]
  misc_feature (44)..(521): Homolog of NCBI NO: 17938723 NR Description: NAD-dependent succinate aldehyde dehydrogenases
  misc_feature (44)..(521): Homolog of NCBI NO: 17223783 NR Description: AttK [Agrobacterium tumefaciens]
  misc_feature (44)..(523): Homolog of NCBI NO: 15803178 NR Description: succinate-semialdehyde dehydrogenase, activity [Escherichia coli O157:H7 EDL933]
  misc_feature (50)..(523): Homolog of NCBI NO: 27479656 NR Description: Orf17 [Photorhabdus luminescens]

SEQ ID NO: 76166 - protein, 495 aa, Arabidopsis thaliana; identical to SEQ ID NO: 40530
  peptide (1)..(495): Ceres Seq. ID no. 7107000
  misc_feature: Pfam Name: Aldedh Pfam Description: Aldehyde dehydrogenase family
  misc_feature (1)..(495): Homolog of NCBI NO: 15219379 NR Description: succinic semialdehyde dehydrogenase (gabD), protein id: At1g79440.1, supported by cDNA: gi_15810164, by cDNA: gi_16226914, supported by cDNA: gi_6684441 [Arabidopsis
  misc_feature (3)..(495): Homolog of NCBI NO: 25284177 NR Description: hypothetical protein T8K14.14 [imported] - thaliana >gi|4835765|gb|AAD30232.1|AC007202_14 Is a member of the
  misc_feature (12)..(490): Homolog of NCBI NO: 23014760 NR Description: hypothetical protein [Magnetospirillum
  misc_feature (11)..(490): Homolog of NCBI NO: 16130575 NR Description: succinate-semialdehyde dehydrogenase,
  misc_feature (11)..(490): Homolog of NCBI NO: 15595462 NR Description: succinate-semialdehyde dehydrogenase [Pseudomonas
  misc_feature (11)..(488): Homolog of NCBI NO: 16119363 NR Description: AGR_pAT_197p [Agrobacterium tumefaciens]
  misc_feature (11)..(488): Homolog of NCBI NO: 17938723 NR Description: NAD-dependent succinate aldehyde dehydrogenases
  misc_feature (11)..(488): Homolog of NCBI NO: 17223783 NR Description: AttK [Agrobacterium tumefaciens]
  misc_feature (11)..(490): Homolog of NCBI NO: 15803178 NR Description: succinate-semialdehyde dehydrogenase, activity [Escherichia coli O157:H7 EDL933]
  misc_feature (17)..(490): Homolog of NCBI NO: 27479656 NR Description: Orf17 [Photorhabdus luminescens]

SEQ ID NO: 76167 - DNA, 1085 bp, Arabidopsis thaliana
  misc_feature (1)..(1085): Ceres Seq. ID no. 7107013
  misc_feature: MA Experiment ID: 108461 Result: Up-regulated in Transcription
  misc_feature: MA Experiment 108461 PARAMETER Experiment Name: At_Germinating_Seeds_cDNA_P Parameter: Age (day) Value: 1 vs. 0
  misc_feature: MA Experiment 108461 PARAMETER Experiment Name: At_Germinating_Seeds_cDNA_P Parameter: Tissue Value: Germinating Seeds
  misc_feature: MA Experiment ID: 108462 Result: Up-regulated in Transcription
  misc_feature: MA Experiment 108462 PARAMETER Experiment Name: At_Germinating_Seeds_cDNA_P Parameter: Age (day) Value: 2 vs. 0
  misc_feature: MA Experiment 108462 PARAMETER Experiment Name: At_Germinating_Seeds_cDNA_P Parameter: Tissue Value: Germinating Seeds
  misc_feature: MA Experiment ID: 20000171 Result: Up-regulated in Transcription
  misc_feature: MA Experiment 20000171 PARAMETER Experiment Name: At_42deg_Heat_P Parameter: Age (day) Value: 14
  misc_feature: MA Experiment 20000171 PARAMETER Experiment Name: At_42deg_Heat_P Parameter: Organism Value: A. thaliana
  misc_feature: MA Experiment 20000171 PARAMETER Experiment Name: At_42deg_Heat_P Parameter: Plant Line Value: WS
  misc_feature: MA Experiment 20000171 PARAMETER Experiment Name: At_42deg_Heat_P Parameter: Temperature (deg C) Value: 42 vs. 22
  misc_feature: MA Experiment 20000171 PARAMETER Experiment Name: At_42deg_Heat_P Parameter: Timepoint (hr) Value: 1
  misc_feature: MA Experiment 20000171 PARAMETER Experiment Name: At_42deg_Heat_P Parameter: Tissue Value: Aerial
  misc_feature: MA Experiment ID: 20000173 Result: Up-regulated in Transcription
  misc_feature: MA Experiment 20000173 PARAMETER Experiment Name: At_42deg_Heat_P Parameter: Age (day) Value: 14
  misc_feature: MA Experiment 20000173 PARAMETER Experiment Name: At_42deg_Heat_P Parameter: Organism Value: A. thaliana
  misc_feature: MA Experiment 20000173 PARAMETER Experiment Name: At_42deg_Heat_P Parameter: Plant Line Value: WS
  misc_feature: MA Experiment 20000173 PARAMETER Experiment Name: At_42deg_Heat_P Parameter: Temperature (deg C) Value: 42 vs. 22
  misc_feature: MA Experiment 20000173 PARAMETER Experiment Name: At_42deg_Heat_P Parameter: Timepoint (hr) Value: 6
  misc_feature: MA Experiment 20000173 PARAMETER Experiment Name: At_42deg_Heat_P Parameter: Tissue Value: Aerial
  misc_feature: MA Experiment ID: 20000182 Result: Up-regulated in Transcription
  misc_feature: MA Experiment 20000182 PARAMETER Experiment Name: At_2mM_SA_P Parameter: Age (day) Value: 14
  misc_feature: MA Experiment 20000182 PARAMETER Experiment Name: At_2mM_SA_P Parameter: Organism Value: A. thaliana
  misc_feature: MA Experiment 20000182 PARAMETER Experiment Name: At_2mM_SA_P Parameter: Plant Line Value: WS
  misc_feature: MA Experiment 20000182 PARAMETER Experiment Name: At_2mM_SA_P Parameter: Timepoint (hr) Value: 6
  misc_feature: MA Experiment 20000182 PARAMETER Experiment Name: At_2mM_SA_P Parameter: Tissue Value: Aerial
  misc_feature: MA Experiment 20000182 PARAMETER Experiment Name: At_2mM_SA_P Parameter: Treatment Value: 2mM SA vs. No Treatment
  misc_feature: MA Experiment ID: 20000227 Result: Down-regulated in Transcription
  misc_feature: MA Experiment 20000227 PARAMETER Experiment Name: At_Root-Tips-vs-Tops_P Parameter: Tissue Value: Root Tips vs. Root Tops
  misc_feature: MA Experiment ID: 20000234 Result: Down-regulated in Transcription
  misc_feature: MA Experiment 20000234 PARAMETER Experiment Name: At_Siliques_P Parameter: Age (day) Value: 21
  misc_feature: MA Experiment 20000234 PARAMETER Experiment Name: At_Siliques_P Parameter: Organism Value: A. thaliana
  misc_feature: MA Experiment 20000234 PARAMETER Experiment Name: At_Siliques_P Parameter: Plant Line Value: WS
  misc_feature: MA Experiment 20000234 PARAMETER Experiment Name: At_Siliques_P Parameter: Tissue Value: Less Than 5mm Siliques vs. Whole Plant
  misc_feature: MA Experiment ID: 20000286 Result: Down-regulated in Transcription
  misc_feature: MA Experiment 20000286 PARAMETER Experiment Name: At_Open_Flower_P Parameter: Age (day) Value: 21
  misc_feature: MA Experiment 20000286 PARAMETER Experiment Name: At_Open_Flower_P Parameter: Plant Line Value: WS
  misc_feature: MA Experiment 20000286 PARAMETER Experiment Name: At_Open_Flower_P Parameter: Tissue Value: Half Open vs. Whole Plant
  misc_feature: MA Experiment ID: 20000495 Result: Down-regulated in Transcription
  misc_feature: MA Experiment 20000495 PARAMETER Experiment Name: At_Guard_Cells_P Parameter: Harvest Date Value: 8/2/2002
  misc_feature: MA Experiment 20000495 PARAMETER Experiment Name: At_Guard_Cells_P Parameter: Organism Value: A. thaliana
  misc_feature: MA Experiment 20000495 PARAMETER Experiment Name: At_Guard_Cells_P Parameter: Tissue Value: Guard Cells vs. Leaves
  misc_feature: MA Experiment ID: 20001558 Result: Down-regulated in Transcription
  misc_feature: MA Experiment 20001558 PARAMETER Experiment Name: At_Drought_Soil_Dry_P Parameter: Age (day) Value: 27
  misc_feature: MA Experiment 20001558 PARAMETER Experiment Name: At_Drought_Soil_Dry_P Parameter: Organism Value: A. thaliana
  misc_feature: MA Experiment 20001558 PARAMETER Experiment Name: At_Drought_Soil_Dry_P Parameter: Plant Line Value: WS
  misc_feature: MA Experiment 20001558 PARAMETER Experiment Name: At_Drought_Soil_Dry_P Parameter: Post Timepoint (hr) Value: 6
  misc_feature: MA Experiment 20001558 PARAMETER Experiment Name: At_Drought_Soil_Dry_P Parameter: Post-Treatment Value: Re-Water vs. No Drought
  misc_feature: MA Experiment 20001558 PARAMETER Experiment Name: At_Drought_Soil_Dry_P Parameter: Timepoint (day) Value: 13
  misc_feature: MA Experiment 20001558 PARAMETER Experiment Name: At_Drought_Soil_Dry_P Parameter: Treatment Value: Drought vs. No Drought
gtcgacccacgcgtccgcgattctcaaagtcaagcaaaaaaaacgaaacaatggatgcgttctcttccttcttcgattctcaacctggtagcagaagctggagctatgattctcttaaaaacttccgtcagatttctccagccgttcagaatcatcttaaacgggtttatttgaccttatgttgtgctcttgtggcgtctgcctttggagcttacctccatgtgctctggaatatcggcggtattcttacaacgattggatgtattggaactatgatttggctcctttcatgtcctccttatgaacaccaaaaaaggctttctcttctgtttgtgtctgctgttcttgaaggtgcttctgttggccccttgatcaaagtggcaattgatgttgacccaagcatccttatcactgcatttgttggaactgcgatagcgtttgtctgtttctcagcagcagcaatgttagcaagacgcagggagtatctctaccttggaggactgctttcatctggcttgtctatgctaatgtggctccagtttgcctcttcaatctttggtggctctgcatctatctttaagtttgagttgtactttggacttttgatctttgtgggatacatggtggtggacacacaagagattatagaaaaggcacacctcggtgacatggactatgtaaaacattcgttgacccttttcactgactttgtagctgtgtttgttcggattctcatcataatgttgaagaactcagcagataaagaagagaagaagaagaaaaggagaaactgaggggatgtaaagtaaatttaactttatggttgttatcgtgtgtggccactttgaagatattacttgttagcactctctattggtgaccagacatgtttccactaaaaaggatctgcttgtttcacttctgcacaagtaccatcttcagattgtaaatgactcgagtgttgttcttcttttcataaacttttgttctttaagagtttggttctactgattgcatcttaccaagctaagaataatgtaggaaaatgataatcctgtttaaattttctaaaatgtgtgcatttc

SEQ ID NO: 76168 - protein, 263 aa, Arabidopsis thaliana
  peptide (1)..(263): Ceres Seq. ID no. 7107014
  misc_feature (42)..(251): Pfam Name: Uncharacterised protein family UPF0005 Pfam Description: Uncharacterised protein family UPF0005
  misc_feature (17)..(263): Homolog of NCBI NO: 15238017 NR Description: Bax inhibitor-1 like; protein id: At5g47120.1, by cDNA: 36400., supported by cDNA: gi_11493974, supported by
  misc_feature (17)..(263): Homolog of NCBI NO: 21593125 NR Description: Bax inhibitor-1 like [Arabidopsis thaliana]
  misc_feature (17)..(263): Homolog of NCBI NO: 14719274 NR Description: Bax inhibitor 1 [Brassica napus]
  misc_feature (17)..(261): Homolog of NCBI NO: 17981376 NR Description: bax inhibitor-like protein [Brassica oleracea]
  misc_feature (17)..(263): Homolog of NCBI NO: 14719276 NR Description: Bax inhibitor 1 [Nicotiana tabacum]
  misc_feature (17)..(263): Homolog of NCBI NO: 12229685 NR Description: Bax inhibitor-1 (BI-1) (OsBI-1)
  misc_feature (17)..(262): Homolog of NCBI NO: 13940165 NR Description: BAX inhibitor 1 [Hordeum vulgare subsp. vulgare]
  misc_feature (33)..(263): Homolog of NCBI NO: 15236582 NR Description: Bax inhibitor-1-like protein; protein id:
  misc_feature (77)..(254): Homolog of NCBI NO: 15238018 NR Description: putative protein; protein id: At5g47130.1
  misc_feature (26)..(170): Homolog of NCBI NO: 27526517 NR Description: putative BAX inhibitor 1 [Hordeum vulgare subsp.
RPTRPRFSKSSKKNETMDAFSSFFDSQPGSRSWSYDSLKNFRQISPAVQNHLKRVYLTLCCALVASAFGAYLHVLWNIGGILTTIGCIGTMIWLLSCPPYEHQKRLSLLFVSAVLEGASVGPLIKVAIDVDPSILITAFVGTAIAFVCFSAAAMLARRREYLYLGGLLSSGLSMLMWLQFASSIFGGSASIFKFELYFGLLIFVGYMVVDTQEIIEKAHLGDMDYVKHSLTLFTDFVAVFVRILIIMLKNSADKEEKKKKRRN

SEQ ID NO: 76169 - protein, 247 aa, Arabidopsis thaliana; identical to SEQ ID NO: 23441
  peptide (1)..(247): Ceres Seq. ID no. 7107015
  misc_feature (26)..(235): Pfam Name: Uncharacterised protein family UPF0005 Pfam Description: Uncharacterised protein family UPF0005
  misc_feature (1)..(247): Homolog of NCBI NO: 15238017 NR Description: Bax inhibitor-1 like; protein id: At5g47120.1, by cDNA: 36400., supported by cDNA: gi_11493974, supported by
  misc_feature (1)..(247): Homolog of NCBI NO: 21593125 NR Description: Bax inhibitor-1 like [Arabidopsis thaliana]
  misc_feature (1)..(247): Homolog of NCBI NO: 14719274 NR Description: Bax inhibitor 1 [Brassica napus]
  misc_feature (1)..(245): Homolog of NCBI NO: 17981376 NR Description: bax inhibitor-like protein [Brassica oleracea]
  misc_feature (1)..(247): Homolog of NCBI NO: 14719276 NR Description: Bax inhibitor 1 [Nicotiana tabacum]
  misc_feature (1)..(247): Homolog of NCBI NO: 12229685 NR Description: Bax inhibitor-1 (BI-1) (OsBI-1)
  misc_feature (1)..(246): Homolog of NCBI NO: 13940165 NR Description: BAX inhibitor 1 [Hordeum vulgare subsp. vulgare]
  misc_feature (17)..(247): Homolog of NCBI NO: 15236582 NR Description: Bax inhibitor-1-like protein; protein id:
  misc_feature (61)..(238): Homolog of NCBI NO: 15238018 NR Description: putative protein; protein id: At5g47130.1
  misc_feature (10)..(154): Homolog of NCBI NO: 27526517 NR Description: putative BAX inhibitor 1 [Hordeum vulgare subsp.

SEQ ID NO: 76170 - protein, 173 aa, Arabidopsis thaliana; identical to SEQ ID NO: 23442
  peptide (1)..(173): Ceres Seq. ID no. 7107016
  misc_feature (1)..(161): Pfam Name: Uncharacterised protein family UPF0005 Pfam Description: Uncharacterised protein family UPF0005
  misc_feature (1)..(173): Homolog of NCBI NO: 15238017 NR Description: Bax inhibitor-1 like; protein id: At5g47120.1, by cDNA: 36400., supported by cDNA: gi_11493974, supported by
  misc_feature (1)..(173): Homolog of NCBI NO: 21593125 NR Description: Bax inhibitor-1 like [Arabidopsis thaliana]
  misc_feature (1)..(173): Homolog of NCBI NO: 14719274 NR Description: Bax inhibitor 1 [Brassica napus]
  misc_feature (1)..(171): Homolog of NCBI NO: 17981376 NR Description: bax inhibitor-like protein [Brassica oleracea]
  misc_feature (1)..(173): Homolog of NCBI NO: 14719276 NR Description: Bax inhibitor 1 [Nicotiana tabacum]
  misc_feature (1)..(173): Homolog of NCBI NO: 12229685 NR Description: Bax inhibitor-1 (BI-1) (OsBI-1)
  misc_feature (1)..(172): Homolog of NCBI NO: 13940165 NR Description: BAX inhibitor 1 [Hordeum vulgare subsp. vulgare]
  misc_feature (1)..(173): Homolog of NCBI NO: 15236582 NR Description: Bax inhibitor-1-like protein; protein id:
  misc_feature (1)..(164): Homolog of NCBI NO: 15238018 NR Description: putative protein; protein id: At5g47130.1
  misc_feature (1)..(80): Homolog of NCBI NO: 27526517 NR Description: putative BAX inhibitor 1 [Hordeum vulgare subsp.

SEQ ID NO: 76171 - DNA, 521 bp, Arabidopsis thaliana
  misc_feature (1)..(521): Ceres Seq. ID no. 7107017
  misc_feature: MA Experiment ID: 108434 Result: Down-regulated in Transcription
  misc_feature: MA Experiment 108434 PARAMETER Experiment Name: At_Root_Tips_cDNA_P Parameter: Tissue Value: Root Tips
  misc_feature: MA Experiment ID: 108435 Result: Up-regulated in Transcription
  misc_feature: MA Experiment 108435 PARAMETER Experiment Name: At_stm_Mutants_cDNA_P Parameter: Plant Line Value: wt Landsburg vs stm
  misc_feature: MA Experiment 108435 PARAMETER Experiment Name: At_stm_Mutants_cDNA_P Parameter: Tissue Value: Shoot Apical Meristem Region
  misc_feature: MA Experiment ID: 108461 Result: Up-regulated in Transcription
  misc_feature: MA Experiment 108461 PARAMETER Experiment Name: At_Germinating_Seeds_cDNA_P Parameter: Age (day) Value: 1 vs. 0
  misc_feature: MA Experiment 108461 PARAMETER Experiment Name: At_Germinating_Seeds_cDNA_P Parameter: Tissue Value: Germinating Seeds
  misc_feature: MA Experiment ID: 108462 Result: Up-regulated in Transcription
  misc_feature: MA Experiment 108462 PARAMETER Experiment Name: At_Germinating_Seeds_cDNA_P Parameter: Age (day) Value: 2 vs. 0
  misc_feature: MA Experiment 108462 PARAMETER Experiment Name: At_Germinating_Seeds_cDNA_P Parameter: Tissue Value: Germinating Seeds
  misc_feature: MA Experiment ID: 108561 Result: Down-regulated in Transcription
  misc_feature: MA Experiment 108561 PARAMETER Experiment Name: At_100uM_ABA_cDNA_P Parameter: Timepoint (hr) Value: 6
  misc_feature: MA Experiment 108561 PARAMETER Experiment Name: At_100uM_ABA_cDNA_P Parameter: Tissue Value: Aerial
  misc_feature: MA Experiment 108561 PARAMETER Experiment Name: At_100uM_ABA_cDNA_P Parameter: Treatment Value: 100uM ABA vs. No Treatment
  misc_feature: MA Experiment ID: 108577 Result: Down-regulated in Transcription
  misc_feature: MA Experiment 108577 PARAMETER Experiment Name: At_42deg_Heat_cDNA_P Parameter: Temperature (deg C) Value: 42 vs. 22
  misc_feature: MA Experiment 108577 PARAMETER Experiment Name: At_42deg_Heat_cDNA_P Parameter: Timepoint (hr) Value: 6
  misc_feature: MA Experiment 108577 PARAMETER Experiment Name: At_42deg_Heat_cDNA_P Parameter: Tissue Value: Aerial
  misc_feature: MA Experiment ID: 108595 Result: Up-regulated in Transcription
  misc_feature: MA Experiment 108595 PARAMETER Experiment Name: At_Ler-pi_Ovule_cDNA_P Parameter: Plant Line Value: null
  misc_feature: MA Experiment ID: 20000069 Result: Down-regulated in Transcription
  misc_feature: MA Experiment 20000069 PARAMETER Experiment Name: At_100uM_ABA_Mutants_cDNA_P Parameter: Plant Line Value: CS23
  misc_feature: MA Experiment 20000069 PARAMETER Experiment Name: At_100uM_ABA_Mutants_cDNA_P Parameter: Timepoint (hr) Value: 6
  misc_feature: MA Experiment 20000069 PARAMETER Experiment Name: At_100uM_ABA_Mutants_cDNA_P Parameter: Tissue Value: Aerial
  misc_feature: MA Experiment 20000069 PARAMETER Experiment Name: At_100uM_ABA_Mutants_cDNA_P Parameter: Treatment Value: 100uM ABA vs. No Treatment
  misc_feature: MA Experiment ID: 20000093 Result: Down-regulated in Transcription
  misc_feature: MA Experiment 20000093 PARAMETER Experiment Name: At_42deg_Heat_cDNA_P Parameter: Temperature (deg C) Value: 42 vs. 22
  misc_feature: MA Experiment 20000093 PARAMETER Experiment Name: At_42deg_Heat_cDNA_P Parameter: Timepoint (hr) Value: 0.5
  misc_feature: MA Experiment 20000093 PARAMETER Experiment Name: At_42deg_Heat_cDNA_P Parameter: Tissue Value: Aerial
  misc_feature: MA Experiment ID: 20000111 Result: Down-regulated in Transcription
  misc_feature: MA Experiment 20000111 PARAMETER Experiment Name: At_42deg_Heat_cDNA_P Parameter: Temperature (deg C) Value: 42 vs. 22
  misc_feature: MA Experiment 20000111 PARAMETER Experiment Name: At_42deg_Heat_cDNA_P Parameter: Timepoint (hr) Value: 6
  misc_feature: MA Experiment 20000111 PARAMETER Experiment Name: At_42deg_Heat_cDNA_P Parameter: Tissue Value: Aerial
  misc_feature: MA Experiment ID: 20000112 Result: Down-regulated in Transcription
  misc_feature: MA Experiment 20000112 PARAMETER Experiment Name: At_42deg_Heat_cDNA_P Parameter: Temperature (deg C) Value: 42 vs. 22
  misc_feature: MA Experiment 20000112 PARAMETER Experiment Name: At_42deg_Heat_cDNA_P Parameter: Timepoint (hr) Value: 2
  misc_feature: MA Experiment 20000112 PARAMETER Experiment Name: At_42deg_Heat_cDNA_P Parameter: Tissue Value: Aerial
  misc_feature: MA Experiment ID: 20000113 Result: Down-regulated in Transcription
  misc_feature: MA Experiment 20000113 PARAMETER Experiment Name: At_42deg_Heat_cDNA_P Parameter: Temperature (deg C) Value: 42 vs. 22
  misc_feature: MA Experiment 20000113 PARAMETER Experiment Name: At_42deg_Heat_cDNA_P Parameter: Timepoint (hr) Value: 8
  misc_feature: MA Experiment 20000113 PARAMETER Experiment Name: At_42deg_Heat_cDNA_P Parameter: Tissue Value: Aerial
  misc_feature: MA Experiment ID: 20000117 Result: Down-regulated in Transcription
  misc_feature: MA Experiment 20000117 PARAMETER Experiment Name: At_100uM_ABA_Mutants_cDNA_P Parameter: Plant Line Value: Columbia
  misc_feature: MA Experiment 20000117 PARAMETER Experiment Name: At_100uM_ABA_Mutants_cDNA_P Parameter: Timepoint (hr) Value: 6
  misc_feature: MA Experiment 20000117 PARAMETER Experiment Name: At_100uM_ABA_Mutants_cDNA_P Parameter: Tissue Value: Aerial
  misc_feature: MA Experiment 20000117 PARAMETER Experiment Name: At_100uM_ABA_Mutants_cDNA_P Parameter: Treatment Value: 100uM ABA vs. No Treatment
  misc_feature: MA Experiment ID: 20000144 Result: Down-regulated in Transcription
  misc_feature: MA Experiment 20000144 PARAMETER Experiment Name: At_42deg_Heat_cDNA_P Parameter: Temperature (deg C) Value: 42 vs. 22
  misc_feature: MA Experiment 20000144 PARAMETER Experiment Name: At_42deg_Heat_cDNA_P Parameter: Timepoint (hr) Value: 1
  misc_feature: MA Experiment 20000144 PARAMETER Experiment Name: At_42deg_Heat_cDNA_P Parameter: Tissue Value: Aerial
  misc_feature: MA Experiment ID: 20000171 Result: Down-regulated in Transcription
  misc_feature: MA Experiment 20000171 PARAMETER Experiment Name: At_42deg_Heat_P Parameter: Age (day) Value: 14
  misc_feature: MA Experiment 20000171 PARAMETER Experiment Name: At_42deg_Heat_P Parameter: Organism Value: A. thaliana
  misc_feature: MA Experiment 20000171 PARAMETER Experiment Name: At_42deg_Heat_P Parameter: Plant Line Value: WS
  misc_feature: MA Experiment 20000171 PARAMETER Experiment Name: At_42deg_Heat_P Parameter: Temperature (deg C) Value: 42 vs. 22
  misc_feature: MA Experiment 20000171 PARAMETER Experiment Name: At_42deg_Heat_P Parameter: Timepoint (hr) Value: 1
  misc_feature: MA Experiment 20000171 PARAMETER Experiment Name: At_42deg_Heat_P Parameter: Tissue Value: Aerial
  misc_feature: MA Experiment ID: 20000173 Result: Down-regulated in Transcription
  misc_feature: MA Experiment 20000173 PARAMETER Experiment Name: At_42deg_Heat_P Parameter: Age (day) Value: 14
  misc_feature: MA Experiment 20000173 PARAMETER Experiment Name: At_42deg_Heat_P Parameter: Organism Value: A. thaliana
  misc_feature: MA Experiment 20000173 PARAMETER Experiment Name: At_42deg_Heat_P Parameter: Plant Line Value: WS
  misc_feature: MA Experiment 20000173 PARAMETER Experiment Name: At_42deg_Heat_P Parameter: Temperature (deg C) Value: 42 vs. 22
  misc_feature: MA Experiment 20000173 PARAMETER Experiment Name: At_42deg_Heat_P Parameter: Timepoint (hr) Value: 6
  misc_feature: MA Experiment 20000173 PARAMETER Experiment Name: At_42deg_Heat_P Parameter: Tissue Value: Aerial
  misc_feature: MA Experiment ID: 20000179 Result: Up-regulated in Transcription
  misc_feature: MA Experiment 20000179 PARAMETER Experiment Name: At_Germinating_Seeds_P Parameter: Age (hr) Value: 6 vs. 0
  misc_feature: MA Experiment 20000179 PARAMETER Experiment Name: At_Germinating_Seeds_P Parameter: Tissue Value: Germinating Seeds
  misc_feature: MA Experiment ID: 20000180 Result: Up-regulated in Transcription
  misc_feature: MA Experiment 20000180 PARAMETER Experiment Name: At_Germinating_Seeds_P Parameter: Age (hr) Value: 24 vs. 0
  misc_feature: MA Experiment 20000180 PARAMETER Experiment Name: At_Germinating_Seeds_P Parameter: Tissue Value: Germinating Seeds
  misc_feature: MA Experiment ID: 20000184 Result: Down-regulated in Transcription
  misc_feature: MA Experiment 20000184 PARAMETER Experiment Name: At_Shoots__P Parameter: Age (day) Value: 7
  misc_feature: MA Experiment 20000184 PARAMETER Experiment Name: At_Shoots__P Parameter: Tissue Value: Shoots vs. Whole Plant
  misc_feature: MA Experiment ID: 20000185 Result: Down-regulated in Transcription
  misc_feature: MA Experiment 20000185 PARAMETER Experiment Name: At_Roots__P Parameter: Age (day) Value: 7 vs. 21
  misc_feature: MA Experiment 20000185 PARAMETER Experiment Name: At_Roots__P Parameter: Organism Value: A. thaliana
  misc_feature: MA Experiment 20000185 PARAMETER Experiment Name: At_Roots__P Parameter: Tissue Value: Roots vs. Whole Plant
  misc_feature: MA Experiment ID: 20000224 Result: Up-regulated in Transcription
  misc_feature: MA Experiment ID: 20000227 Result: Down-regulated in Transcription
  misc_feature: MA Experiment 20000227 PARAMETER Experiment Name: At_Root-Tips-vs-Tops_P Parameter: Tissue Value: Root Tips vs. Root Tops
  misc_feature: MA Experiment ID: 20000234 Result: Up-regulated in Transcription
  misc_feature: MA Experiment 20000234 PARAMETER Experiment Name: At_Siliques_P Parameter: Age (day) Value: 21
  misc_feature: MA Experiment 20000234 PARAMETER Experiment Name: At_Siliques_P Parameter: Organism Value: A. thaliana
  misc_feature: MA Experiment 20000234 PARAMETER Experiment Name: At_Siliques_P Parameter: Plant Line Value: WS
  misc_feature: MA Experiment 20000234 PARAMETER Experiment Name: At_Siliques_P Parameter: Tissue Value: Less Than 5mm Siliques vs. Whole Plant
  misc_feature: MA Experiment ID: 20000235 Result: Up-regulated in Transcription
  misc_feature: MA Experiment 20000235 PARAMETER Experiment Name: At_Siliques_P Parameter: Age (day) Value: 21
  misc_feature: MA Experiment 20000235 PARAMETER Experiment Name: At_Siliques_P Parameter: Organism Value: A. thaliana
  misc_feature: MA Experiment 20000235 PARAMETER Experiment Name: At_Siliques_P Parameter: Plant Line Value: WS
  misc_feature: MA Experiment 20000235 PARAMETER Experiment Name: At_Siliques_P Parameter: Tissue Value: 5-10mm Siliques vs. Whole Plant
  misc_feature: MA Experiment ID: 20000264 Result: Up-regulated in Transcription
  misc_feature: MA Experiment 20000264 PARAMETER Experiment Name: At_Open_Flower_P Parameter: Age (day) Value: 21
  misc_feature: MA Experiment 20000264 PARAMETER Experiment Name: At_Open_Flower_P Parameter: Plant Line Value: WS
  misc_feature: MA Experiment 20000264 PARAMETER Experiment Name: At_Open_Flower_P Parameter: Tissue Value: Open Flower vs. Whole Plant
  misc_feature: MA Experiment ID: 20000265 Result: Up-regulated in Transcription
  misc_feature: MA Experiment 20000265 PARAMETER Experiment Name: At_Open_Flower_P Parameter: Age (day) Value: 21
  misc_feature: MA Experiment 20000265 PARAMETER Experiment Name: At_Open_Flower_P Parameter: Plant Line Value: WS
  misc_feature: MA Experiment 20000265 PARAMETER Experiment Name: At_Open_Flower_P Parameter: Tissue Value: Closed Flower vs. Whole Plant
  misc_feature: MA Experiment ID: 20000286 Result: Up-regulated in Transcription
  misc_feature: MA Experiment 20000286 PARAMETER Experiment Name: At_Open_Flower_P Parameter: Age (day) Value: 21
  misc_feature: MA Experiment 20000286 PARAMETER Experiment Name: At_Open_Flower_P Parameter: Plant Line Value: WS
  misc_feature: MA Experiment 20000286 PARAMETER Experiment Name: At_Open_Flower_P Parameter: Tissue Value: Half Open vs. Whole Plant
  misc_feature: MA Experiment ID: 20000437 Result: Down-regulated in Transcription
  misc_feature: MA Experiment 20000437 PARAMETER Experiment Name: At_Drought_P Parameter: Age (day) Value: 8
  misc_feature: MA Experiment 20000437 PARAMETER Experiment Name: At_Drought_P Parameter: Organism Value: A. thaliana
  misc_feature: MA Experiment 20000437 PARAMETER Experiment Name: At_Drought_P Parameter: Plant Line Value: WS
  misc_feature: MA Experiment 20000437 PARAMETER Experiment Name: At_Drought_P Parameter: Timepoint (hr) Value: 24
  misc_feature: MA Experiment 20000437 PARAMETER Experiment Name: At_Drought_P Parameter: Tissue Value: Whole Plant
  misc_feature: MA Experiment 20000437 PARAMETER Experiment Name: At_Drought_P Parameter: Treatment Value: Drought vs. No Drought
  misc_feature: MA Experiment ID: 20000439 Result: Down-regulated in Transcription
  misc_feature: MA Experiment 20000439 PARAMETER Experiment Name: At_Roots__P Parameter: Age (day) Value: 14 vs. 21
  misc_feature: MA Experiment 20000439 PARAMETER Experiment Name: At_Roots__P Parameter: Organism Value: A. thaliana
  misc_feature: MA Experiment 20000439 PARAMETER Experiment Name: At_Roots__P Parameter: Tissue Value: Roots vs. Whole Plant
  misc_feature: MA Experiment ID: 20000451 Result: Up-regulated in Transcription
  misc_feature: MA Experiment 20000451 PARAMETER Experiment Name: At_CS6879_Shoots-Roots_P Parameter: Age (day) Value: 14
  misc_feature: MA Experiment 20000451 PARAMETER Experiment Name: At_CS6879_Shoots-Roots_P Parameter: Organism Value: A. thaliana
  misc_feature: MA Experiment 20000451 PARAMETER Experiment Name: At_CS6879_Shoots-Roots_P Parameter: Plant Line Value: CS6879 vs. WS
  misc_feature: MA Experiment 20000451 PARAMETER Experiment Name: At_CS6879_Shoots-Roots_P Parameter: Tissue Value: Roots
  misc_feature: MA Experiment ID: 20000460 Result: Up-regulated in Transcription
  misc_feature: MA Experiment 20000460 PARAMETER Experiment Name: At_10percent_PEG_P Parameter: Age (day) Value: 12
  misc_feature: MA Experiment 20000460 PARAMETER Experiment Name: At_10percent_PEG_P Parameter: Organism Value: A. thaliana
  misc_feature: MA Experiment 20000460 PARAMETER Experiment Name: At_10percent_PEG_P Parameter: Plant Line Value: WS
  misc_feature: MA Experiment 20000460 PARAMETER Experiment Name: At_10percent_PEG_P Parameter: Timepoint (day) Value: 12
  misc_feature: MA Experiment 20000460 PARAMETER Experiment Name: At_10percent_PEG_P Parameter: Tissue Value: Whole Plant
  misc_feature: MA Experiment 20000460 PARAMETER Experiment Name: At_10percent_PEG_P Parameter: Treatment Value: 10percent PEG vs. No Treatment
  misc_feature: MA Experiment ID: 20000495 Result: Up-regulated in Transcription
  misc_feature: MA Experiment 20000495 PARAMETER Experiment Name: At_Guard_Cells_P Parameter: Harvest Date Value: 8/2/2002
  misc_feature: MA Experiment 20000495 PARAMETER Experiment Name: At_Guard_Cells_P Parameter: Organism Value: A. thaliana
  misc_feature: MA Experiment 20000495 PARAMETER Experiment Name: At_Guard_Cells_P Parameter: Tissue Value: Guard Cells vs. Leaves
  misc_feature: MA Experiment ID: 20000573 Result: Down-regulated in Transcription
  misc_feature: MA Experiment 20000573 PARAMETER Experiment Name: At_100uM_ABA_Mutants__P Parameter: Organism Value: A. thaliana
  misc_feature: MA Experiment 20000573 PARAMETER Experiment Name: At_100uM_ABA_Mutants__P Parameter: Plant Line Value: CS22 vs. Ler wt
  misc_feature: MA Experiment 20000573 PARAMETER Experiment Name: At_100uM_ABA_Mutants__P Parameter: Timepoint (hr) Value: N/A
  misc_feature: MA Experiment 20000573 PARAMETER Experiment Name: At_100uM_ABA_Mutants__P Parameter: Tissue Value: Whole Plant
  misc_feature: MA Experiment 20000573 PARAMETER Experiment Name: At_100uM_ABA_Mutants__P Parameter: Treatment Value: None
  misc_feature: MA Experiment ID: 20000574 Result: Down-regulated in Transcription
  misc_feature: MA Experiment 20000574 PARAMETER Experiment Name: At_100uM_ABA_Mutants__P Parameter: Organism Value: A. thaliana
  misc_feature: MA Experiment 20000574 PARAMETER Experiment Name: At_100uM_ABA_Mutants__P Parameter: Plant Line Value: CS23 vs. Ler wt
  misc_feature: MA Experiment 20000574 PARAMETER Experiment Name: At_100uM_ABA_Mutants__P Parameter: Timepoint (hr) Value: N/A
  misc_feature: MA Experiment 20000574 PARAMETER Experiment Name: At_100uM_ABA_Mutants__P Parameter: Tissue Value: Whole Plant
  misc_feature: MA Experiment 20000574 PARAMETER Experiment Name: At_100uM_ABA_Mutants__P Parameter: Treatment Value: None
  misc_feature: MA Experiment ID: 20000794 Result: Down-regulated in Transcription
  misc_feature: MA Experiment 20000794 PARAMETER Experiment Name: At_Petals_P Parameter: Age (day) Value: 23-25 days
  misc_feature: MA Experiment 20000794 PARAMETER Experiment Name: At_Petals_P Parameter: Plant Line Value: WS
  misc_feature: MA Experiment 20000794 PARAMETER Experiment Name: At_Petals_P Parameter: Tissue Value: Petals vs. Whole plant
  misc_feature: MA Experiment ID: 20001248 Result: Down-regulated in Transcription
  misc_feature: MA Experiment 20001248 PARAMETER Experiment Name: At_Far-red-induction_P Parameter: Age (day) Value: 7
  misc_feature: MA Experiment 20001248 PARAMETER Experiment Name: At_Far-red-induction_P Parameter: Light Value: Far-red vs. White
  misc_feature: MA Experiment 20001248 PARAMETER Experiment Name: At_Far-red-induction_P Parameter: Organism Value: A. thaliana
  misc_feature: MA Experiment 20001248 PARAMETER Experiment Name: At_Far-red-induction_P Parameter: Plant Line Value: Columbia
  misc_feature: MA Experiment 20001248 PARAMETER Experiment Name: At_Far-red-induction_P Parameter: Timepoint (hr) Value: 4
  misc_feature: MA Experiment 20001248 PARAMETER Experiment Name: At_Far-red-induction_P Parameter: Tissue Value: Whole Plant
  misc_feature: MA Experiment ID: 20001450 Result: Down-regulated in Transcription
  misc_feature: MA Experiment 20001450 PARAMETER Experiment Name: At_Far-red-induction_P Parameter: Age (day) Value: 7
  misc_feature: MA Experiment 20001450 PARAMETER Experiment Name: At_Far-red-induction_P Parameter: Light Value: Far-red vs. White
  misc_feature: MA Experiment 20001450 PARAMETER Experiment Name: At_Far-red-induction_P Parameter: Organism Value: A. thaliana
  misc_feature: MA Experiment 20001450 PARAMETER Experiment Name: At_Far-red-induction_P Parameter: Plant Line Value: Columbia
  misc_feature: MA Experiment 20001450 PARAMETER Experiment Name: At_Far-red-induction_P Parameter: Timepoint (hr) Value: 8
  misc_feature: MA Experiment 20001450 PARAMETER Experiment Name: At_Far-red-induction_P Parameter: Tissue Value: Whole Plant
  misc_feature: MA Experiment ID: 20001451 Result: Down-regulated in Transcription
  misc_feature: MA Experiment 20001451 PARAMETER Experiment Name: At_Far-red-induction_P Parameter: Age (day) Value: 7
  misc_feature: MA Experiment 20001451 PARAMETER Experiment Name: At_Far-red-induction_P Parameter: Light Value: Far-red vs. White
  misc_feature: MA Experiment 20001451 PARAMETER Experiment Name: At_Far-red-induction_P Parameter: Organism Value: A. thaliana
  misc_feature: MA Experiment 20001451 PARAMETER Experiment Name: At_Far-red-induction_P Parameter: Plant Line Value: Columbia
  misc_feature: MA Experiment 20001451 PARAMETER Experiment Name: At_Far-red-induction_P Parameter: Timepoint (hr) Value: 24
  misc_feature: MA Experiment 20001451 PARAMETER Experiment Name: At_Far-red-induction_P Parameter: Tissue Value: Whole Plant
  misc_feature: MA Experiment ID: 20001457 Result: Up-regulated in Transcription
  misc_feature: MA Experiment 20001457 PARAMETER Experiment Name: At_50mM_NH4NO3_L-to-H_P Parameter: Age (day) Value: Undefined
  misc_feature: MA Experiment 20001457 PARAMETER Experiment Name: At_50mM_NH4NO3_L-to-H_P Parameter: Organism Value: Undefined
  misc_feature: MA Experiment 20001457 PARAMETER Experiment Name: At_50mM_NH4NO3_L-to-H_P Parameter: Plant Line Value: Undefined
  misc_feature: MA Experiment 20001457 PARAMETER Experiment Name: At_50mM_NH4NO3_L-to-H_P Parameter: Timepoint (hr) Value: 0.5
  misc_feature: MA Experiment 20001457 PARAMETER Experiment Name: At_50mM_NH4NO3_L-to-H_P Parameter: Tissue Value: Siliques
  misc_feature: MA Experiment 20001457 PARAMETER Experiment Name: At_50mM_NH4NO3_L-to-H_P Parameter: Treatment Value: 50mM NH4NO3 vs. 100mM Manitol
  misc_feature: MA Experiment ID: 20001555 Result: Down-regulated in Transcription
  misc_feature: MA Experiment 20001555 PARAMETER Experiment Name: At_Drought_Soil_Dry_P Parameter: Age (day) Value: 24
  misc_feature: MA Experiment 20001555 PARAMETER Experiment Name: At_Drought_Soil_Dry_P Parameter: Organism Value: A. thaliana
  misc_feature: MA Experiment 20001555 PARAMETER Experiment Name: At_Drought_Soil_Dry_P Parameter: Plant Line Value: WS
  misc_feature: MA Experiment 20001555 PARAMETER Experiment Name: At_Drought_Soil_Dry_P Parameter: Post Timepoint (hr) Value: None
  misc_feature: MA Experiment 20001555 PARAMETER Experiment Name: At_Drought_Soil_Dry_P Parameter: Post-Treatment Value: None
  misc_feature: MA Experiment 20001555 PARAMETER Experiment Name: At_Drought_Soil_Dry_P Parameter: Timepoint (day) Value: 10
  misc_feature: MA Experiment 20001555 PARAMETER Experiment Name: At_Drought_Soil_Dry_P Parameter: Treatment Value: Drought vs. No Drought
  misc_feature: MA Experiment ID: 20001556 Result: Down-regulated in Transcription
  misc_feature: MA Experiment 20001556 PARAMETER Experiment Name: At_Drought_Soil_Dry_P Parameter: Age (day) Value: 26
  misc_feature: MA Experiment 20001556 PARAMETER Experiment Name: At_Drought_Soil_Dry_P Parameter: Organism Value: A. thaliana
  misc_feature: MA Experiment 20001556 PARAMETER Experiment Name: At_Drought_Soil_Dry_P Parameter: Plant Line Value: WS
  misc_feature: MA Experiment 20001556 PARAMETER Experiment Name: At_Drought_Soil_Dry_P Parameter: Post Timepoint (hr) Value: None
  misc_feature: MA Experiment 20001556 PARAMETER Experiment Name: At_Drought_Soil_Dry_P Parameter: Post-Treatment Value: None
  misc_feature: MA Experiment 20001556 PARAMETER Experiment Name: At_Drought_Soil_Dry_P Parameter: Timepoint (day) Value: 12
  misc_feature: MA Experiment 20001556 PARAMETER Experiment Name: At_Drought_Soil_Dry_P Parameter: Treatment Value: Drought vs. No Drought
  misc_feature: MA Experiment ID: 20001558 Result: Up-regulated in Transcription
  misc_feature: MA Experiment 20001558 PARAMETER Experiment Name: At_Drought_Soil_Dry_P Parameter: Age (day) Value: 27
  misc_feature: MA Experiment 20001558 PARAMETER Experiment Name: At_Drought_Soil_Dry_P Parameter: Organism Value: A. thaliana
  misc_feature: MA Experiment 20001558 PARAMETER Experiment Name: At_Drought_Soil_Dry_P Parameter: Plant Line Value: WS
  misc_feature: MA Experiment 20001558 PARAMETER Experiment Name: At_Drought_Soil_Dry_P Parameter: Post Timepoint (hr) Value: 6
  misc_feature: MA Experiment 20001558 PARAMETER Experiment Name: At_Drought_Soil_Dry_P Parameter: Post-Treatment Value: Re-Water vs. No Drought
  misc_feature: MA Experiment 20001558 PARAMETER Experiment Name: At_Drought_Soil_Dry_P Parameter: Timepoint (day) Value: 13
  misc_feature: MA Experiment 20001558 PARAMETER Experiment Name: At_Drought_Soil_Dry_P Parameter: Treatment Value: Drought vs. No Drought
  misc_feature: MA Experiment ID: 20001559 Result: Down-regulated in Transcription
  misc_feature: MA Experiment 20001559 PARAMETER Experiment Name: At_Drought_Soil_Dry_P Parameter: Age (day) Value: 28
  misc_feature: MA Experiment 20001559 PARAMETER Experiment Name: At_Drought_Soil_Dry_P Parameter: Organism Value: A. thaliana
  misc_feature: MA Experiment 20001559 PARAMETER Experiment Name: At_Drought_Soil_Dry_P Parameter: Plant Line Value: WS
  misc_feature: MA Experiment 20001559 PARAMETER Experiment Name: At_Drought_Soil_Dry_P Parameter: Post Timepoint (hr) Value: 29
  misc_feature: MA Experiment 20001559 PARAMETER Experiment Name: At_Drought_Soil_Dry_P Parameter: Post-Treatment Value: Re-Water vs. No Drought
  misc_feature: MA Experiment 20001559 PARAMETER Experiment Name: At_Drought_Soil_Dry_P Parameter: Timepoint (day) Value: 14
  misc_feature: MA Experiment 20001559 PARAMETER Experiment Name: At_Drought_Soil_Dry_P Parameter: Treatment Value: Drought vs. No Drought
  misc_feature: MA Experiment ID: 20001560 Result: Up-regulated in Transcription
  misc_feature: MA Experiment 20001560 PARAMETER Experiment Name: At_Drought_Soil_Dry_P Parameter: Age (day) Value: 28
  misc_feature: MA Experiment 20001560 PARAMETER Experiment Name: At_Drought_Soil_Dry_P Parameter: Organism Value: A. thaliana
  misc_feature: MA Experiment 20001560 PARAMETER Experiment Name: At_Drought_Soil_Dry_P Parameter: Plant Line Value: WS
  misc_feature: MA Experiment 20001560 PARAMETER Experiment Name: At_Drought_Soil_Dry_P Parameter: Post Timepoint (hr) Value: None
  misc_feature: MA Experiment 20001560 PARAMETER Experiment Name: At_Drought_Soil_Dry_P Parameter: Post-Treatment Value: None
  misc_feature: MA Experiment 20001560 PARAMETER Experiment Name: At_Drought_Soil_Dry_P Parameter: Timepoint (day) Value: 14
  misc_feature: MA Experiment 20001560 PARAMETER Experiment Name: At_Drought_Soil_Dry_P Parameter: Treatment Value: Drought vs. No Drought
ccacgcgtccgaaaaaaaaaacagaaagtaacatgagatctctcttattagccgtgtgcctggttcttgctttacactgcggtgaagcagccgtgtcttgcaacacggtgattgcggatctttacccttgcttatcctacgtgactcagggcggaccggtcccaaccctctgctgcaacggtctcacaacactcaagagtcaggctcaaacttctgtggaccgtcagggggtctgtcgttgcatcaaatctgctattggaggactcactctctctcctagaaccatccaaaatgctttggaattgccttctaaatgtggtgtcgatctcccttacaagttcagcccttccactgactgcgacagtatccagtgagacaagcagaaaatcttaaaggaagctactacaagaactataataacctaataattaataaatgagggcattggtttgctagttgctaattgatcagtgatgtattgtcattttgaatgttctaatatcagcaggcacttatctctg

SEQ ID NO: 76172 - protein, 123 aa, Arabidopsis thaliana
  peptide (1)..(123): Ceres Seq. ID no. 7107018
  misc_feature (33)..(119): Pfam Name: Protease inhibitor/seed storage/LTP family Pfam Description: Protease inhibitor/seed storage/LTP family
  misc_feature (11)..(123): Homolog of NCBI NO: 15231964 NR Description: putative nonspecific lipid-transfer protein; id: At3g08770.1, supported by cDNA: 26569., supported by cDNA: supported by cDNA: gi_20148576, supported by cDNA: transfer
  misc_feature (11)..(123): Homolog of NCBI NO: 15241086 NR Description: lipid-transfer protein-like; protein id:
  misc_feature (18)..(123): Homolog of NCBI NO: 16903206 NR Description: lipid transfer protein precursor [Davidia
  misc_feature (13)..(123): Homolog of NCBI NO: 6782436 NR Description: lipid-transfer protein [Nicotiana glauca]
  misc_feature (14)..(123): Homolog of NCBI NO: 2497753 NR Description: NONSPECIFIC LIPID-TRANSFER PROTEIN 3 PRECURSOR
  misc_feature (19)..(123): Homolog of NCBI NO: 6093512 NR Description: NONSPECIFIC LIPID-TRANSFER PROTEIN PRECURSOR
  misc_feature (15)..(123): Homolog of NCBI NO: 16930759 NR Description: lipid transfer protein-like protein [Retama
  misc_feature (19)..(123): Homolog of NCBI NO: 7438274 NR Description: lipid transfer protein SDi-9, drought-induced -
  misc_feature (13)..(123): Homolog of NCBI NO: 18477856 NR Description: lipid transfer protein [Fragaria x ananassa]
  misc_feature (15)..(123): Homolog of NCBI NO: 11095210 NR Description: lipid transfer protein 3 precursor [Gossypium
TRPKKKTESNMRSLLLAVCLVLALHCGEAAVSCNTVIADLYPCLSYVTQGGPVPTLCCNGLTTLKSQAQTSVDRQGVCRCIKSAIGGLTLSPRTIQNALELPSKCGVDLPYKFSPSTDCDSIQ

SEQ ID NO: 76173 - protein, 113 aa, Arabidopsis thaliana; identical to SEQ ID NO: 36177
  peptide (1)..(113): Ceres Seq. ID no. 7107019
  misc_feature (23)..(109): Pfam Name: Protease inhibitor/seed storage/LTP family Pfam Description: Protease inhibitor/seed storage/LTP family
  misc_feature (1)..(113): Homolog of NCBI NO: 15231964 NR Description: putative nonspecific lipid-transfer protein; id: At3g08770.1, supported by cDNA: 26569., supported by cDNA: supported by cDNA: gi_20148576, supported by cDNA: transfer
  misc_feature (1)..(113): Homolog of NCBI NO: 15241086 NR Description: lipid-transfer protein-like; protein id:
  misc_feature (8)..(113): Homolog of NCBI NO: 16903206 NR Description: lipid transfer protein precursor [Davidia
  misc_feature (3)..(113): Homolog of NCBI NO: 6782436 NR Description: lipid-transfer protein [Nicotiana glauca]
  misc_feature (4)..(113): Homolog of NCBI NO: 2497753 NR Description: NONSPECIFIC LIPID-TRANSFER PROTEIN 3 PRECURSOR
  misc_feature (9)..(113): Homolog of NCBI NO: 6093512 NR Description: NONSPECIFIC LIPID-TRANSFER PROTEIN PRECURSOR
  misc_feature (5)..(113): Homolog of NCBI NO: 16930759 NR Description: lipid transfer protein-like protein [Retama
  misc_feature (9)..(113): Homolog of NCBI NO: 7438274 NR Description: lipid transfer protein SDi-9, drought-induced -
  misc_feature (3)..(113): Homolog of NCBI NO: 18477856 NR Description: lipid transfer protein [Fragaria x ananassa]
  misc_feature (5)..(113): Homolog of NCBI NO: 11095210 NR Description: lipid transfer protein 3 precursor [Gossypium

SEQ ID NO: 76174 - DNA, 1029 bp, Arabidopsis thaliana
  misc_feature (1)..(1029): Ceres Seq. ID no. 7107033
  misc_feature: MA Experiment ID: 108434 Result: Up-regulated in Transcription
  misc_feature: MA Experiment 108434 PARAMETER Experiment Name: At_Root_Tips_cDNA_P Parameter: Tissue Value: Root Tips
  misc_feature: MA Experiment ID: 108577 Result: Up-regulated in Transcription
  misc_feature: MA Experiment 108577 PARAMETER Experiment Name: At_42deg_Heat_cDNA_P Parameter: Temperature (deg C) Value: 42 vs. 22
  misc_feature: MA Experiment 108577 PARAMETER Experiment Name: At_42deg_Heat_cDNA_P Parameter: Timepoint (hr) Value: 6
  misc_feature: MA Experiment 108577 PARAMETER Experiment Name: At_42deg_Heat_cDNA_P Parameter: Tissue Value: Aerial
  misc_feature: MA Experiment ID: 108579 Result: Down-regulated in Transcription
  misc_feature: MA Experiment 108579 PARAMETER Experiment Name: At_4deg_Cold_cDNA_P Parameter: Temperature (deg C) Value: 4 vs. 22
  misc_feature: MA Experiment 108579 PARAMETER Experiment Name: At_4deg_Cold_cDNA_P Parameter: Timepoint (hr) Value: 6
  misc_feature: MA Experiment 108579 PARAMETER Experiment Name: At_4deg_Cold_cDNA_P Parameter: Tissue Value: Aerial
  misc_feature: MA Experiment ID: 20000224 Result: Down-regulated in Transcription
  misc_feature: MA Experiment ID: 20000437 Result: Up-regulated in Transcription
  misc_feature: MA Experiment 20000437 PARAMETER Experiment Name: At_Drought_P Parameter: Age (day) Value: 8
  misc_feature: MA Experiment 20000437 PARAMETER Experiment Name: At_Drought_P Parameter: Organism Value: A. thaliana
  misc_feature: MA Experiment 20000437 PARAMETER Experiment Name: At_Drought_P Parameter: Plant Line Value: WS
  misc_feature: MA Experiment 20000437 PARAMETER Experiment Name: At_Drought_P Parameter: Timepoint (hr) Value: 24
  misc_feature: MA Experiment 20000437 PARAMETER Experiment Name: At_Drought_P Parameter: Tissue Value: Whole Plant
  misc_feature: MA Experiment 20000437 PARAMETER Experiment Name: At_Drought_P Parameter: Treatment Value: Drought vs. No Drought
  misc_feature: MA Experiment ID: 20001905 Result: Down-regulated in Transcription
  misc_feature: MA Experiment 20001905 PARAMETER Experiment Name: At_Drought_Reproduction_P Parameter: Age (day) Value: 40
  misc_feature: MA Experiment 20001905 PARAMETER Experiment Name: At_Drought_Reproduction_P Parameter: Organism Value: A. thaliana
  misc_feature: MA Experiment 20001905 PARAMETER Experiment Name: At_Drought_Reproduction_P Parameter: Plant Line Value: WS
  misc_feature: MA Experiment 20001905 PARAMETER Experiment Name: At_Drought_Reproduction_P Parameter: Timepoint (day) Value: 10
  misc_feature: MA Experiment 20001905 PARAMETER Experiment Name: At_Drought_Reproduction_P Parameter: Tissue Value: Rosettes
  misc_feature: MA Experiment 20001905 PARAMETER Experiment Name: At_Drought_Reproduction_P Parameter: Treatment Value: Drought vs. No Drought
ttacctccgtcgcaggtgatgaggagatacagtccgccttattacagtcctcsgaggagaggatacggtggtcgaggtagaagtcctcctcctcctcctcctcgacgtggatatggtggtggtggtggtggtggtggacgtagaggatctagccatggaagtctcttggttcgtaacattcctcttgattgcagaccagaagagcttcgtgagccctttgagaggtttggacctgtgagagatgtctatatccccagagattattactcagggcaaccgcgggggtttgcgtttgtggagtttgttgatgcatatgatgctggggaggctcaaagaagcatgaacaggagaagcttttctggaagagagataacggtggttgttgcttcagagtctaggaaaaggcctgaagagatgcgtgtgaagactaggactcgtagtagggaaccttcaggctccagggatcgttctcatggacggtctcgttcacgttcaatctctcgatcacgttctccacgtcgtccgtcagattctagaagcagataccgatcaaggtcttactctcctgcaccaagacgaagaggaggtcctcctcgtggggaagaagatgaaaattacagtcgtaggtcctactcccctggctatgaaggtgctgctgctgctgctccagatcgggacagaaatggagacaatgagattagagaaaaaccgggctatgaagcagaggatagacgtcgtggtggaagagcagtttcaaggtcgccatcaggatccaggtccaggtctgtggaggtatctccaagatgaaacttatgtgaagaagtggccgaccaaaactttgtgcaacgctttatgggttttgcatttctctagtagtgcgtctctgtgtctttaaaaactccttactctggcttgtcaaagatattttgtcttgtgatgtgatgttacttgaaatcggtttcggtttatgggtcttattataaacaaaaaaaaggtaaatctcgagagatctatgaatcgtagatactg

SEQ ID NO: 76175 - protein, 268 aa, Arabidopsis thaliana
  peptide (1)..(268): Ceres Seq. ID no. 7107034
  misc_feature (55)..(126): Pfam Name: RNA recognition motif. (a.k.a. RRM, RBD, or RNP domain) Pfam Description: RNA recognition motif. (a.k.a. RRM, RBD, or RNP
  misc_feature (7)..(268): Homolog of NCBI NO: 9843657 NR Description: SC35-like splicing factor SCL30, 30 kD
  misc_feature (7)..(268): Homolog of NCBI NO: 18410283 NR Description: arginine/serine-rich protein SCL30; protein id: supported by cDNA: 21694., supported by cDNA: gi_20466365 thaliana] >gi|20466366|gb|AAM20500.1| putative RNA putative RNA
  misc_feature (7)..(268): Homolog of NCBI NO: 11358671 NR Description: probable RNA binding protein - Arabidopsis >gi|7076789|emb|CAB75904.1| putative RNA binding protein
  misc_feature (48)..(267): Homolog of NCBI NO: 32352198 NR Description: pre-mRNA splicing factor [Oryza sativa (japonica
  misc_feature (7)..(146): Homolog of NCBI NO: 12002297 NR Description: unknown [Oryza sativa]
  misc_feature (8)..(268): Homolog of NCBI NO: 11358835 NR Description: serine/arginine-rich protein [imported] -
  misc_feature (8)..(262): Homolog of NCBI NO: 15293081 NR Description: unknown protein [Arabidopsis thaliana]
  misc_feature (8)..(268): Homolog of NCBI NO: 15231285 NR Description: arginine/serine-rich splicing factor SCL30a; id: At3g13570.1, supported by cDNA: gi_13878010, supported by gi_17104622 [Arabidopsis thaliana] >gi|11994559|dbj|BAB02599.1|
  misc_feature (8)..(218): Homolog of NCBI NO: 18405316 NR Description: arginine/serine-rich protein; protein id: supported by cDNA: gi_6572474 [Arabidopsis thaliana]
  misc_feature (20)..(228): Homolog of NCBI NO: 31249706 NR Description: putative splicing factor [Oryza sativa (japonica
  misc_feature (18)..(18): Xaa is any aa, unknown or other
LPPSQVMRRYSPPYYSPXRRGYGGRGRSPPPPPPRRGYGGGGGGGGRRGSSHGSLLVRNIPLDCRPEELREPFERFGPVRDVYIPRDYYSGQPRGFAFVEFVDAYDAGEAQRSMNRRSFSGREITVVVASESRKRPEEMRVKTRTRSREPSGSRDRSHGRSRSRSISRSRSPRRPSDSRSRYRSRSYSPAPRRRGGPPRGEEDENYSRRSYSPGYEGAAAAAPDRDRNGDNEIREKPGYEAEDRRRGGRAVSRSPSGSRSRSVEVSPR

SEQ ID NO: 76176 - protein, 262 aa, Arabidopsis thaliana
  peptide (1)..(262): Ceres Seq. ID no. 7107035
  misc_feature (49)..(120): Pfam Name: RNA recognition motif. (a.k.a. RRM, RBD, or RNP domain) Pfam Description: RNA recognition motif. (a.k.a. RRM, RBD, or RNP
  misc_feature (1)..(262): Homolog of NCBI NO: 9843657 NR Description: SC35-like splicing factor SCL30, 30 kD
  misc_feature (1)..(262): Homolog of NCBI NO: 18410283 NR Description: arginine/serine-rich protein SCL30; protein id: supported by cDNA: 21694., supported by cDNA: gi_20466365 thaliana] >gi|20466366|gb|AAM20500.1| putative RNA putative RNA
  misc_feature (1)..(262): Homolog of NCBI NO: 11358671 NR Description: probable RNA binding protein - Arabidopsis >gi|7076789|emb|CAB75904.1| putative RNA binding protein
  misc_feature (42)..(261): Homolog of NCBI NO: 32352198 NR Description: pre-mRNA splicing factor [Oryza sativa (japonica
  misc_feature (1)..(140): Homolog of NCBI NO: 12002297 NR Description: unknown [Oryza sativa]
  misc_feature (2)..(262): Homolog of NCBI NO: 11358835 NR Description: serine/arginine-rich protein [imported] -
  misc_feature (2)..(256): Homolog of NCBI NO: 15293081 NR Description: unknown protein [Arabidopsis thaliana]
  misc_feature (2)..(262): Homolog of NCBI NO: 15231285 NR Description: arginine/serine-rich splicing factor SCL30a; id: At3g13570.1, supported by cDNA: gi_13878010, supported by gi_17104622 [Arabidopsis thaliana] >gi|11994559|dbj|BAB02599.1|
  misc_feature (2)..(212): Homolog of NCBI NO: 18405316 NR Description: arginine/serine-rich protein; protein id: supported by cDNA: gi_6572474 [Arabidopsis thaliana]
  misc_feature (14)..(222): Homolog of NCBI NO: 31249706 NR Description: putative splicing factor [Oryza sativa (japonica
  misc_feature (12)..(12): Xaa is any aa, unknown or other
MRRYSPPYYSPXRRGYGGRGRSPPPPPPRRGYGGGGGGGGRRGSSHGSLLVRNIPLDCRPEELREPFERFGPVRDVYIPRDYYSGQPRGFAFVEFVDAYDAGEAQRSMNRRSFSGREITVVVASESRKRPEEMRVKTRTRSREPSGSRDRSHGRSRSRSISRSRSPRRPSDSRSRYRSRSYSPAPRRRGGPPRGEEDENYSRRSYSPGYEGAAAAAPDRDRNGDNEIREKPGYEAEDRRRGGRAVSRSPSGSRSRSVEVSPR

SEQ ID NO: 76177 - protein, 155 aa, Arabidopsis thaliana
  peptide (1)..(155): Ceres Seq. ID no. 7107036
  misc_feature (45)..(99): Pfam Name: Protamine P1 Pfam Description: Protamine P1
  misc_feature (1)..(155): Homolog of NCBI NO: 9843657 NR Description: SC35-like splicing factor SCL30, 30 kD
  misc_feature (1)..(155): Homolog of NCBI NO: 18410283 NR Description: arginine/serine-rich protein SCL30; protein id: supported by cDNA: 21694., supported by cDNA: gi_20466365 thaliana] >gi|20466366|gb|AAM20500.1| putative RNA putative RNA
  misc_feature (1)..(155): Homolog of NCBI NO: 11358671 NR Description: probable RNA binding protein - Arabidopsis >gi|7076789|emb|CAB75904.1| putative RNA binding protein
  misc_feature (1)..(154): Homolog of NCBI NO: 32352198 NR Description: pre-mRNA splicing factor [Oryza sativa (japonica
  misc_feature (1)..(33): Homolog of NCBI NO: 12002297 NR Description: unknown [Oryza sativa]
  misc_feature (1)..(155): Homolog of NCBI NO: 11358835 NR Description: serine/arginine-rich protein [imported] -
  misc_feature (1)..(149): Homolog of NCBI NO: 15293081 NR Description: unknown protein [Arabidopsis thaliana]
  misc_feature (1)..(155): Homolog of NCBI NO: 15231285 NR Description: arginine/serine-rich splicing factor SCL30a; id: At3g13570.1, supported by cDNA: gi_13878010, supported by gi_17104622 [Arabidopsis thaliana] >gi|11994559|dbj|BAB02599.1|
  misc_feature (1)..(105): Homolog of NCBI NO: 18405316 NR Description: arginine/serine-rich protein; protein id: supported by cDNA: gi_6572474 [Arabidopsis thaliana]
  misc_feature (1)..(115): Homolog of NCBI NO: 31249706 NR Description: putative splicing factor [Oryza sativa (japonica
MNRRSFSGREITVVVASESRKRPEEMRVKTRTRSREPSGSRDRSHGRSRSRSISRSRSPRRPSDSRSRYRSRSYSPAPRRRGGPPRGEEDENYSRRSYSPGYEGAAAAAPDRDRNGDNEIREKPGYEAEDRRRGGRAVSRSPSGSRSRSVEVSPR

SEQ ID NO: 76178 - DNA, 907 bp, Arabidopsis thaliana
  misc_feature (1)..(907): Ceres Seq. ID no. 7107037
  misc_feature: MA Experiment ID: 20001906 Result: Up-regulated in Transcription
  misc_feature: MA Experiment 20001906 PARAMETER Experiment Name: At_Drought_Reproduction_P Parameter: Age (day) Value: 35
  misc_feature: MA Experiment 20001906 PARAMETER Experiment Name: At_Drought_Reproduction_P Parameter: Organism Value: A. thaliana
  misc_feature: MA Experiment 20001906 PARAMETER Experiment Name: At_Drought_Reproduction_P Parameter: Plant Line Value: WS
  misc_feature: MA Experiment 20001906 PARAMETER Experiment Name: At_Drought_Reproduction_P Parameter: Timepoint (day) Value: 5
  misc_feature: MA Experiment 20001906 PARAMETER Experiment Name: At_Drought_Reproduction_P Parameter: Tissue Value: Siliques
  misc_feature: MA Experiment 20001906 PARAMETER Experiment Name: At_Drought_Reproduction_P Parameter: Treatment Value: Drought vs. No Drought
gcaaacgctagttaccggaagacacgtcttgagtttcgcagcatctctctcctctcctctgttcatatctctctttagaaatttctcaatgaacatactcaacagattgggtttgggatcaagtgggcaaaccaatatggatccttctccgatcgctcagggaaatgacgatgacacaccggcgccggggaatcagtttgcccaattcggagctggatgtttctggggtgtcgagctggcgtttcagagagtcccaggggtgactcagaccgaggctggatacacccaagggaccgtagacaatccttcatacggagatgtttgttctggtaccacaggccattcggaggttgttagggttcaatatgatcttaacgattgcacctatgaatctctgcttgatttgttctggtctaggcatgatcccaccactttgaatcgccaggtaaatgacgtgggaacccattacagatctggaatatacttctacacacccgagcaggagaaactagcccgtgagtcacttgaacgtcaccagcaccagcaacaaatggagagaaagatcatgactgaaatcttgccagctaagaaattctacagagctgaagagcatcatcaacagtatctgtcaaaaggtgggcggtttggccaagggcaatccactgccaaaggctgcaacgacccaatccgctgttacggctaataagctgctttcctctgtccctctccgaaaacagaggacttagcatcaaaggacttgtgtgtcaaatagattgtgtaaaacttgactaagttgttcacacgctatgtaactacttctttggaatttcattcgcaatgttgtaataaaaaaaaaaaaaaagggcggccgctctagaggatccaagcttagtactacgtgtgcatg

SEQ ID NO: 76179 - protein, 233 aa, Arabidopsis thaliana
  peptide (1)..(233): Ceres Seq. ID no. 7107038
  misc_feature (65)..(220): Pfam Name: Peptide methionine sulfoxide reductase Pfam Description: Peptide methionine sulfoxide reductase
  misc_feature (30)..(233): Homolog of NCBI NO: 25308493 NR Description: protein-methionine-S-oxide reductase (EC 1.8.4.6)
  misc_feature (30)..(233): Homolog of NCBI NO: 15240796 NR Description: peptide methionine sulfoxide reductase (msr); id: At5g07470.1, supported by cDNA: 31014., supported by cDNA:
  misc_feature (30)..(233): Homolog of NCBI NO: 21592658 NR Description: peptide methionine sulfoxide reductase (msr)
  misc_feature (46)..(233): Homolog of NCBI NO: 26451744 NR Description: putative peptide methionine sulfoxide reductase
  misc_feature (30)..(233): Homolog of NCBI NO: 18424492 NR Description: peptide methionine sulfoxide reductase - like protein id: At5g61640.1, supported by cDNA: 95135. [Arabidopsis >gi|9758479|dbj|BAB09008.1| peptide methionine sulfoxide
  misc_feature (11)..(233): Homolog of NCBI NO: 12230349 NR Description: Peptide methionine sulfoxide reductase
  misc_feature (10)..(233): Homolog of NCBI NO: 29469000 NR Description: peptide methionine sulfoxide reductase; cPMSR
  misc_feature (22)..(233): Homolog of NCBI NO: 21593143 NR Description: protein-methionine-S-oxide reductase [Arabidopsis
  misc_feature (1)..(233): Homolog of NCBI NO: 1709690 NR Description: Peptide methionine sulfoxide reductase
  misc_feature (22)..(233): Homolog of NCBI NO: 11278974 NR Description: protein-methionine-S-oxide reductase (EC 1.8.4.6)
QTLVTGRHVLSFAASLSSPLFISLFRNFSMNILNRLGLGSSGQTNMDPSPIAQGNDDDTPAPGNQFAQFGAGCFWGVELAFQRVPGVTQTEAGYTQGTVDNPSYGDVCSGTTGHSEVVRVQYDLNDCTYESLLDLFWSRHDPTTLNRQVNDVGTHYRSGIYFYTPEQEKLARESLERHQHQQQMERKIMTEILPAKKFYRAEEHHQQYLSKGGRFGQGQSTAKGCNDPIRCYG

SEQ ID NO: 76180 - protein, 204 aa, Arabidopsis thaliana
  peptide (1)..(204): Ceres Seq. ID no. 7107039
  misc_feature (36)..(191): Pfam Name: Peptide methionine sulfoxide reductase Pfam Description: Peptide methionine sulfoxide reductase
  misc_feature (1)..(204): Homolog of NCBI NO: 25308493 NR Description: protein-methionine-S-oxide reductase (EC 1.8.4.6)
  misc_feature (1)..(204): Homolog of NCBI NO: 15240796 NR Description: peptide methionine sulfoxide reductase (msr); id: At5g07470.1, supported by cDNA: 31014., supported by cDNA:
  misc_feature (1)..(204): Homolog of NCBI NO: 21592658 NR Description: peptide methionine sulfoxide reductase (msr)
  misc_feature (17)..(204): Homolog of NCBI NO: 26451744 NR Description: putative peptide methionine sulfoxide reductase
  misc_feature (1)..(204): Homolog of NCBI NO: 18424492 NR Description: peptide methionine sulfoxide reductase - like protein id: At5g61640.1, supported by cDNA: 95135. [Arabidopsis >gi|9758479|dbj|BAB09008.1| peptide methionine sulfoxide
  misc_feature (1)..(204): Homolog of NCBI NO: 12230349 NR Description: Peptide methionine sulfoxide reductase
  misc_feature (1)..(204): Homolog of NCBI NO: 29469000 NR Description: peptide methionine sulfoxide reductase; cPMSR
  misc_feature (1)..(204): Homolog of NCBI NO: 21593143 NR Description: protein-methionine-S-oxide reductase [Arabidopsis
  misc_feature (1)..(204): Homolog of NCBI NO: 1709690 NR Description: Peptide methionine sulfoxide reductase
  misc_feature (1)..(204): Homolog of NCBI NO: 11278974 NR Description: protein-methionine-S-oxide reductase (EC 1.8.4.6)
MNILNRLGLGSSGQTNMDPSPIAQGNDDDTPAPGNQFAQFGAGCFWGVELAFQRVPGVTQTEAGYTQGTVDNPSYGDVCSGTTGHSEVVRVQYDLNDCTYESLLDLFWSRHDPTTLNRQVNDVGTHYRSGIYFYTPEQEKLARESLERHQHQQQMERKIMTEILPAKKFYRAEEHHQQYLSKGGRFGQGQSTAKGCNDPIRCYG

SEQ ID NO: 76181 - protein, 188 aa, Arabidopsis thaliana
  peptide (1)..(188): Ceres Seq. ID no. 7107040
  misc_feature (20)..(175): Pfam Name: Peptide methionine sulfoxide reductase Pfam Description: Peptide methionine sulfoxide reductase
  misc_feature (1)..(188): Homolog of NCBI NO: 25308493 NR Description: protein-methionine-S-oxide reductase (EC 1.8.4.6)
  misc_feature (1)..(188): Homolog of NCBI NO: 15240796 NR Description: peptide methionine sulfoxide reductase (msr); id: At5g07470.1, supported by cDNA: 31014., supported by cDNA:
  misc_feature (1)..(188): Homolog of NCBI NO: 21592658 NR Description: peptide methionine sulfoxide reductase (msr)
  misc_feature (1)..(188): Homolog of NCBI NO: 26451744 NR Description: putative peptide methionine sulfoxide reductase
  misc_feature (1)..(188): Homolog of NCBI NO: 18424492 NR Description: peptide methionine sulfoxide reductase - like protein id: At5g61640.1, supported by cDNA: 95135. [Arabidopsis >gi|9758479|dbj|BAB09008.1| peptide methionine sulfoxide
  misc_feature (1)..(188): Homolog of NCBI NO: 12230349 NR Description: Peptide methionine sulfoxide reductase
  misc_feature (1)..(188): Homolog of NCBI NO: 29469000 NR Description: peptide methionine sulfoxide reductase; cPMSR
  misc_feature (1)..(188): Homolog of NCBI NO: 21593143 NR Description: protein-methionine-S-oxide reductase [Arabidopsis
  misc_feature (1)..(188): Homolog of NCBI NO: 1709690 NR Description: Peptide methionine sulfoxide reductase
  misc_feature (1)..(188): Homolog of NCBI NO: 11278974 NR Description: protein-methionine-S-oxide reductase (EC 1.8.4.6)
MDPSPIAQGNDDDTPAPGNQFAQFGAGCFWGVELAFQRVPGVTQTEAGYTQGTVDNPSYGDVCSGTTGHSEVVRVQYDLNDCTYESLLDLFWSRHDPTTLNRQVNDVGTHYRSGIYFYTPEQEKLARESLERHQHQQQMERKIMTEILPAKKFYRAEEHHQQYLSKGGRFGQGQSTAKGCNDPIRCYG

SEQ ID NO: 76182 - DNA, 1285 bp, Arabidopsis thaliana
  misc_feature (1)..(1285): Ceres Seq. ID no. 7107041
  misc_feature: MA Experiment ID: 108434 Result: Up-regulated in Transcription
  misc_feature: MA Experiment 108434 PARAMETER Experiment Name: At_Root_Tips_cDNA_P Parameter: Tissue Value: Root Tips
  misc_feature: MA Experiment ID: 108462 Result: Down-regulated in Transcription
  misc_feature: MA Experiment 108462 PARAMETER Experiment Name: At_Germinating_Seeds_cDNA_P Parameter: Age (day) Value: 2 vs. 0
  misc_feature: MA Experiment 108462 PARAMETER Experiment Name: At_Germinating_Seeds_cDNA_P Parameter: Tissue Value: Germinating Seeds
  misc_feature: MA Experiment ID: 108463 Result: Down-regulated in Transcription
  misc_feature: MA Experiment 108463 PARAMETER Experiment Name: At_Germinating_Seeds_cDNA_P Parameter: Age (day) Value: 3 vs. 0
  misc_feature: MA Experiment 108463 PARAMETER Experiment Name: At_Germinating_Seeds_cDNA_P Parameter: Tissue Value: Germinating Seeds
  misc_feature: MA Experiment ID: 108464 Result: Down-regulated in Transcription
  misc_feature: MA Experiment 108464 PARAMETER Experiment Name: At_Germinating_Seeds_cDNA_P Parameter: Age (day) Value: 4 vs. 0
  misc_feature: MA Experiment 108464 PARAMETER Experiment Name: At_Germinating_Seeds_cDNA_P Parameter: Tissue Value: Germinating Seeds
  misc_feature: MA Experiment ID: 108573 Result: Down-regulated in Transcription
  misc_feature: MA Experiment 108573 PARAMETER Experiment Name: At_Drought_cDNA_P Parameter: Timepoint (hr) Value: 6
  misc_feature: MA Experiment 108573 PARAMETER Experiment Name: At_Drought_cDNA_P Parameter: Tissue Value: Aerial
  misc_feature: MA Experiment 108573 PARAMETER Experiment Name: At_Drought_cDNA_P Parameter: Treatment Value: Drought vs. No Drought
  misc_feature: MA Experiment ID: 108605 Result: Down-regulated in Transcription
  misc_feature: MA Experiment 108605 PARAMETER Experiment Name: At_100uM_ABA_cDNA_P Parameter: Timepoint (hr) Value: 6
  misc_feature: MA Experiment 108605 PARAMETER Experiment Name: At_100uM_ABA_cDNA_P Parameter: Tissue Value: Aerial
  misc_feature: MA Experiment 108605 PARAMETER Experiment Name: At_100uM_ABA_cDNA_P Parameter: Treatment Value: 100uM ABA vs. No Treatment
  misc_feature: MA Experiment ID: 20000070 Result: Down-regulated in Transcription
  misc_feature: MA Experiment 20000070 PARAMETER Experiment Name: At_100uM_ABA_Mutants_cDNA_P Parameter: Plant Line Value: CS24
  misc_feature: MA Experiment 20000070 PARAMETER Experiment Name: At_100uM_ABA_Mutants_cDNA_P Parameter: Timepoint (hr) Value: 6
  misc_feature: MA Experiment 20000070 PARAMETER Experiment Name: At_100uM_ABA_Mutants_cDNA_P Parameter: Tissue Value: Aerial
  misc_feature: MA Experiment 20000070 PARAMETER Experiment Name: At_100uM_ABA_Mutants_cDNA_P Parameter: Treatment Value: 100uM ABA vs. No Treatment
  misc_feature: MA Experiment ID: 20000180 Result: Up-regulated in Transcription
  misc_feature: MA Experiment 20000180 PARAMETER Experiment Name: At_Germinating_Seeds_P Parameter: Age (hr) Value: 24 vs. 0
  misc_feature: MA Experiment 20000180 PARAMETER Experiment Name: At_Germinating_Seeds_P Parameter: Tissue Value: Germinating Seeds
  misc_feature: MA Experiment ID: 20000185 Result: Down-regulated in Transcription
  misc_feature: MA Experiment 20000185 PARAMETER Experiment Name: At_Roots__P Parameter: Age (day) Value: 7 vs. 21
  misc_feature: MA Experiment 20000185 PARAMETER Experiment Name: At_Roots__P Parameter: Organism Value: A. thaliana
  misc_feature: MA Experiment 20000185 PARAMETER Experiment Name: At_Roots__P Parameter: Tissue Value: Roots vs. Whole Plant
  misc_feature: MA Experiment ID: 20000439 Result: Down-regulated in Transcription
  misc_feature: MA Experiment 20000439 PARAMETER Experiment Name: At_Roots__P Parameter: Age (day) Value: 14 vs. 21
  misc_feature: MA Experiment 20000439 PARAMETER Experiment Name: At_Roots__P Parameter: Organism Value: A. thaliana
  misc_feature: MA Experiment 20000439 PARAMETER Experiment Name: At_Roots__P Parameter: Tissue Value: Roots vs. Whole Plant
gcggccgcgtcgacgcgcggcggagccatggttctcaagactgagctttgccgattcagtggccagaaaatttaccctggtagagggatcagatttatccgatcggactctcaggtgtttttgtttctcaactccaaatgtaagaggtatttccacaacaagttgaagccatctaagctttgctggactgctatgtaccgaaagcagcacaagaaggacgcagcacaagaggctgtgaagagaaggagacgtgcaactaagaagccttactcaaggtcgattgtcggtgctactttggaggttattcagaagaagcgagcagagaagcctgaagttcgtgatgccgctagagaagctgccctacgtgagatcaaggagagaatcaagaagaccaaggacgagaagaaggcaaagaaggtcgagtatgcatcaaagcaacagaagtcacaagtgaagggaaatatccccaagagtgctgcacccaaggctgctaagatgggtggtggtggaggcagacgttgaatggagctatagagtagcccactcttctctcttcacttatctttctttcttgttttgacattgttttgttttgtcagccattttttagttttgcaccagatctaatatattcagtttatgaaaactttttgtttggtatcaaaagtcgacgcggccgcgatgncgggncngcgttcgacgtcgacgcggccgcggtttgatcatcttgtgagaaaaataatggctgcttcagtgatgctatcttcggtgacattgaaaccagctggtttcacggtggagaanacggcggctagaggattaccgtcgctcacaagagctcgtccctccttcaaaattgtcgcccagtggcgtcaagaagatcaagaccgacaagcccttcggaattaacggcagcatggacttgagggacggcgtcgacgcctccggcagaaagggcaagggatacggtgtttacaagtacgtcgacaagtatggagctaacgtcgatggatacagtcctatttacaacgagaacgagtggtcagcgagtggtgacgtgtacaagggaggagtcaccggattggcaatttgggcggtaactctcgccggaattcttgccggaggtgctcttcttgtgtacaacacaagtgctttggctcagtaaatcttaaagttgttagcgcatgtgtaatcatgtttctataaatgtttctgtgttgttctctttctctctaatgttgtaaaactcagacatactttgaatttataagacttctagtgtttg

SEQ ID NO: 76183 - protein, 173 aa, Arabidopsis thaliana
  peptide (1)..(173): Ceres Seq. ID no. 7107042
  misc_feature (12)..(82): Pfam Name: Ribosomal protein L24e Pfam Description: Ribosomal protein L24e
  misc_feature (10)..(173): Homolog of NCBI NO: 18404176 NR Description: 60S ribosomal protein L24; protein id: supported by cDNA: 14564., supported by cDNA: gi_16604375, by cDNA: gi_18252830 [Arabidopsis thaliana]
  misc_feature (14)..(173): Homolog of NCBI NO: 25295112 NR Description: 60S ribosomal protein L24 [imported] -
  misc_feature (10)..(173): Homolog of NCBI NO: 15231730 NR Description: 60S ribosomal protein - like; protein id: supported by cDNA: gi_16648705, supported by cDNA: gi_20260561 thaliana] >gi|26454659|sp|P38666|RL24_ARATH 60S ribosomal protein
  misc_feature (10)..(172): Homolog of NCBI NO: 6094040 NR Description: 60S ribosomal protein L24
  misc_feature (10)..(173): Homolog of NCBI NO: 1710521 NR Description: 60S RIBOSOMAL PROTEIN L24 >gi|7440778|pir||T06178
  misc_feature (10)..(168): Homolog of NCBI NO: 10180025 NR Description: 60S ribosomal protein L24 [Prunus avium]
  misc_feature (13)..(173): Homolog of NCBI NO: 34900364 NR Description: putative 60S ribosomal protein L24 [Oryza sativa
  misc_feature (6)..(168): Homolog of NCBI NO: 28174943 NR Description: Similar to ribosomal protein L24 [Mus musculus]
  misc_feature (12)..(145): Homolog of NCBI NO: 23481839 NR Description: Ribosomal protein L24e, putative [Plasmodium
  misc_feature (12)..(145): Homolog of NCBI NO: 23613084 NR Description: 60S ribosomal subunit protein L24, putative falciparum 3D7] >gi|23504546|emb|CAD51426.1| 60S ribosomal
AAASTRGGAMVLKTELCRFSGQKIYPGRGIRFIRSDSQVFLFLNSKCKRYFHNKLKPSKLCWTAMYRKQHKKDAAQEAVKRRRRATKKPYSRSIVGATLEVIQKKRAEKPEVRDAAREAALREIKERIKKTKDEKKAKKVEYASKQQKSQVKGNIPKSAAPKAAKMGGGGGRR

SEQ ID NO: 76184 - protein, 164 aa, Arabidopsis thaliana; identical to SEQ ID NO: 29606
  peptide (1)..(164): Ceres Seq. ID no. 7107043
  misc_feature (3)..(73): Pfam Name: Ribosomal protein L24e Pfam Description: Ribosomal protein L24e
  misc_feature (1)..(164): Homolog of NCBI NO: 18404176 NR Description: 60S ribosomal protein L24; protein id: supported by cDNA: 14564., supported by cDNA: gi_16604375, by cDNA: gi_18252830 [Arabidopsis thaliana]
  misc_feature (5)..(164): Homolog of NCBI NO: 25295112 NR Description: 60S ribosomal protein L24 [imported] -
  misc_feature (1)..(164): Homolog of NCBI NO: 15231730 NR Description: 60S ribosomal protein - like; protein id: supported by cDNA: gi_16648705, supported by cDNA: gi_20260561 thaliana] >gi|26454659|sp|P38666|RL24_ARATH 60S ribosomal protein
  misc_feature (1)..(163): Homolog of NCBI NO: 6094040 NR Description: 60S ribosomal protein L24
  misc_feature (1)..(164): Homolog of NCBI NO: 1710521 NR Description: 60S RIBOSOMAL PROTEIN L24 >gi|7440778|pir||T06178
  misc_feature (1)..(159): Homolog of NCBI NO: 10180025 NR Description: 60S ribosomal protein L24 [Prunus avium]
  misc_feature (4)..(164): Homolog of NCBI NO: 34900364 NR Description: putative 60S ribosomal protein L24 [Oryza sativa
  misc_feature (1)..(159): Homolog of NCBI NO: 28174943 NR Description: Similar to ribosomal protein L24 [Mus musculus]
  misc_feature (3)..(136): Homolog of NCBI NO: 23481839 NR Description: Ribosomal protein L24e, putative [Plasmodium
  misc_feature (3)..(136): Homolog of NCBI NO: 23613084 NR Description: 60S ribosomal subunit protein L24, putative falciparum 3D7] >gi|23504546|emb|CAD51426.1| 60S ribosomal

SEQ ID NO: 76185 - protein, 109 aa, Arabidopsis thaliana; identical to SEQ ID NO: 29607
  peptide (1)..(109): Ceres Seq. ID no. 7107044
  misc_feature (1)..(109): Homolog of NCBI NO: 18404176 NR Description: 60S ribosomal protein L24; protein id: supported by cDNA: 14564., supported by cDNA: gi_16604375, by cDNA: gi_18252830 [Arabidopsis thaliana]
  misc_feature (1)..(109): Homolog of NCBI NO: 25295112 NR Description: 60S ribosomal protein L24 [imported] -
  misc_feature (1)..(109): Homolog of NCBI NO: 15231730 NR Description: 60S ribosomal protein - like; protein id: supported by cDNA: gi_16648705, supported by cDNA: gi_20260561 thaliana] >gi|26454659|sp|P38666|RL24_ARATH 60S ribosomal protein
  misc_feature (1)..(108): Homolog of NCBI NO: 6094040 NR Description: 60S ribosomal protein L24
  misc_feature (1)..(109): Homolog of NCBI NO: 1710521 NR Description: 60S RIBOSOMAL PROTEIN L24 >gi|7440778|pir||T06178
  misc_feature (1)..(104): Homolog of NCBI NO: 10180025 NR Description: 60S ribosomal protein L24 [Prunus avium]
  misc_feature (1)..(109): Homolog of NCBI NO: 34900364 NR Description: putative 60S ribosomal protein L24 [Oryza sativa
  misc_feature (1)..(104): Homolog of NCBI NO: 28174943 NR Description: Similar to ribosomal protein L24 [Mus musculus]
  misc_feature (1)..(81): Homolog of NCBI NO: 23481839 NR Description: Ribosomal protein L24e, putative [Plasmodium
  misc_feature (1)..(81): Homolog of NCBI NO: 23613084 NR Description: 60S ribosomal subunit protein L24, putative falciparum 3D7] >gi|23504546|emb|CAD51426.1| 60S ribosomal

SEQ ID NO: 76186 - DNA, 1102 bp, Arabidopsis thaliana
  misc_feature (1)..(1102): Ceres Seq. ID no. 7107045
  misc_feature: MA Experiment ID: 108434 Result: Up-regulated in Transcription
  misc_feature: MA Experiment 108434 PARAMETER Experiment Name: At_Root_Tips_cDNA_P Parameter: Tissue Value: Root Tips
  misc_feature: MA Experiment ID: 108462 Result: Down-regulated in Transcription
  misc_feature: MA Experiment 108462 PARAMETER Experiment Name: At_Germinating_Seeds_cDNA_P Parameter: Age (day) Value: 2 vs. 0
  misc_feature: MA Experiment 108462 PARAMETER Experiment Name: At_Germinating_Seeds_cDNA_P Parameter: Tissue Value: Germinating Seeds
  misc_feature: MA Experiment ID: 108463 Result: Down-regulated in Transcription
  misc_feature: MA Experiment 108463 PARAMETER Experiment Name: At_Germinating_Seeds_cDNA_P Parameter: Age (day) Value: 3 vs. 0
  misc_feature: MA Experiment 108463 PARAMETER Experiment Name: At_Germinating_Seeds_cDNA_P Parameter: Tissue Value: Germinating Seeds
  misc_feature: MA Experiment ID: 108464 Result: Down-regulated in Transcription
  misc_feature: MA Experiment 108464 PARAMETER Experiment Name: At_Germinating_Seeds_cDNA_P Parameter: Age (day) Value: 4 vs. 0
  misc_feature: MA Experiment 108464 PARAMETER Experiment Name: At_Germinating_Seeds_cDNA_P Parameter: Tissue Value: Germinating Seeds
  misc_feature: MA Experiment ID: 20001557 Result: Up-regulated in Transcription
  misc_feature: MA Experiment 20001557 PARAMETER Experiment Name: At_Drought_Soil_Dry_P Parameter: Age (day) Value: 27
  misc_feature: MA Experiment 20001557 PARAMETER Experiment Name: At_Drought_Soil_Dry_P Parameter: Organism Value: A. thaliana
  misc_feature: MA Experiment 20001557 PARAMETER Experiment Name: At_Drought_Soil_Dry_P Parameter: Plant Line Value: WS
  misc_feature: MA Experiment 20001557 PARAMETER Experiment Name: At_Drought_Soil_Dry_P Parameter: Post Timepoint (hr) Value: 3
  misc_feature: MA Experiment 20001557 PARAMETER Experiment Name: At_Drought_Soil_Dry_P Parameter: Post-Treatment Value: Re-Water vs. No Drought
  misc_feature: MA Experiment 20001557 PARAMETER Experiment Name: At_Drought_Soil_Dry_P Parameter: Timepoint (day) Value: 13
  misc_feature: MA Experiment 20001557 PARAMETER Experiment Name: At_Drought_Soil_Dry_P Parameter: Treatment Value: Drought vs. No Drought
  misc_feature: MA Experiment ID: 20001558 Result: Up-regulated in Transcription
  misc_feature: MA Experiment 20001558 PARAMETER Experiment Name: At_Drought_Soil_Dry_P Parameter: Age (day) Value: 27
  misc_feature: MA Experiment 20001558 PARAMETER Experiment Name: At_Drought_Soil_Dry_P Parameter: Organism Value: A. thaliana
  misc_feature: MA Experiment 20001558 PARAMETER Experiment Name: At_Drought_Soil_Dry_P Parameter: Plant Line Value: WS
  misc_feature: MA Experiment 20001558 PARAMETER Experiment Name: At_Drought_Soil_Dry_P Parameter: Post Timepoint (hr) Value: 6
  misc_feature: MA Experiment 20001558 PARAMETER Experiment Name: At_Drought_Soil_Dry_P Parameter: Post-Treatment Value: Re-Water vs. No Drought
  misc_feature: MA Experiment 20001558 PARAMETER Experiment Name: At_Drought_Soil_Dry_P Parameter: Timepoint (day) Value: 13
  misc_feature: MA Experiment 20001558 PARAMETER Experiment Name: At_Drought_Soil_Dry_P Parameter: Treatment Value: Drought vs. No Drought
tcgacccacgcgtccgcgatcgaagcaaaagcggcgcatctgaatcccaaacgagtgacgatgacgatcgattcgcagcaaaaaacgagcaaattcagatggggggaaatggacgaagacgaagatctggatttcttgctccctcccaagcaggtgattggtccagatgagaatggtttgaagacgacgatcgagtacaaattcaacgatgaagaaaataaggttaagataacgactaggacacgtgtccgcaagctagcttctgctcgactcaacaaacgagccatggagaggaggaactggcctaagttcggagacgcagccaatgaggaagctggtagccatctcactatggtttctaccgaagagatccttctcgaacgaccccgagctcctggtaccaaagcggatgaatcaaaggcaacaggagatggcttgtctcagctgggtaaaggtggtgcagttctcatggtgtgcaggatatgccacaagaaaggagatcactggacatcaaaatgtccatacaaggatctagctgcaccaaccgatgtcttcattgacaagccacccacaggggaatcatctaccatgtctgctgcacctggaactggcaaggccgcgtatgtcccgcctagcatgagagcaggtgcagacagaagcgctgtgggttcagacatgaggaggaggaacgatgagaactctgtgcgtgtaaccaatctgtccgaggatacccgtgaacctgacttgatggagctgttccacccgtttggagctgtcacacgtgtctatgtggccattgatcagaaaactggagtgagcagaggatttggtttcgtcaatttcgtgagcagagaagacgctcaaagagcaatcaacaaattgaatggttatggttatgataacctcatcctcagggttgaatgggcaactccaagaccaacctagaaagaaatgtctgatgttgagaccttaaaactcttctcattctcgtctttcttgttatggatttttgtttatcgaccagtttgtttgttggtttggtttctgtatgaatagatgagaatttgttcaatttctctttaatacataaggcatgcttttt

SEQ ID NO: 76187 - protein, 314 aa, Arabidopsis thaliana
  peptide (1)..(314): Ceres Seq. ID no. 7107046
  misc_feature (235)..(306): Pfam Name: RNA recognition motif. (a.k.a. RRM, RBD, or RNP domain) Pfam Description: RNA recognition motif. (a.k.a. RRM, RBD, or RNP
  misc_feature (21)..(314): Homolog of NCBI NO: 15229743 NR Description: eukaryotic translation initiation factor 3 g (eIF3g); protein id: At3g11400.1, supported by cDNA: 39231., by cDNA: gi_12407750, supported by cDNA: gi_16226340, supported
  misc_feature (21)..(314): Homolog of NCBI NO: 12407751 NR Description: initiation factor 3g [Arabidopsis thaliana] putative eukaryotic translation initiation factor 3 subunit
  misc_feature (21)..(312): Homolog of NCBI NO: 10177573 NR Description: eukaryotic translation initiation factor 3
  misc_feature (52)..(312): Homolog of NCBI NO: 30681225 NR Description: eukaryotic translation initiation factor 3, [Arabidopsis thaliana] >gi|18252945|gb|AAL62399.1| eukaryotic
  misc_feature (30)..(311): Homolog of NCBI NO: 29124629 NR Description: Similar to eukaryotic translation initiation
  misc_feature (44)..(311): Homolog of NCBI NO: 31980808 NR Description: eukaryotic translation initiation factor 3,
  misc_feature (46)..(311): Homolog of NCBI NO: 23503064 NR Description: Eukaryotic translation initiation factor 3
  misc_feature (46)..(311): Homolog of NCBI NO: 30583983 NR Description: Homo sapiens eukaryotic translation initiation
  misc_feature (44)..(311): Homolog of NCBI NO: 4097873 NR Description: eIF3-p44 [Mus musculus]
  misc_feature (46)..(311): Homolog of NCBI NO: 4503517 NR Description: eukaryotic translation initiation factor 3,
STHASAIEAKAAHLNPKRVTMTIDSQQKTSKFRWGEMDEDEDLDFLLPPKQVIGPDENGLKTTIEYKFNDEENKVKITTRTRVRKLASARLNKRAMERRNWPKFGDAANEEAGSHLTMVSTEEILLERPRAPGTKADESKATGDGLSQLGKGGAVLMVCRICHKKGDHWTSKCPYKDLAAPTDVFIDKPPTGESSTMSAAPGTGKAAYVPPSMRAGADRSAVGSDMRRRNDENSVRVTNLSEDTREPDLMELFHPFGAVTRVYVAIDQKTGVSRGFGFVNFVSREDAQRAINKLNGYGYDNLILRVEWATPRPT

SEQ ID NO: 76188 - protein, 294 aa, Arabidopsis thaliana; identical to SEQ ID NO: 24880
  peptide (1)..(294): Ceres Seq. ID no. 7107047
  misc_feature (215)..(286): Pfam Name: RNA recognition motif. (a.k.a. RRM, RBD, or RNP domain) Pfam Description: RNA recognition motif. (a.k.a. RRM, RBD, or RNP
  misc_feature (1)..(294): Homolog of NCBI NO: 15229743 NR Description: eukaryotic translation initiation factor 3 g (eIF3g); protein id: At3g11400.1, supported by cDNA: 39231., by cDNA: gi_12407750, supported by cDNA: gi_16226340, supported
  misc_feature (1)..(294): Homolog of NCBI NO: 12407751 NR Description: initiation factor 3g [Arabidopsis thaliana] putative eukaryotic translation initiation factor 3 subunit
  misc_feature (1)..(292): Homolog of NCBI NO: 10177573 NR Description: eukaryotic translation initiation factor 3
  misc_feature (32)..(292): Homolog of NCBI NO: 30681225 NR Description: eukaryotic translation initiation factor 3, [Arabidopsis thaliana] >gi|18252945|gb|AAL62399.1| eukaryotic
  misc_feature (10)..(291): Homolog of NCBI NO: 29124629 NR Description: Similar to eukaryotic translation initiation
  misc_feature (24)..(291): Homolog of NCBI NO: 31980808 NR Description: eukaryotic translation initiation factor 3,
  misc_feature (26)..(291): Homolog of NCBI NO: 23503064 NR Description: Eukaryotic translation initiation factor 3
  misc_feature (26)..(291): Homolog of NCBI NO: 30583983 NR Description: Homo sapiens eukaryotic translation initiation
  misc_feature (24)..(291): Homolog of NCBI NO: 4097873 NR Description: eIF3-p44 [Mus musculus]
  misc_feature (26)..(291): Homolog of NCBI NO: 4503517 NR Description: eukaryotic translation initiation factor 3,

SEQ ID NO: 76189 - protein, 278 aa, Arabidopsis thaliana; identical to SEQ ID NO: 24881
  peptide (1)..(278): Ceres Seq. ID no. 7107048
  misc_feature (199)..(270): Pfam Name: RNA recognition motif. (a.k.a. RRM, RBD, or RNP domain) Pfam Description: RNA recognition motif. (a.k.a. RRM, RBD, or RNP
  misc_feature (1)..(278): Homolog of NCBI NO: 15229743 NR Description: eukaryotic translation initiation factor 3 g (eIF3g); protein id: At3g11400.1, supported by cDNA: 39231., by cDNA: gi_12407750, supported by cDNA: gi_16226340, supported
  misc_feature (1)..(278): Homolog of NCBI NO: 12407751 NR Description: initiation factor 3g [Arabidopsis thaliana] putative eukaryotic translation initiation factor 3 subunit
  misc_feature (1)..(276): Homolog of NCBI NO: 10177573 NR Description: eukaryotic translation initiation factor 3
  misc_feature (16)..(276): Homolog of NCBI NO: 30681225 NR Description: eukaryotic translation initiation factor 3, [Arabidopsis thaliana] >gi|18252945|gb|AAL62399.1| eukaryotic
  misc_feature (1)..(275): Homolog of NCBI NO: 29124629 NR Description: Similar to eukaryotic translation initiation
  misc_feature (8)..(275): Homolog of NCBI NO: 31980808 NR Description: eukaryotic translation initiation factor 3,
  misc_feature (10)..(275): Homolog of NCBI NO: 23503064 NR Description: Eukaryotic translation initiation factor 3
  misc_feature (10)..(275): Homolog of NCBI NO: 30583983 NR Description: Homo sapiens eukaryotic translation initiation
  misc_feature (8)..(275): Homolog of NCBI NO: 4097873 NR Description: eIF3-p44 [Mus musculus]
  misc_feature (10)..(275): Homolog of NCBI NO: 4503517 NR Description: eukaryotic translation initiation factor 3,

SEQ ID NO: 76190 - DNA, 1201 bp, Arabidopsis thaliana
  misc_feature (1)..(1201): Ceres Seq. ID no. 7107053
  misc_feature: MA Experiment ID: 20000169 Result: Up-regulated in Transcription
  misc_feature: MA Experiment 20000169 PARAMETER Experiment Name: At_100uM_ABA_P Parameter: Age (day) Value: 14
  misc_feature: MA Experiment 20000169 PARAMETER Experiment Name: At_100uM_ABA_P Parameter: Organism Value: A. thaliana
  misc_feature: MA Experiment 20000169 PARAMETER Experiment Name: At_100uM_ABA_P Parameter: Plant Line Value: WS
  misc_feature: MA Experiment 20000169 PARAMETER Experiment Name: At_100uM_ABA_P Parameter: Timepoint (hr) Value: 6
  misc_feature: MA Experiment 20000169 PARAMETER Experiment Name: At_100uM_ABA_P Parameter: Tissue Value: Aerial
  misc_feature: MA Experiment 20000169 PARAMETER Experiment Name: At_100uM_ABA_P Parameter: Treatment Value: 100uM ABA vs. No Treatment
  misc_feature: MA Experiment ID: 20000179 Result: Up-regulated in Transcription
  misc_feature: MA Experiment 20000179 PARAMETER Experiment Name: At_Germinating_Seeds_P Parameter: Age (hr) Value: 6 vs. 0
  misc_feature: MA Experiment 20000179 PARAMETER Experiment Name: At_Germinating_Seeds_P Parameter: Tissue Value: Germinating Seeds
  misc_feature: MA Experiment ID: 20000180 Result: Up-regulated in Transcription
  misc_feature: MA Experiment 20000180 PARAMETER Experiment Name: At_Germinating_Seeds_P Parameter: Age (hr) Value: 24 vs. 0
  misc_feature: MA Experiment 20000180 PARAMETER Experiment Name: At_Germinating_Seeds_P Parameter: Tissue Value: Germinating Seeds
  misc_feature: MA Experiment ID: 20000182 Result: Up-regulated in Transcription
  misc_feature: MA Experiment 20000182 PARAMETER Experiment Name: At_2mM_SA_P Parameter: Age (day) Value: 14
  misc_feature: MA Experiment 20000182 PARAMETER Experiment Name: At_2mM_SA_P Parameter: Organism Value: A. thaliana
  misc_feature: MA Experiment 20000182 PARAMETER Experiment Name: At_2mM_SA_P Parameter: Plant Line Value: WS
  misc_feature: MA Experiment 20000182 PARAMETER Experiment Name: At_2mM_SA_P Parameter: Timepoint (hr) Value: 6
  misc_feature: MA Experiment 20000182 PARAMETER Experiment Name: At_2mM_SA_P Parameter: Tissue Value: Aerial
  misc_feature: MA Experiment 20000182 PARAMETER Experiment Name: At_2mM_SA_P Parameter: Treatment Value: 2mM SA vs. No Treatment
  misc_feature: MA Experiment ID: 20000185 Result: Up-regulated in Transcription
  misc_feature: MA Experiment 20000185 PARAMETER Experiment Name: At_Roots__P Parameter: Age (day) Value: 7 vs. 21
  misc_feature: MA Experiment 20000185 PARAMETER Experiment Name: At_Roots__P Parameter: Organism Value: A. thaliana
  misc_feature: MA Experiment 20000185 PARAMETER Experiment Name: At_Roots__P Parameter: Tissue Value: Roots vs. Whole Plant
  misc_feature: MA Experiment ID: 20000267 Result: Up-regulated in Transcription
  misc_feature: MA Experiment 20000267 PARAMETER Experiment Name: At_Drought_P Parameter: Age (day) Value: 7
  misc_feature: MA Experiment 20000267 PARAMETER Experiment Name: At_Drought_P Parameter: Organism Value: A. thaliana
  misc_feature: MA Experiment 20000267 PARAMETER Experiment Name: At_Drought_P Parameter: Plant Line Value: WS
  misc_feature: MA Experiment 20000267 PARAMETER Experiment Name: At_Drought_P Parameter: Timepoint (hr) Value: 6
  misc_feature: MA Experiment 20000267 PARAMETER Experiment Name: At_Drought_P Parameter: Tissue Value: Whole Plant
  misc_feature: MA Experiment 20000267 PARAMETER Experiment Name: At_Drought_P Parameter: Treatment Value: Drought vs. No Drought
  misc_feature: MA Experiment ID: 20000268 Result: Up-regulated in Transcription
  misc_feature: MA Experiment 20000268 PARAMETER Experiment Name: At_100mM_NaCl__P Parameter: Age (day) Value: 14
  misc_feature: MA Experiment 20000268 PARAMETER Experiment Name: At_100mM_NaCl__P Parameter: Organism Value: A. thaliana
  misc_feature: MA Experiment 20000268 PARAMETER Experiment Name: At_100mM_NaCl__P Parameter: Plant Line Value: WS
  misc_feature: MA Experiment 20000268 PARAMETER Experiment Name: At_100mM_NaCl__P Parameter: Timepoint (hr) Value: 6
  misc_feature: MA Experiment 20000268 PARAMETER Experiment Name: At_100mM_NaCl__P Parameter: Tissue Value: Whole Plant
  misc_feature: MA Experiment 20000268 PARAMETER Experiment Name: At_100mM_NaCl__P Parameter: Treatment Value: 100mM NaCl vs. No Treatment
  misc_feature: MA Experiment ID: 20000436 Result: Up-regulated in Transcription
  misc_feature: MA Experiment 20000436 PARAMETER Experiment Name: At_Drought_P Parameter: Age (day) Value: 7
  misc_feature: MA Experiment 20000436 PARAMETER Experiment Name: At_Drought_P Parameter: Organism Value: A. thaliana
  misc_feature: MA Experiment 20000436 PARAMETER Experiment Name: At_Drought_P Parameter: Plant Line Value: WS
  misc_feature: MA Experiment 20000436 PARAMETER Experiment Name: At_Drought_P Parameter: Timepoint (hr) Value: 12
  misc_feature: MA Experiment 20000436 PARAMETER Experiment Name: At_Drought_P Parameter: Tissue Value: Whole Plant
  misc_feature: MA Experiment 20000436 PARAMETER Experiment Name: At_Drought_P Parameter: Treatment Value: Drought vs. No Drought
  misc_feature: MA Experiment ID: 20000437 Result: Up-regulated in Transcription
  misc_feature: MA Experiment 20000437 PARAMETER Experiment Name: At_Drought_P Parameter: Age (day) Value: 8
  misc_feature: MA Experiment 20000437 PARAMETER Experiment Name: At_Drought_P Parameter: Organism Value: A. thaliana
  misc_feature: MA Experiment 20000437 PARAMETER Experiment Name: At_Drought_P Parameter: Plant Line Value: WS
  misc_feature: MA Experiment 20000437 PARAMETER Experiment Name: At_Drought_P Parameter: Timepoint (hr) Value: 24
  misc_feature: MA Experiment 20000437 PARAMETER Experiment Name: At_Drought_P Parameter: Tissue Value: Whole Plant
  misc_feature: MA Experiment 20000437 PARAMETER Experiment Name: At_Drought_P Parameter: Treatment Value: Drought vs. No Drought
  misc_feature: MA Experiment ID: 20000439 Result: Up-regulated in Transcription
  misc_feature: MA Experiment 20000439 PARAMETER Experiment Name: At_Roots__P Parameter: Age (day) Value: 14 vs. 21
  misc_feature: MA Experiment 20000439 PARAMETER Experiment Name: At_Roots__P Parameter: Organism Value: A. thaliana
  misc_feature: MA Experiment 20000439 PARAMETER Experiment Name: At_Roots__P Parameter: Tissue Value: Roots vs. Whole Plant
  misc_feature: MA Experiment ID: 20000453 Result: Up-regulated in Transcription
  misc_feature: MA Experiment 20000453 PARAMETER Experiment Name: At_100uM_ABA_P Parameter: Age (day) Value: 15
  misc_feature: MA Experiment 20000453 PARAMETER Experiment Name: At_100uM_ABA_P Parameter: Organism Value: A. thaliana
  misc_feature: MA Experiment 20000453 PARAMETER Experiment Name: At_100uM_ABA_P Parameter: Plant Line Value: WS
  misc_feature: MA Experiment 20000453 PARAMETER Experiment Name: At_100uM_ABA_P Parameter: Timepoint (hr) Value: 24
  misc_feature: MA Experiment 20000453 PARAMETER Experiment Name: At_100uM_ABA_P Parameter: Tissue Value: Aerial
  misc_feature: MA Experiment 20000453 PARAMETER Experiment Name: At_100uM_ABA_P Parameter: Treatment Value: 100uM ABA vs. No Treatment
  misc_feature: MA Experiment ID: 20001248 Result: Down-regulated in Transcription
  misc_feature: MA Experiment 20001248 PARAMETER Experiment Name: At_Far-red-induction_P Parameter: Age (day) Value: 7
  misc_feature: MA Experiment 20001248 PARAMETER Experiment Name: At_Far-red-induction_P Parameter: Light Value: Far-red vs. White
  misc_feature: MA Experiment 20001248 PARAMETER Experiment Name: At_Far-red-induction_P Parameter: Organism Value: A. thaliana
  misc_feature: MA Experiment 20001248 PARAMETER Experiment Name: At_Far-red-induction_P Parameter: Plant Line Value: Columbia
  misc_feature: MA Experiment 20001248 PARAMETER Experiment Name: At_Far-red-induction_P Parameter: Timepoint (hr) Value: 4
  misc_feature: MA Experiment 20001248 PARAMETER Experiment Name: At_Far-red-induction_P Parameter: Tissue Value: Whole Plant
  misc_feature: MA Experiment ID: 20001904 Result: Up-regulated in Transcription
  misc_feature: MA Experiment 20001904 PARAMETER Experiment Name: At_Drought_Reproduction_P Parameter: Age (day) Value: 37
  misc_feature: MA Experiment 20001904 PARAMETER Experiment Name: At_Drought_Reproduction_P Parameter: Organism Value: A. thaliana
  misc_feature: MA Experiment 20001904 PARAMETER Experiment Name: At_Drought_Reproduction_P Parameter: Plant Line Value: WS
  misc_feature: MA Experiment 20001904 PARAMETER Experiment Name: At_Drought_Reproduction_P Parameter: Timepoint (day) Value: 7
  misc_feature: MA Experiment 20001904 PARAMETER Experiment Name: At_Drought_Reproduction_P Parameter: Tissue Value: Rosettes
  misc_feature: MA Experiment 20001904 PARAMETER Experiment Name: At_Drought_Reproduction_P Parameter: Treatment Value: Drought vs. No Drought
  misc_feature: MA Experiment ID: 20001905 Result: Up-regulated in Transcription
  misc_feature: MA Experiment 20001905 PARAMETER Experiment Name: At_Drought_Reproduction_P Parameter: Age (day) Value: 40
  misc_feature: MA Experiment 20001905 PARAMETER Experiment Name: At_Drought_Reproduction_P Parameter: Organism Value: A. thaliana
  misc_feature: MA Experiment 20001905 PARAMETER Experiment Name: At_Drought_Reproduction_P Parameter: Plant Line Value: WS
  misc_feature: MA Experiment 20001905 PARAMETER Experiment Name: At_Drought_Reproduction_P Parameter: Timepoint (day) Value: 10
  misc_feature: MA Experiment 20001905 PARAMETER Experiment Name: At_Drought_Reproduction_P Parameter: Tissue Value: Rosettes
  misc_feature: MA Experiment 20001905 PARAMETER Experiment Name: At_Drought_Reproduction_P Parameter: Treatment Value: Drought vs. No Drought
  misc_feature: MA Experiment ID: 20001906 Result: Up-regulated in Transcription
  misc_feature: MA Experiment 20001906 PARAMETER Experiment Name: At_Drought_Reproduction_P Parameter: Age (day) Value: 35
  misc_feature: MA Experiment 20001906 PARAMETER Experiment Name: At_Drought_Reproduction_P Parameter: Organism Value: A. thaliana
  misc_feature: MA Experiment 20001906 PARAMETER Experiment Name: At_Drought_Reproduction_P Parameter: Plant Line Value: WS
  misc_feature: MA Experiment 20001906 PARAMETER Experiment Name: At_Drought_Reproduction_P Parameter: Timepoint (day) Value: 5
  misc_feature: MA Experiment 20001906 PARAMETER Experiment Name: At_Drought_Reproduction_P Parameter: Tissue Value: Siliques
  misc_feature: MA Experiment 20001906 PARAMETER Experiment Name: At_Drought_Reproduction_P Parameter: Treatment Value: Drought vs. No Drought
  misc_feature: MA Experiment ID: 20001907 Result: Up-regulated in Transcription
  misc_feature: MA Experiment 20001907 PARAMETER Experiment Name: At_Drought_Reproduction_P Parameter: Age (day) Value: 37
  misc_feature: MA Experiment 20001907 PARAMETER Experiment Name: At_Drought_Reproduction_P Parameter: Organism Value: A. thaliana
  misc_feature: MA Experiment 20001907 PARAMETER Experiment Name: At_Drought_Reproduction_P Parameter: Plant Line Value: WS
  misc_feature: MA Experiment 20001907 PARAMETER Experiment Name: At_Drought_Reproduction_P Parameter: Timepoint (day) Value: 7
  misc_feature: MA Experiment 20001907 PARAMETER Experiment Name: At_Drought_Reproduction_P Parameter: Tissue Value: Siliques
  misc_feature: MA Experiment 20001907 PARAMETER Experiment Name: At_Drought_Reproduction_P Parameter: Treatment Value: Drought vs. No Drought
  misc_feature: MA Experiment ID: 20001911 Result: Up-regulated in Transcription
  misc_feature: MA Experiment 20001911 PARAMETER Experiment Name: At_Drought_Reproduction_P Parameter: Age (day) Value: 40
  misc_feature: MA Experiment 20001911 PARAMETER Experiment Name: At_Drought_Reproduction_P Parameter: Organism Value: A. thaliana
  misc_feature: MA Experiment 20001911 PARAMETER Experiment Name: At_Drought_Reproduction_P Parameter: Plant Line Value: WS
  misc_feature: MA Experiment 20001911 PARAMETER Experiment Name: At_Drought_Reproduction_P Parameter: Timepoint (day) Value: 10
  misc_feature: MA Experiment 20001911 PARAMETER Experiment Name: At_Drought_Reproduction_P Parameter: Tissue Value: Flowers
  misc_feature: MA Experiment 20001911 PARAMETER Experiment Name: At_Drought_Reproduction_P Parameter: Treatment Value: Drought vs. No Drought
cccacgcgtccgcaatcatcgggccggacaatttaaagggcacgaaacacgtccttcaagatgctaagaccattcctcttcccgtcgatggaccagagagcctagagttcgatccacaaggtgaaggcccttacgttggcgtcaccgacggtcgcattctcaaatggcgcggtgaagaactcggctgggtcgatttcgcctacacttctcctcacagagataactgttcgagtcatgaggtagtaccaagttgtgggagaccattgggacttagcttcgagaggaaaacaggagatttgtacatatgtgatggttactttggggtcatgaaggtcggaccagagggaggcctggccgagttagttgttgatgaagccgaaggtcgtaaagttatgtttgccaaccaaggggatatagacgaagaggaagatattttctacttcaatgatagcagcgatacataccatttcagggacgtattttacgtgtctttgtccgggacaaaggttggaagagtaattagatacgatatgaagaagaaagaggccaaagttattatggacaaacttcgtttaccaaatggtctagctctaagcaaaaacggttcgtttgtagtcacatgcgagagtagtacgaacacttgccatagaatatgggtcaaaggtcccaaatccggaaccaacgaggttttcgcaacgctccctggttccccggacaatatccggcgtacgccaacaggcgatttctgggtcgcattacattgcaaaaagaatttgttcacacgtgcagttttgattcacacttgggtcggaaggtttttcatgaacacgatgaagatggagactgtaattcatttcatgaacggaggaaaacctcatggaattgtcgtgaaactctctggagagacaggagagattcttgagatacttgaggacagtgaagggaagacggtgaaatatgttagtgaggcttatgagacaaaagatggaaagttatggatcggatctgtgtattggccggccgtttgggttcttgatacatcggtttatgattccatatgagttagccaaaagaccaaacgccaaaatgaaataaattatcacttagttgtgtaatttgtttattagcgggaatgcatcttgtttttgtatcttcttgtttgttgcgtgagtgaattatatatgatgtaaacttggattct

SEQ ID NO: 76191 - protein, 352 aa, Arabidopsis thaliana
  peptide (1)..(352): Ceres Seq. ID no. 7107054
  misc_feature (16)..(341): Pfam Name: Strictosidine synthase Pfam Description: Strictosidine synthase
  misc_feature (1)..(352): Homolog of NCBI NO: 6759491 NR Description: hypothetical protein [Arabidopsis thaliana]
  misc_feature (3)..(352): Homolog of NCBI NO: 15230182 NR Description: strictosidine synthase-related; protein id: supported by cDNA: gi_13877836 [Arabidopsis thaliana]
  misc_feature (3)..(352): Homolog of NCBI NO: 13877837 NR Description: unknown protein [Arabidopsis thaliana]
  misc_feature (5)..(345): Homolog of NCBI NO: 15230200 NR Description: strictosidine synthase-related; protein id: supported by cDNA: 98698., supported by cDNA: gi_14532519
  misc_feature (37)..(345): Homolog of NCBI NO: 15227324 NR Description: strictosidine synthase-related; protein id: [Arabidopsis thaliana] >gi|25335893|pir||B84840 probable
  misc_feature (3)..(345): Homolog of NCBI NO: 11280567 NR Description: hypothetical protein F24I3.110 - Arabidopsis >gi|6911873|emb|CAB72173.1| putative protein [Arabidopsis
  misc_feature (3)..(345): Homolog of NCBI NO: 30694556 NR Description: strictosidine synthase-related [Arabidopsis
  misc_feature (15)..(345): Homolog of NCBI NO: 18390900 NR Description: strictosidine synthase-related; protein id: supported by cDNA: gi_16930480, supported by cDNA: gi_17381181 thaliana] >gi|16930481|gb|AAL31926.1|AF419594_1 At1g08470/T27G7_9
  misc_feature (8)..(345): Homolog of NCBI NO: 22326950 NR Description: similar to strictosidine synthase-related; id: At5g22020.1 [Arabidopsis thaliana]
  misc_feature (15)..(210): Homolog of NCBI NO: 25335889 NR Description: protein T27G7.16 [imported] - Arabidopsis >gi|6664319|gb|AAF22901.1|AC006932_18 T27G7.16 [Arabidopsis
HASAIIGPDNLKGTKHVLQDAKTIPLPVDGPESLEFDPQGEGPYVGVTDGRILKWRGEELGWVDFAYTSPHRDNCSSHEVVPSCGRPLGLSFERKTGDLYICDGYFGVMKVGPEGGLAELVVDEAEGRKVMFANQGDIDEEEDIFYFNDSSDTYHFRDVFYVSLSGTKVGRVIRYDMKKKEAKVIMDKLRLPNGLALSKNGSFVVTCESSTNTCHRIWVKGPKSGTNEVFATLPGSPDNIRRTPTGDFWVALHCKKNLFTRAVLIHTWVGRFFMNTMKMETVIHFMNGGKPHGIVVKLSGETGEILEILEDSEGKTVKYVSEAYETKDGKLWIGSVYWPAVWVLDTSVYDSI

SEQ ID NO: 76192 - protein, 244 aa, Arabidopsis thaliana
  peptide (1)..(244): Ceres Seq. ID no. 7107055
  misc_feature (1)..(233): Pfam Name: Strictosidine synthase Pfam Description: Strictosidine synthase
  misc_feature (1)..(244): Homolog of NCBI NO: 6759491 NR Description: hypothetical protein [Arabidopsis thaliana]
  misc_feature (1)..(244): Homolog of NCBI NO: 15230182 NR Description: strictosidine synthase-related; protein id: supported by cDNA: gi_13877836 [Arabidopsis thaliana]
  misc_feature (1)..(244): Homolog of NCBI NO: 13877837 NR Description: unknown protein [Arabidopsis thaliana]
  misc_feature (1)..(237): Homolog of NCBI NO: 15230200 NR Description: strictosidine synthase-related; protein id: supported by cDNA: 98698., supported by cDNA: gi_14532519
  misc_feature (1)..(237): Homolog of NCBI NO: 15227324 NR Description: strictosidine synthase-related; protein id: [Arabidopsis thaliana] >gi|25335893|pir||B84840 probable
  misc_feature (1)..(237): Homolog of NCBI NO: 11280567 NR Description: hypothetical protein F24I3.110 - Arabidopsis >gi|6911873|emb|CAB72173.1| putative protein [Arabidopsis
  misc_feature (1)..(237): Homolog of NCBI NO: 30694556 NR Description: strictosidine synthase-related [Arabidopsis
  misc_feature (1)..(237): Homolog of NCBI NO: 18390900 NR Description: strictosidine synthase-related; protein id: supported by cDNA: gi_16930480, supported by cDNA: gi_17381181 thaliana] >gi|16930481|gb|AAL31926.1|AF419594_1 At1g08470/T27G7_9
  misc_feature (1)..(237): Homolog of NCBI NO: 22326950 NR Description: similar to strictosidine synthase-related; id: At5g22020.1 [Arabidopsis thaliana]
  misc_feature (1)..(102): Homolog of NCBI NO: 25335889 NR Description: protein T27G7.16 [imported] - Arabidopsis >gi|6664319|gb|AAF22901.1|AC006932_18 T27G7.16 [Arabidopsis
MKVGPEGGLAELVVDEAEGRKVMFANQGDIDEEEDIFYFNDSSDTYHFRDVFYVSLSGTKVGRVIRYDMKKKEAKVIMDKLRLPNGLALSKNGSFVVTCESSTNTCHRIWVKGPKSGTNEVFATLPGSPDNIRRTPTGDFWVALHCKKNLFTRAVLIHTWVGRFFMNTMKMETVIHFMNGGKPHGIVVKLSGETGEILEILEDSEGKTVKYVSEAYETKDGKLWIGSVYWPAVWVLDTSVYDSI

SEQ ID NO: 76193 - protein, 222 aa, Arabidopsis thaliana
  peptide (1)..(222): Ceres Seq. ID no. 7107056
  misc_feature (1)..(211): Pfam Name: Strictosidine synthase Pfam Description: Strictosidine synthase
  misc_feature (1)..(222): Homolog of NCBI NO: 6759491 NR Description: hypothetical protein [Arabidopsis thaliana]
  misc_feature (1)..(222): Homolog of NCBI NO: 15230182 NR Description: strictosidine synthase-related; protein id: supported by cDNA: gi_13877836 [Arabidopsis thaliana]
  misc_feature (1)..(222): Homolog of NCBI NO: 13877837 NR Description: unknown protein [Arabidopsis thaliana]
  misc_feature (1)..(215): Homolog of NCBI NO: 15230200 NR Description: strictosidine synthase-related; protein id: supported by cDNA: 98698., supported by cDNA: gi_14532519
  misc_feature (1)..(215): Homolog of NCBI NO: 15227324 NR Description: strictosidine synthase-related; protein id: [Arabidopsis thaliana] >gi|25335893|pir||B84840 probable
  misc_feature (1)..(215): Homolog of NCBI NO: 11280567 NR Description: hypothetical protein F24I3.110 - Arabidopsis >gi|6911873|emb|CAB72173.1| putative protein [Arabidopsis
  misc_feature (1)..(215): Homolog of NCBI NO: 30694556 NR Description: strictosidine synthase-related [Arabidopsis
  misc_feature (1)..(215): Homolog of NCBI NO: 18390900 NR Description: strictosidine synthase-related; protein id: supported by cDNA: gi_16930480, supported by cDNA: gi_17381181 thaliana] >gi|16930481|gb|AAL31926.1|AF419594_1 At1g08470/T27G7_9
  misc_feature (1)..(215): Homolog of NCBI NO: 22326950 NR Description: similar to strictosidine synthase-related; id: At5g22020.1 [Arabidopsis thaliana]
  misc_feature (1)..(80): Homolog of NCBI NO: 25335889 NR Description: protein T27G7.16 [imported] - Arabidopsis >gi|6664319|gb|AAF22901.1|AC006932_18 T27G7.16 [Arabidopsis
MFANQGDIDEEEDIFYFNDSSDTYHFRDVFYVSLSGTKVGRVIRYDMKKKEAKVIMDKLRLPNGLALSKNGSFVVTCESSTNTCHRIWVKGPKSGTNEVFATLPGSPDNIRRTPTGDFWVALHCKKNLFTRAVLIHTWVGRFFMNTMKMETVIHFMNGGKPHGIVVKLSGETGEILEILEDSEGKTVKYVSEAYETKDGKLWIGSVYWPAVWVLDTSVYDSI

SEQ ID NO: 76194 - DNA, 2076 bp, Arabidopsis thaliana
  misc_feature (1)..(2076): Ceres Seq. ID no. 7107064
  misc_feature: MA Experiment ID: 20000173 Result: Down-regulated in Transcription
  misc_feature: MA Experiment 20000173 PARAMETER Experiment Name: At_42deg_Heat_P Parameter: Age (day) Value: 14
  misc_feature: MA Experiment 20000173 PARAMETER Experiment Name: At_42deg_Heat_P Parameter: Organism Value: A. thaliana
  misc_feature: MA Experiment 20000173 PARAMETER Experiment Name: At_42deg_Heat_P Parameter: Plant Line Value: WS
  misc_feature: MA Experiment 20000173 PARAMETER Experiment Name: At_42deg_Heat_P Parameter: Temperature (deg C) Value: 42 vs. 22
  misc_feature: MA Experiment 20000173 PARAMETER Experiment Name: At_42deg_Heat_P Parameter: Timepoint (hr) Value: 6
  misc_feature: MA Experiment 20000173 PARAMETER Experiment Name: At_42deg_Heat_P Parameter: Tissue Value: Aerial
  misc_feature: MA Experiment ID: 20000180 Result: Up-regulated in Transcription
  misc_feature: MA Experiment 20000180 PARAMETER Experiment Name: At_Germinating_Seeds_P Parameter: Age (hr) Value: 24 vs. 0
  misc_feature: MA Experiment 20000180 PARAMETER Experiment Name: At_Germinating_Seeds_P Parameter: Tissue Value: Germinating Seeds
  misc_feature: MA Experiment ID: 20000182 Result: Down-regulated in Transcription
  misc_feature: MA Experiment 20000182 PARAMETER Experiment Name: At_2mM_SA_P Parameter: Age (day) Value: 14
  misc_feature: MA Experiment 20000182 PARAMETER Experiment Name: At_2mM_SA_P Parameter: Organism Value: A. thaliana
  misc_feature: MA Experiment 20000182 PARAMETER Experiment Name: At_2mM_SA_P Parameter: Plant Line Value: WS
  misc_feature: MA Experiment 20000182 PARAMETER Experiment Name: At_2mM_SA_P Parameter: Timepoint (hr) Value: 6
  misc_feature: MA Experiment 20000182 PARAMETER Experiment Name: At_2mM_SA_P Parameter: Tissue Value: Aerial
  misc_feature: MA Experiment 20000182 PARAMETER Experiment Name: At_2mM_SA_P Parameter: Treatment Value: 2mM SA vs. No Treatment
  misc_feature: MA Experiment ID: 20000185 Result: Down-regulated in Transcription
  misc_feature: MA Experiment 20000185 PARAMETER Experiment Name: At_Roots__P Parameter: Age (day) Value: 7 vs. 21
  misc_feature: MA Experiment 20000185 PARAMETER Experiment Name: At_Roots__P Parameter: Organism Value: A. thaliana
  misc_feature: MA Experiment 20000185 PARAMETER Experiment Name: At_Roots__P Parameter: Tissue Value: Roots vs. Whole Plant
  misc_feature: MA Experiment ID: 20000439 Result: Down-regulated in Transcription
  misc_feature: MA Experiment 20000439 PARAMETER Experiment Name: At_Roots__P Parameter: Age (day) Value: 14 vs. 21
  misc_feature: MA Experiment 20000439 PARAMETER Experiment Name: At_Roots__P Parameter: Organism Value: A. thaliana
  misc_feature: MA Experiment 20000439 PARAMETER Experiment Name: At_Roots__P Parameter: Tissue Value: Roots vs. Whole Plant
  misc_feature: MA Experiment ID: 20000794 Result: Down-regulated in Transcription
  misc_feature: MA Experiment 20000794 PARAMETER Experiment Name: At_Petals_P Parameter: Age (day) Value: 23-25 days
  misc_feature: MA Experiment 20000794 PARAMETER Experiment Name: At_Petals_P Parameter: Plant Line Value: WS
  misc_feature: MA Experiment 20000794 PARAMETER Experiment Name: At_Petals_P Parameter: Tissue Value: Petals vs. Whole plant
  misc_feature: MA Experiment ID: 20001247 Result: Down-regulated in Transcription
  misc_feature: MA Experiment 20001247 PARAMETER Experiment Name: At_Far-red-induction_P Parameter: Age (day) Value: 7
  misc_feature: MA Experiment 20001247 PARAMETER Experiment Name: At_Far-red-induction_P Parameter: Light Value: Far-red vs. White
  misc_feature: MA Experiment 20001247 PARAMETER Experiment Name: At_Far-red-induction_P Parameter: Organism Value: A. thaliana
  misc_feature: MA Experiment 20001247 PARAMETER Experiment Name: At_Far-red-induction_P Parameter: Plant Line Value: Columbia
  misc_feature: MA Experiment 20001247 PARAMETER Experiment Name: At_Far-red-induction_P Parameter: Timepoint (hr) Value: 1
  misc_feature: MA Experiment 20001247 PARAMETER Experiment Name: At_Far-red-induction_P Parameter: Tissue Value: Whole Plant
  misc_feature: MA Experiment ID: 20001451 Result: Down-regulated in Transcription
  misc_feature: MA Experiment 20001451 PARAMETER Experiment Name: At_Far-red-induction_P Parameter: Age (day) Value: 7
  misc_feature: MA Experiment 20001451 PARAMETER Experiment Name: At_Far-red-induction_P Parameter: Light Value: Far-red vs. White
  misc_feature: MA Experiment 20001451 PARAMETER Experiment Name: At_Far-red-induction_P Parameter: Organism Value: A. thaliana
  misc_feature: MA Experiment 20001451 PARAMETER Experiment Name: At_Far-red-induction_P Parameter: Plant Line Value: Columbia
  misc_feature: MA Experiment 20001451 PARAMETER Experiment Name: At_Far-red-induction_P Parameter: Timepoint (hr) Value: 24
  misc_feature: MA Experiment 20001451 PARAMETER Experiment Name: At_Far-red-induction_P Parameter: Tissue Value: Whole Plant
  misc_feature: MA Experiment ID: 20001557 Result: Down-regulated in Transcription
  misc_feature: MA Experiment 20001557 PARAMETER Experiment Name: At_Drought_Soil_Dry_P Parameter: Age (day) Value: 27
  misc_feature: MA Experiment 20001557 PARAMETER Experiment Name: At_Drought_Soil_Dry_P Parameter: Organism Value: A. thaliana
  misc_feature: MA Experiment 20001557 PARAMETER Experiment Name: At_Drought_Soil_Dry_P Parameter: Plant Line Value: WS
  misc_feature: MA Experiment 20001557 PARAMETER Experiment Name: At_Drought_Soil_Dry_P Parameter: Post Timepoint (hr) Value: 3
  misc_feature: MA Experiment 20001557 PARAMETER Experiment Name: At_Drought_Soil_Dry_P Parameter: Post-Treatment Value: Re-Water vs. No Drought
  misc_feature: MA Experiment 20001557 PARAMETER Experiment Name: At_Drought_Soil_Dry_P Parameter: Timepoint (day) Value: 13
  misc_feature: MA Experiment 20001557 PARAMETER Experiment Name: At_Drought_Soil_Dry_P Parameter: Treatment Value: Drought vs. No Drought
  misc_feature: MA Experiment ID: 20001558 Result: Down-regulated in Transcription
  misc_feature: MA Experiment 20001558 PARAMETER Experiment Name: At_Drought_Soil_Dry_P Parameter: Age (day) Value: 27
  misc_feature: MA Experiment 20001558 PARAMETER Experiment Name: At_Drought_Soil_Dry_P Parameter: Organism Value: A. thaliana
  misc_feature: MA Experiment 20001558 PARAMETER Experiment Name: At_Drought_Soil_Dry_P Parameter: Plant Line Value: WS
  misc_feature: MA Experiment 20001558 PARAMETER Experiment Name: At_Drought_Soil_Dry_P Parameter: Post Timepoint (hr) Value: 6
  misc_feature: MA Experiment 20001558 PARAMETER Experiment Name: At_Drought_Soil_Dry_P Parameter: Post-Treatment Value: Re-Water vs. No Drought
  misc_feature: MA Experiment 20001558 PARAMETER Experiment Name: At_Drought_Soil_Dry_P Parameter: Timepoint (day) Value: 13
  misc_feature: MA Experiment 20001558 PARAMETER Experiment Name: At_Drought_Soil_Dry_P Parameter: Treatment Value: Drought vs. No Drought
  misc_feature: MA Experiment ID: 20001757 Result: Up-regulated in Transcription
  misc_feature: MA Experiment 20001757 PARAMETER Experiment Name: At_50mM_NH4NO3_L-to-H_P Parameter: Timepoint (hr) Value: 6
  misc_feature: MA Experiment 20001757 PARAMETER Experiment Name: At_50mM_NH4NO3_L-to-H_P Parameter: Tissue Value: Leaf
  misc_feature: MA Experiment 20001757 PARAMETER Experiment Name: At_50mM_NH4NO3_L-to-H_P Parameter: Treatment Value: 50mM NH4NO3 vs 100mM Mannitol
  misc_feature: MA Experiment ID: 20001904 Result: Down-regulated in Transcription
  misc_feature: MA Experiment 20001904 PARAMETER Experiment Name: At_Drought_Reproduction_P Parameter: Age (day) Value: 37
  misc_feature: MA Experiment 20001904 PARAMETER Experiment Name: At_Drought_Reproduction_P Parameter: Organism Value: A. thaliana
  misc_feature: MA Experiment 20001904 PARAMETER Experiment Name: At_Drought_Reproduction_P Parameter: Plant Line Value: WS
  misc_feature: MA Experiment 20001904 PARAMETER Experiment Name: At_Drought_Reproduction_P Parameter: Timepoint (day) Value: 7
  misc_feature: MA Experiment 20001904 PARAMETER Experiment Name: At_Drought_Reproduction_P Parameter: Tissue Value: Rosettes
  misc_feature: MA Experiment 20001904 PARAMETER Experiment Name: At_Drought_Reproduction_P Parameter: Treatment Value: Drought vs. No Drought
  misc_feature: MA Experiment ID: 20001905 Result: Down-regulated in Transcription
  misc_feature: MA Experiment 20001905 PARAMETER Experiment Name: At_Drought_Reproduction_P Parameter: Age (day) Value: 40
  misc_feature: MA Experiment 20001905 PARAMETER Experiment Name: At_Drought_Reproduction_P Parameter: Organism Value: A. thaliana
  misc_feature: MA Experiment 20001905 PARAMETER Experiment Name: At_Drought_Reproduction_P Parameter: Plant Line Value: WS
  misc_feature: MA Experiment 20001905 PARAMETER Experiment Name: At_Drought_Reproduction_P Parameter: Timepoint (day) Value: 10
  misc_feature: MA Experiment 20001905 PARAMETER Experiment Name: At_Drought_Reproduction_P Parameter: Tissue Value: Rosettes
  misc_feature: MA Experiment 20001905 PARAMETER Experiment Name: At_Drought_Reproduction_P Parameter: Treatment Value: Drought vs. No Drought
  misc_feature (1888)..(1888): n is a, c, t, g, unknown, or other
ggaattcgcggccgccttcactcttttaacggacacttttcactgatctattcactcactcaaatcgccgccggagctaaatcaatcaacaatgacgtcgacctacacgagattcgataccgtatttctcttttctaggttcgccggcgctaagtattcgccgttattgccgtctccgtcgtttactttatctacttccggcattcatatcagaaccaaaccgaattctcgttttcactcgattatagcatcctcctcatcttcatctgtagtcgccggaactgatagcattgagattaaatcgttgccgacgaagcctattgaaggacaaaagactggaactagcggactccggaagaaggtgaaagttttcatggaagataattatttagccaactggattcaggcattgtttaattcattgccacttgaggattataagaatgcaacgttggttttaggaggtgatggtcgttactttaacaaagaagcttcacagatcattatcaaaattgctgctgggaatggagttggacaaattttagttggaaaggaaggcattttgtcaaccccagcggtttccgctgtaatcaggaaaagaaaggcaaatggaggattcattatgagtgcaagccataatcctggtggacctgaatatgactggggtatcaagttcaattacagcagtggtcagcctgctcctgaaaccattactgacaaaatatatggaaatacactttcaatctctgagattaaggtggcagagattcctgatattgatctttctcaagttggagtgaccaaatatgggaatttcagtgtagaagttatagatcctgtttccgactatttggagctcatggaggatgttttcgactttgatctcatcagaggtcttctttcaagatcagattttgggttcatgtttgatgccatgcatgctgttactggtgcttatgcgaaaccaatttttgtcgacaatcttggagccaaaccggattcaatttccaacggagttcccctggaagattttgggcatggccatcctgatcctaatttgacatatgcaaaggatttggttgatgtcatgtatcgtgacaatggaccggatttcggagcagcaagtgatggtgatggtgacagaaatatggttttaggaaacaaattctttgtcactccttcagactctgtagctatcatcgcagccaatgcacaagaagcaattccatatttccgtgctggtcctaaggggctggcacgttctatgccgacaagtggtgctcttgatcgtgttgccgagaagttgaagcttcctttcttcgaggttcccactggatggaaattttttggaaatcttatggatgctggaaaattgtcaatctgtggagaagagagctttggcacagtttctgatcacatccgtgagaaggatggaatatgggctgtgttggcgtggctttcgatccttgctcatcgcaacaaggacacgaaaccaggggacaagttggtgtctgttgcagatgttgtgaaagagtattgggcgacatacggaaggaactttttttcaagatacgactatgaagaatgtgaatctgaaggagccaataaaatgatcgagtatcttagagaaatcttgtctaagagcaaggccggtgacgtttatggaaactatgtcctccagtttgcagatgacttctcatacacagaccctgttgatggaagtgttgcatccaagcaaggtgttcggtttgtgttcacggatggatccagaatcatatttcgtttatccggaactggctcagctggagctacagtgcgaatatacattgaacaatttgagccagacgtttcaaaacatgatgtggatgcacaaatagctcttaaaccnttaatcgatcttgcattgtctgtatcaaagctgaaggacttcacagggagggagaagcccactgtcattacatgaagagaagtgtcacatggtcctttcgataaggcaatttgggttcctgacttcagttttgtctgccatgtttatttgaaaattccagagcaatgaaatgcttatccgcggccgcg

SEQ ID NO: 76195 - protein, 623 aa, Arabidopsis thaliana
  peptide (1)..(623): Ceres Seq. ID no. 7107065
  misc_feature (362)..(486): Pfam Name: Phosphoglucomutase/phosphomannomutase, Pfam Description: Phosphoglucomutase/phosphomannomutase,
  misc_feature (1)..(623): Homolog of NCBI NO: 12585325 NR Description: Phosphoglucomutase, chloroplast precursor phosphomutase) (PGM) >gi|6272125|emb|CAB60109.1| plastidial
  misc_feature (29)..(623): Homolog of NCBI NO: 12585295 NR Description: Phosphoglucomutase, chloroplast precursor phosphomutase) (PGM) >gi|6272283|emb|CAB60128.1| plastidial
  misc_feature (50)..(623): Homolog of NCBI NO: 12585317 NR Description: Phosphoglucomutase, chloroplast precursor phosphomutase) (PGM) >gi|8250622|emb|CAB93680.1| plastidic
  misc_feature (47)..(623): Homolog of NCBI NO: 22725961 NR Description: putative plastidic phosphoglucomutase [Oryza
  misc_feature (74)..(623): Homolog of NCBI NO: 12585326 NR Description: Phosphoglucomutase, cytoplasmic (Glucose (PGM) >gi|6166505|gb|AAF04862.1|AF197925_1 putative cytosolic
  misc_feature (68)..(623): Homolog of NCBI NO: 12643355 NR Description: Probable phosphoglucomutase, cytoplasmic 1 phosphomutase 1) (PGM 1) >gi|25292702|pir||B86366
  misc_feature (74)..(623): Homolog of NCBI NO: 18076790 NR Description: phosphoglucomutase [Triticum aestivum]
  misc_feature (44)..(623): Homolog of NCBI NO: 33876434 NR Description: PGM1 protein [Homo sapiens]
  misc_feature (67)..(623): Homolog of NCBI NO: 30584157 NR Description: Homo sapiens phosphoglucomutase 1 [synthetic
  misc_feature (53)..(623): Homolog of NCBI NO: 33416468 NR Description: Unknown (protein for IMAGE:6403536) [Mus musculus]
  misc_feature (599)..(599): Xaa is any aa, unknown or other
MTSTYTRFDTVFLFSRFAGAKYSPLLPSPSFTLSTSGIHIRTKPNSRFHSIIASSSSSSVVAGTDSIEIKSLPTKPIEGQKTGTSGLRKKVKVFMEDNYLANWIQALFNSLPLEDYKNATLVLGGDGRYFNKEASQIIIKIAAGNGVGQILVGKEGILSTPAVSAVIRKRKANGGFIMSASHNPGGPEYDWGIKFNYSSGQPAPETITDKIYGNTLSISEIKVAEIPDIDLSQVGVTKYGNFSVEVIDPVSDYLELMEDVFDFDLIRGLLSRSDFGFMFDAMHAVTGAYAKPIFVDNLGAKPDSISNGVPLEDFGHGHPDPNLTYAKDLVDVMYRDNGPDFGAASDGDGDRNMVLGNKFFVTPSDSVAIIAANAQEAIPYFRAGPKGLARSMPTSGALDRVAEKLKLPFFEVPTGWKFFGNLMDAGKLSICGEESFGTVSDHIREKDGIWAVLAWLSILAHRNKDTKPGDKLVSVADVVKEYWATYGRNFFSRYDYEECESEGANKMIEYLREILSKSKAGDVYGNYVLQFADDFSYTDPVDGSVASKQGVRFVFTDGSRIIFRLSGTGSAGATVRIYIEQFEPDVSKHDVDAQIALKXLIDLALSVSKLKDFTGREKPTVIT

SEQ ID NO: 76196 - protein, 529 aa, Arabidopsis thaliana
  peptide (1)..(529): Ceres Seq. ID no. 7107066
  misc_feature (268)..(392): Pfam Name: Phosphoglucomutase/phosphomannomutase, Pfam Description: Phosphoglucomutase/phosphomannomutase,
  misc_feature (1)..(529): Homolog of NCBI NO: 12585325 NR Description: Phosphoglucomutase, chloroplast precursor phosphomutase) (PGM) >gi|6272125|emb|CAB60109.1| plastidial
  misc_feature (1)..(529): Homolog of NCBI NO: 12585295 NR Description: Phosphoglucomutase, chloroplast precursor phosphomutase) (PGM) >gi|6272283|emb|CAB60128.1| plastidial
  misc_feature (1)..(529): Homolog of NCBI NO: 12585317 NR Description: Phosphoglucomutase, chloroplast precursor phosphomutase) (PGM) >gi|8250622|emb|CAB93680.1| plastidic
  misc_feature (1)..(529): Homolog of NCBI NO: 22725961 NR Description: putative plastidic phosphoglucomutase [Oryza
  misc_feature (1)..(529): Homolog of NCBI NO: 12585326 NR Description: Phosphoglucomutase, cytoplasmic (Glucose (PGM) >gi|6166505|gb|AAF04862.1|AF197925_1 putative cytosolic
  misc_feature (1)..(529): Homolog of NCBI NO: 12643355 NR Description: Probable phosphoglucomutase, cytoplasmic 1 phosphomutase 1) (PGM 1) >gi|25292702|pir||B86366
  misc_feature (1)..(529): Homolog of NCBI NO: 18076790 NR Description: phosphoglucomutase [Triticum aestivum]
  misc_feature (1)..(529): Homolog of NCBI NO: 33876434 NR Description: PGM1 protein [Homo sapiens]
  misc_feature (1)..(529): Homolog of NCBI NO: 30584157 NR Description: Homo sapiens phosphoglucomutase 1 [synthetic
  misc_feature (1)..(529): Homolog of NCBI NO: 33416468 NR Description: Unknown (protein for IMAGE:6403536) [Mus musculus]
  misc_feature (505)..(505): Xaa is any aa, unknown or other
MEDNYLANWIQALFNSLPLEDYKNATLVLGGDGRYFNKEASQIIIKIAAGNGVGQILVGKEGILSTPAVSAVIRKRKANGGFIMSASHNPGGPEYDWGIKFNYSSGQPAPETITDKIYGNTLSISEIKVAEIPDIDLSQVGVTKYGNFSVEVIDPVSDYLELMEDVFDFDLIRGLLSRSDFGFMFDAMHAVTGAYAKPIFVDNLGAKPDSISNGVPLEDFGHGHPDPNLTYAKDLVDVMYRDNGPDFGAASDGDGDRNMVLGNKFFVTPSDSVAIIAANAQEAIPYFRAGPKGLARSMPTSGALDRVAEKLKLPFFEVPTGWKFFGNLMDAGKLSICGEESFGTVSDHIREKDGIWAVLAWLSILAHRNKDTKPGDKLVSVADVVKEYWATYGRNFFSRYDYEECESEGANKMIEYLREILSKSKAGDVYGNYVLQFADDFSYTDPVDGSVASKQGVRFVFTDGSRIIFRLSGTGSAGATVRIYIEQFEPDVSKHDVDAQIALKXLIDLALSVSKLKDFTGREKPTVIT

SEQ ID NO: 76197 - protein, 446 aa, Arabidopsis thaliana
  peptide (1)..(446): Ceres Seq. ID no. 7107067
  misc_feature (185)..(309): Pfam Name: Phosphoglucomutase/phosphomannomutase, Pfam Description: Phosphoglucomutase/phosphomannomutase,
  misc_feature (1)..(446): Homolog of NCBI NO: 12585325 NR Description: Phosphoglucomutase, chloroplast precursor phosphomutase) (PGM) >gi|6272125|emb|CAB60109.1| plastidial
  misc_feature (1)..(446): Homolog of NCBI NO: 12585295 NR Description: Phosphoglucomutase, chloroplast precursor phosphomutase) (PGM) >gi|6272283|emb|CAB60128.1| plastidial
  misc_feature (1)..(446): Homolog of NCBI NO: 12585317 NR Description: Phosphoglucomutase, chloroplast precursor phosphomutase) (PGM) >gi|8250622|emb|CAB93680.1| plastidic
  misc_feature (1)..(446): Homolog of NCBI NO: 22725961 NR Description: putative plastidic phosphoglucomutase [Oryza
  misc_feature (1)..(446): Homolog of NCBI NO: 12585326 NR Description: Phosphoglucomutase, cytoplasmic (Glucose (PGM) >gi|6166505|gb|AAF04862.1|AF197925_1 putative cytosolic
  misc_feature (1)..(446): Homolog of NCBI NO: 12643355 NR Description: Probable phosphoglucomutase, cytoplasmic 1 phosphomutase 1) (PGM 1) >gi|25292702|pir||B86366
  misc_feature (1)..(446): Homolog of NCBI NO: 18076790 NR Description: phosphoglucomutase [Triticum aestivum]
  misc_feature (1)..(446): Homolog of NCBI NO: 33876434 NR Description: PGM1 protein [Homo sapiens]
  misc_feature (1)..(446): Homolog of NCBI NO: 30584157 NR Description: Homo sapiens phosphoglucomutase 1 [synthetic
  misc_feature (1)..(446): Homolog of NCBI NO: 33416468 NR Description: Unknown (protein for IMAGE:6403536) [Mus musculus]
  misc_feature (422)..(422): Xaa is any aa, unknown or other
MSASHNPGGPEYDWGIKFNYSSGQPAPETITDKIYGNTLSISEIKVAEIPDIDLSQVGVTKYGNFSVEVIDPVSDYLELMEDVFDFDLIRGLLSRSDFGFMFDAMHAVTGAYAKPIFVDNLGAKPDSISNGVPLEDFGHGHPDPNLTYAKDLVDVMYRDNGPDFGAASDGDGDRNMVLGNKFFVTPSDSVAIIAANAQEAIPYFRAGPKGLARSMPTSGALDRVAEKLKLPFFEVPTGWKFFGNLMDAGKLSICGEESFGTVSDHIREKDGIWAVLAWLSILAHRNKDTKPGDKLVSVADVVKEYWATYGRNFFSRYDYEECESEGANKMIEYLREILSKSKAGDVYGNYVLQFADDFSYTDPVDGSVASKQGVRFVFTDGSRIIFRLSGTGSAGATVRIYIEQFEPDVSKHDVDAQIALKXLIDLALSVSKLKDFTGREKPTVIT

SEQ ID NO: 76198 - DNA, 714 bp, Arabidopsis thaliana
  misc_feature (1)..(714): Ceres Seq. ID no. 7107071
  misc_feature: MA Experiment ID: 108435 Result: Down-regulated in Transcription
  misc_feature: MA Experiment 108435 PARAMETER Experiment Name: At_stm_Mutants_cDNA_P Parameter: Plant Line Value: wt Landsburg vs stm
  misc_feature: MA Experiment 108435 PARAMETER Experiment Name: At_stm_Mutants_cDNA_P Parameter: Tissue Value: Shoot Apical Meristem Region
  misc_feature: MA Experiment ID: 108595 Result: Down-regulated in Transcription
  misc_feature: MA Experiment 108595 PARAMETER Experiment Name: At_Ler-pi_Ovule_cDNA_P Parameter: Plant Line Value: null
  misc_feature: MA Experiment ID: 20000439 Result: Down-regulated in Transcription
  misc_feature: MA Experiment 20000439 PARAMETER Experiment Name: At_Roots__P Parameter: Age (day) Value: 14 vs. 21
  misc_feature: MA Experiment 20000439 PARAMETER Experiment Name: At_Roots__P Parameter: Organism Value: A. thaliana
  misc_feature: MA Experiment 20000439 PARAMETER Experiment Name: At_Roots__P Parameter: Tissue Value: Roots vs. Whole Plant
  misc_feature: MA Experiment ID: 20001905 Result: Down-regulated in Transcription
  misc_feature: MA Experiment 20001905 PARAMETER Experiment Name: At_Drought_Reproduction_P Parameter: Age (day) Value: 40
  misc_feature: MA Experiment 20001905 PARAMETER Experiment Name: At_Drought_Reproduction_P Parameter: Organism Value: A. thaliana
  misc_feature: MA Experiment 20001905 PARAMETER Experiment Name: At_Drought_Reproduction_P Parameter: Plant Line Value: WS
  misc_feature: MA Experiment 20001905 PARAMETER Experiment Name: At_Drought_Reproduction_P Parameter: Timepoint (day) Value: 10
  misc_feature: MA Experiment 20001905 PARAMETER Experiment Name: At_Drought_Reproduction_P Parameter: Tissue Value: Rosettes
  misc_feature: MA Experiment 20001905 PARAMETER Experiment Name: At_Drought_Reproduction_P Parameter: Treatment Value: Drought vs. No Drought
  misc_feature: Pfam Name: Thioredoxin Pfam Description: Thioredoxin
cgcggccgctttggagaaacctctcctctctctatctatagccatggctgctttcacttgtacctctcgtcctccgatttctctccgctccgagaccagaatcgtatcctcatcaccatcggcttcttctctctcttctcggcggatgttcgccgtcttaccggaatcatcaggtttgagaatccgtctttctctctctccggcttcgttgacctcgattcatcaacctagggtttctcgattacgaagagccgtcgtctgtgaagctcaggaaactactaccgatattcaagtggtcaatgactcgacatgggactttctagttcttaaagcaactgggcctgtagttgtcgacttttgggcaccatggtgtggaccttgcaagatgattgatccgcttgtaaacgatctagcacagcattacactgggaagatcaagttctacaaattaaacactgatgaatctcctaatactcccggccagtacggagttagaagcatcccaacgatcatgatctttgtcggtggcgagaagaaggatacaatcataggtgcagtgcccaaaaccacactcacatctagcctcgacaagttcttgccatgaaatatcacttgtggagtctgtaagatctcgtatctctctgtctctcgttcttgttctcattatctctgtaactcattatcactgaacatctagacctggatgcggccgcg

SEQ ID NO: 76199 - protein, 200 aa, Arabidopsis thaliana
  peptide (1)..(200): Ceres Seq. ID no. 7107072
  misc_feature: Pfam Name: Thioredoxin Pfam Description: Thioredoxin
  misc_feature (15)..(200): Homolog of NCBI NO: 6539610 NR Description: thioredoxin m2 [Arabidopsis thaliana]
  misc_feature (15)..(200): Homolog of NCBI NO: 15236327 NR Description: putative M-type thioredoxin; protein id: supported by cDNA: 10950., supported by cDNA: gi_15028102, by cDNA: gi_19310724, supported by cDNA: gi_6539609 [Arabidopsis
  misc_feature (15)..(200): Homolog of NCBI NO: 21618235 NR Description: putative M-type thioredoxin [Arabidopsis thaliana]
  misc_feature (15)..(199): Homolog of NCBI NO: 30678634 NR Description: thioredoxin M-type 1, chloroplast precursor
  misc_feature (15)..(199): Homolog of NCBI NO: 11135407 NR Description: Thioredoxin M-type, chloroplast precursor (TRX-M)
  misc_feature (35)..(199): Homolog of NCBI NO: 6539614 NR Description: thioredoxin m4 [Arabidopsis thaliana]
  misc_feature (35)..(199): Homolog of NCBI NO: 15232567 NR Description: thioredoxin m4; protein id: At3g15360.1, by cDNA: 42151., supported by cDNA: gi_14030704, supported by gi_16974518, supported by cDNA: gi_6539613 [Arabidopsis thaliana]
  misc_feature (26)..(199): Homolog of NCBI NO: 15594012 NR Description: putative thioredoxin m2 [Pisum sativum]
  misc_feature (34)..(199): Homolog of NCBI NO: 1388088 NR Description: thioredoxin m
  misc_feature (34)..(199): Homolog of NCBI NO: 1351239 NR Description: Thioredoxin M-type, chloroplast precursor (TRX-M)
AAALEKPLLSLSIAMAAFTCTSRPPISLRSETRIVSSSPSASSLSSRRMFAVLPESSGLRIRLSLSPASLTSIHQPRVSRLRRAVVCEAQETTTDIQVVNDSTWDFLVLKATGPVVVDFWAPWCGPCKMIDPLVNDLAQHYTGKIKFYKLNTDESPNTPGQYGVRSIPTIMIFVGGEKKDTIIGAVPKTTLTSSLDKFLP

SEQ ID NO: 76200 - protein, 186 aa, Arabidopsis thaliana
  peptide (1)..(186): Ceres Seq. ID no. 7107073
  misc_feature: Pfam Name: Thioredoxin Pfam Description: Thioredoxin
  misc_feature (1)..(186): Homolog of NCBI NO: 6539610 NR Description: thioredoxin m2 [Arabidopsis thaliana]
  misc_feature (1)..(186): Homolog of NCBI NO: 15236327 NR Description: putative M-type thioredoxin; protein id: supported by cDNA: 10950., supported by cDNA: gi_15028102, by cDNA: gi_19310724, supported by cDNA: gi_6539609 [Arabidopsis
  misc_feature (1)..(186): Homolog of NCBI NO: 21618235 NR Description: putative M-type thioredoxin [Arabidopsis thaliana]
  misc_feature (1)..(185): Homolog of NCBI NO: 30678634 NR Description: thioredoxin M-type 1, chloroplast precursor
  misc_feature (1)..(185): Homolog of NCBI NO: 11135407 NR Description: Thioredoxin M-type, chloroplast precursor (TRX-M)
  misc_feature (21)..(185): Homolog of NCBI NO: 6539614 NR Description: thioredoxin m4 [Arabidopsis thaliana]
  misc_feature (21)..(185): Homolog of NCBI NO: 15232567 NR Description: thioredoxin m4; protein id: At3g15360.1, by cDNA: 42151., supported by cDNA: gi_14030704, supported by gi_16974518, supported by cDNA: gi_6539613 [Arabidopsis thaliana]
  misc_feature (12)..(185): Homolog of NCBI NO: 15594012 NR Description: putative thioredoxin m2 [Pisum sativum]
  misc_feature (20)..(185): Homolog of NCBI NO: 1388088 NR Description: thioredoxin m
  misc_feature (20)..(185): Homolog of NCBI NO: 1351239 NR Description: Thioredoxin M-type, chloroplast precursor (TRX-M)
MAAFTCTSRPPISLRSETRIVSSSPSASSLSSRRMFAVLPESSGLRIRLSLSPASLTSIHQPRVSRLRRAVVCEAQETTTDIQVVNDSTWDFLVLKATGPVVVDFWAPWCGPCKMIDPLVNDLAQHYTGKIKFYKLNTDESPNTPGQYGVRSIPTIMIFVGGEKKDTIIGAVPKTTLTSSLDKFLP

SEQ ID NO: 76201 - protein, 152 aa, Arabidopsis thaliana
  peptide (1)..(152): Ceres Seq. ID no. 7107074
  misc_feature: Pfam Name: Thioredoxin Pfam Description: Thioredoxin
  misc_feature (1)..(152): Homolog of NCBI NO: 6539610 NR Description: thioredoxin m2 [Arabidopsis thaliana]
  misc_feature (1)..(152): Homolog of NCBI NO: 15236327 NR Description: putative M-type thioredoxin; protein id: supported by cDNA: 10950., supported by cDNA: gi_15028102, by cDNA: gi_19310724, supported by cDNA: gi_6539609 [Arabidopsis
  misc_feature (1)..(152): Homolog of NCBI NO: 21618235 NR Description: putative M-type thioredoxin [Arabidopsis thaliana]
  misc_feature (1)..(151): Homolog of NCBI NO: 30678634 NR Description: thioredoxin M-type 1, chloroplast precursor
  misc_feature (1)..(151): Homolog of NCBI NO: 11135407 NR Description: Thioredoxin M-type, chloroplast precursor (TRX-M)
  misc_feature (1)..(151): Homolog of NCBI NO: 6539614 NR Description: thioredoxin m4 [Arabidopsis thaliana]
  misc_feature (1)..(151): Homolog of NCBI NO: 15232567 NR Description: thioredoxin m4; protein id: At3g15360.1, by cDNA: 42151., supported by cDNA: gi_14030704, supported by gi_16974518, supported by cDNA: gi_6539613 [Arabidopsis thaliana]
  misc_feature (1)..(151): Homolog of NCBI NO: 15594012 NR Description: putative thioredoxin m2 [Pisum sativum]
  misc_feature (1)..(151): Homolog of NCBI NO: 1388088 NR Description: thioredoxin m
  misc_feature (1)..(151): Homolog of NCBI NO: 1351239 NR Description: Thioredoxin M-type, chloroplast precursor (TRX-M)
MFAVLPESSGLRIRLSLSPASLTSIHQPRVSRLRRAVVCEAQETTTDIQVVNDSTWDFLVLKATGPVVVDFWAPWCGPCKMIDPLVNDLAQHYTGKIKFYKLNTDESPNTPGQYGVRSIPTIMIFVGGEKKDTIIGAVPKTTLTSSLDKFLP

SEQ ID NO: 76202 - DNA, 1304 bp, Arabidopsis thaliana
  misc_feature (1)..(1304): Ceres Seq. ID no. 7107094
  misc_feature: MA Experiment ID: 108434 Result: Up-regulated in Transcription
  misc_feature: MA Experiment 108434 PARAMETER Experiment Name: At_Root_Tips_cDNA_P Parameter: Tissue Value: Root Tips
  misc_feature: MA Experiment ID: 108435 Result: Up-regulated in Transcription
  misc_feature: MA Experiment 108435 PARAMETER Experiment Name: At_stm_Mutants_cDNA_P Parameter: Plant Line Value: wt Landsburg vs stm
  misc_feature: MA Experiment 108435 PARAMETER Experiment Name: At_stm_Mutants_cDNA_P Parameter: Tissue Value: Shoot Apical Meristem Region
  misc_feature: MA Experiment ID: 108461 Result: Down-regulated in Transcription
  misc_feature: MA Experiment 108461 PARAMETER Experiment Name: At_Germinating_Seeds_cDNA_P Parameter: Age (day) Value: 1 vs. 0
  misc_feature: MA Experiment 108461 PARAMETER Experiment Name: At_Germinating_Seeds_cDNA_P Parameter: Tissue Value: Germinating Seeds
  misc_feature: MA Experiment ID: 108462 Result: Down-regulated in Transcription
  misc_feature: MA Experiment 108462 PARAMETER Experiment Name: At_Germinating_Seeds_cDNA_P Parameter: Age (day) Value: 2 vs. 0
  misc_feature: MA Experiment 108462 PARAMETER Experiment Name: At_Germinating_Seeds_cDNA_P Parameter: Tissue Value: Germinating Seeds
  misc_feature: MA Experiment ID: 108463 Result: Down-regulated in Transcription
  misc_feature: MA Experiment 108463 PARAMETER Experiment Name: At_Germinating_Seeds_cDNA_P Parameter: Age (day) Value: 3 vs. 0
  misc_feature: MA Experiment 108463 PARAMETER Experiment Name: At_Germinating_Seeds_cDNA_P Parameter: Tissue Value: Germinating Seeds
  misc_feature: MA Experiment ID: 108464 Result: Down-regulated in Transcription
  misc_feature: MA Experiment 108464 PARAMETER Experiment Name: At_Germinating_Seeds_cDNA_P Parameter: Age (day) Value: 4 vs. 0
  misc_feature: MA Experiment 108464 PARAMETER Experiment Name: At_Germinating_Seeds_cDNA_P Parameter: Tissue Value: Germinating Seeds
  misc_feature: MA Experiment ID: 108573 Result: Up-regulated in Transcription
  misc_feature: MA Experiment 108573 PARAMETER Experiment Name: At_Drought_cDNA_P Parameter: Timepoint (hr) Value: 6
  misc_feature: MA Experiment 108573 PARAMETER Experiment Name: At_Drought_cDNA_P Parameter: Tissue Value: Aerial
  misc_feature: MA Experiment 108573 PARAMETER Experiment Name: At_Drought_cDNA_P Parameter: Treatment Value: Drought vs. No Drought
  misc_feature: MA Experiment ID: 108585 Result: Up-regulated in Transcription
  misc_feature: MA Experiment 108585 PARAMETER Experiment Name: At_5mM_NaNP_cDNA_P Parameter: Timepoint (hr) Value: 6
  misc_feature: MA Experiment 108585 PARAMETER Experiment Name: At_5mM_NaNP_cDNA_P Parameter: Tissue Value: Aerial
  misc_feature: MA Experiment 108585 PARAMETER Experiment Name: At_5mM_NaNP_cDNA_P Parameter: Treatment Value: null
  misc_feature: MA Experiment ID: 20000093 Result: Up-regulated in Transcription
  misc_feature: MA Experiment 20000093 PARAMETER Experiment Name: At_42deg_Heat_cDNA_P Parameter: Temperature (deg C) Value: 42 vs. 22
  misc_feature: MA Experiment 20000093 PARAMETER Experiment Name: At_42deg_Heat_cDNA_P Parameter: Timepoint (hr) Value: 0.5
  misc_feature: MA Experiment 20000093 PARAMETER Experiment Name: At_42deg_Heat_cDNA_P Parameter: Tissue Value: Aerial
  misc_feature: MA Experiment ID: 20000111 Result: Up-regulated in Transcription
  misc_feature: MA Experiment 20000111 PARAMETER Experiment Name: At_42deg_Heat_cDNA_P Parameter: Temperature (deg C) Value: 42 vs. 22
  misc_feature: MA Experiment 20000111 PARAMETER Experiment Name: At_42deg_Heat_cDNA_P Parameter: Timepoint (hr) Value: 6
  misc_feature: MA Experiment 20000111 PARAMETER Experiment Name: At_42deg_Heat_cDNA_P Parameter: Tissue Value: Aerial
  misc_feature: MA Experiment ID: 20000112 Result: Up-regulated in Transcription
  misc_feature: MA Experiment 20000112 PARAMETER Experiment Name: At_42deg_Heat_cDNA_P Parameter: Temperature (deg C) Value: 42 vs. 22
  misc_feature: MA Experiment 20000112 PARAMETER Experiment Name: At_42deg_Heat_cDNA_P Parameter: Timepoint (hr) Value: 2
  misc_feature: MA Experiment 20000112 PARAMETER Experiment Name: At_42deg_Heat_cDNA_P Parameter: Tissue Value: Aerial
  misc_feature: MA Experiment ID: 20000113 Result: Up-regulated in Transcription
  misc_feature: MA Experiment 20000113 PARAMETER Experiment Name: At_42deg_Heat_cDNA_P Parameter: Temperature (deg C) Value: 42 vs. 22
  misc_feature: MA Experiment 20000113 PARAMETER Experiment Name: At_42deg_Heat_cDNA_P Parameter: Timepoint (hr) Value: 8
  misc_feature: MA Experiment 20000113 PARAMETER Experiment Name: At_42deg_Heat_cDNA_P Parameter: Tissue Value: Aerial
  misc_feature: MA Experiment ID: 20000144 Result: Up-regulated in Transcription
  misc_feature: MA Experiment 20000144 PARAMETER Experiment Name: At_42deg_Heat_cDNA_P Parameter: Temperature (deg C) Value: 42 vs. 22
  misc_feature: MA Experiment 20000144 PARAMETER Experiment Name: At_42deg_Heat_cDNA_P Parameter: Timepoint (hr) Value: 1
  misc_feature: MA Experiment 20000144 PARAMETER Experiment Name: At_42deg_Heat_cDNA_P Parameter: Tissue Value: Aerial
atgaagataccccaccaaacccaaaaaaagagatctggaattcggatcctcgagatttaccgtctctctctcgcgctcccaatttctccgccggcgggaaaaccatgtcgcacttcggaaggtcaggtccaccggatatcagcgacacctactcacttctcgtccttaacatcaccttccgtacgactgctgatgatctctatcctctattcgcaaagtatggaaaggtcgttgatgtgtttattcccagagatcgaaggactggtgattcgcgtggttttgcgtttgttcggtataagtataaagacgaagctcacaaagcagtggaaaggcttgatggaagagttgttgatggcagagaaataactgttcagtttgcgaaatatgggccaaatgctgaaaaaatttccaaaggaagagttgtggaaccaccgccgaagtcacgaagatctagaagccgtagtcctaggcggagtcgtagtcctaggaggagccgtagcccgcctagacgtcgtagtcccagaagaagccgcagtcctcgtaggaggtcccgagatgactatagggaaaaagactaccggaagcggagcaggagcagaagctatgacaggcgtgaaaggcatgaggagaaggatagagatcatcgtcgtcgcactaggtctcgtagtgccagcccagatgaaaaacgcagagtcagaggccgttatgataatgagagccgcagtcacagtcgttccttgagtgcatctcctgctcgccgcagccctagaagttcctccccacagaaaacctctcctgctagagaagtttctcctgataagcgtagcaatgagaggtctccatctcctcgtcgcagcctcagcccaagaagccctgctttgcaaaaggcctctccttctaaggatatgtctcctgaaaggcgtagcaatgagaggtccccatctcctggtagccctgctcctctgcgcaaagttgatgctgcttctcgaagtcaatctccttatgctgcggaatgactgcagccacttgtgaaagtgatacggtgtatgatgaaaaacacgtttgcttgtactgatgatgtttcatcattaagcactggaacgtctaccctctgtagtattacttgctttccgtaggtgccctcaaactactgagtactgactgtatctttgtttcctgttatcgttctggtttagtgttcatgtgcaagaattattactgtttgaacagcctttttagtctctgttttatttgaaagtgaactctcgagagatctatgaatcgtagatactgaaaaaccccgc

SEQ ID NO: 76203 - protein, 337 aa, Arabidopsis thaliana
  peptide (1)..(337): Ceres Seq. ID no. 7107095
  misc_feature (52)..(123): Pfam Name: RNA recognition motif. (a.k.a. RRM, RBD, or RNP domain) Pfam Description: RNA recognition motif. (a.k.a. RRM, RBD, or RNP
  misc_feature (35)..(337): Homolog of NCBI NO: 9843653 NR Description: splicing factor SC35 [Arabidopsis thaliana]
  misc_feature (35)..(337): Homolog of NCBI NO: 15237641 NR Description: arginine/serine-rich splicing factor SC35; id: At5g64200.1, supported by cDNA: gi_17380867 [Arabidopsis >gi|17380868|gb|AAL36246.1| unknown protein [Arabidopsis
  misc_feature (35)..(314): Homolog of NCBI NO: 33146621 NR Description: putative splicing factor, arginine/serine-rich 2
  misc_feature (35)..(322): Homolog of NCBI NO: 7446336 NR Description: probable arginine/serine-rich splicing factor -
  misc_feature (38)..(250): Homolog of NCBI NO: 28279759 NR Description: Similar to splicing factor, arginine/serine-rich
  misc_feature (38)..(268): Homolog of NCBI NO: 266991 NR Description: Splicing factor, arginine/serine-rich 2 (Splicing
  misc_feature (38)..(268): Homolog of NCBI NO: 6755478 NR Description: splicing factor, arginine/serine-rich 2; DNA Chr 11, Wayne State University 175, expressed; splicing factor [Mus musculus] >gi|27691222|ref|XP_213556.1| similar to
  misc_feature (38)..(268): Homolog of NCBI NO: 4506899 NR Description: splicing factor, arginine/serine-rich 2 [Homo
  misc_feature (39)..(313): Homolog of NCBI NO: 15055543 NR Description: 46kD arginine/serine-rich splicing factor [Homo
  misc_feature (38)..(255): Homolog of NCBI NO: 39794351 NR Description: Unknown (protein for MGC:75633) [Silurana
EDTPPNPKKEIWNSDPRDLPSLSRAPNFSAGGKTMSHFGRSGPPDISDTYSLLVLNITFRTTADDLYPLFAKYGKVVDVFIPRDRRTGDSRGFAFVRYKYKDEAHKAVERLDGRVVDGREITVQFAKYGPNAEKISKGRVVEPPPKSRRSRSRSPRRSRSPRRSRSPPRRRSPRRSRSPRRRSRDDYREKDYRKRSRSRSYDRRERHEEKDRDHRRRTRSRSASPDEKRRVRGRYDNESRSHSRSLSASPARRSPRSSSPQKTSPAREVSPDKRSNERSPSPRRSLSPRSPALQKASPSKDMSPERRSNERSPSPGSPAPLRKVDAASRSQSPYAAE

SEQ ID NO: 76204 - protein, 303 aa, Arabidopsis thaliana
  peptide (1)..(303): Ceres Seq. ID no. 7107096
  misc_feature (18)..(89): Pfam Name: RNA recognition motif. (a.k.a. RRM, RBD, or RNP domain) Pfam Description: RNA recognition motif. (a.k.a. RRM, RBD, or RNP
  misc_feature (1)..(303): Homolog of NCBI NO: 9843653 NR Description: splicing factor SC35 [Arabidopsis thaliana]
  misc_feature (1)..(303): Homolog of NCBI NO: 15237641 NR Description: arginine/serine-rich splicing factor SC35; id: At5g64200.1, supported by cDNA: gi_17380867 [Arabidopsis >gi|17380868|gb|AAL36246.1| unknown protein [Arabidopsis
  misc_feature (1)..(280): Homolog of NCBI NO: 33146621 NR Description: putative splicing factor, arginine/serine-rich 2
  misc_feature (1)..(288): Homolog of NCBI NO: 7446336 NR Description: probable arginine/serine-rich splicing factor -
  misc_feature (4)..(216): Homolog of NCBI NO: 28279759 NR Description: Similar to splicing factor, arginine/serine-rich
  misc_feature (4)..(234): Homolog of NCBI NO: 266991 NR Description: Splicing factor, arginine/serine-rich 2 (Splicing
  misc_feature (4)..(234): Homolog of NCBI NO: 6755478 NR Description: splicing factor, arginine/serine-rich 2; DNA Chr 11, Wayne State University 175, expressed; splicing factor [Mus musculus] >gi|27691222|ref|XP_213556.1| similar to
  misc_feature (4)..(234): Homolog of NCBI NO: 4506899 NR Description: splicing factor, arginine/serine-rich 2 [Homo
  misc_feature (5)..(279): Homolog of NCBI NO: 15055543 NR Description: 46kD arginine/serine-rich splicing factor [Homo
  misc_feature (4)..(221): Homolog of NCBI NO: 39794351 NR Description: Unknown (protein for MGC:75633) [Silurana
MSHFGRSGPPDISDTYSLLVLNITFRTTADDLYPLFAKYGKVVDVFIPRDRRTGDSRGFAFVRYKYKDEAHKAVERLDGRVVDGREITVQFAKYGPNAEKISKGRVVEPPPKSRRSRSRSPRRSRSPRRSRSPPRRRSPRRSRSPRRRSRDDYREKDYRKRSRSRSYDRRERHEEKDRDHRRRTRSRSASPDEKRRVRGRYDNESRSHSRSLSASPARRSPRSSSPQKTSPAREVSPDKRSNERSPSPRRSLSPRSPALQKASPSKDMSPERRSNERSPSPGSPAPLRKVDAASRSQSPYAAE

SEQ ID NO: 76205 - DNA, 2262 bp, Arabidopsis thaliana
  misc_feature (1)..(2262): Ceres Seq. ID no. 7107097
  misc_feature: MA Experiment ID: 20000180 Result: Up-regulated in Transcription
  misc_feature: MA Experiment 20000180 PARAMETER Experiment Name: At_Germinating_Seeds_P Parameter: Age (hr) Value: 24 vs. 0
  misc_feature: MA Experiment 20000180 PARAMETER Experiment Name: At_Germinating_Seeds_P Parameter: Tissue Value: Germinating Seeds
  misc_feature: MA Experiment ID: 20000184 Result: Up-regulated in Transcription
  misc_feature: MA Experiment 20000184 PARAMETER Experiment Name: At_Shoots__P Parameter: Age (day) Value: 7
  misc_feature: MA Experiment 20000184 PARAMETER Experiment Name: At_Shoots__P Parameter: Tissue Value: Shoots vs. Whole Plant
  misc_feature: MA Experiment ID: 20000213 Result: Up-regulated in Transcription
  misc_feature: MA Experiment 20000213 PARAMETER Experiment Name: At_4deg_Cold_P Parameter: Timepoint (hr) Value: 2
  misc_feature: MA Experiment ID: 20000227 Result: Down-regulated in Transcription
  misc_feature: MA Experiment 20000227 PARAMETER Experiment Name: At_Root-Tips-vs-Tops_P Parameter: Tissue Value: Root Tips vs. Root Tops
  misc_feature: MA Experiment ID: 20000264 Result: Up-regulated in Transcription
  misc_feature: MA Experiment 20000264 PARAMETER Experiment Name: At_Open_Flower_P Parameter: Age (day) Value: 21
  misc_feature: MA Experiment 20000264 PARAMETER Experiment Name: At_Open_Flower_P Parameter: Plant Line Value: WS
  misc_feature: MA Experiment 20000264 PARAMETER Experiment Name: At_Open_Flower_P Parameter: Tissue Value: Open Flower vs. Whole Plant
  misc_feature: MA Experiment ID: 20000265 Result: Up-regulated in Transcription
  misc_feature: MA Experiment 20000265 PARAMETER Experiment Name: At_Open_Flower_P Parameter: Age (day) Value: 21
  misc_feature: MA Experiment 20000265 PARAMETER Experiment Name: At_Open_Flower_P Parameter: Plant Line Value: WS
  misc_feature: MA Experiment 20000265 PARAMETER Experiment Name: At_Open_Flower_P Parameter: Tissue Value: Closed Flower vs. Whole Plant
  misc_feature: MA Experiment ID: 20000286 Result: Up-regulated in Transcription
  misc_feature: MA Experiment 20000286 PARAMETER Experiment Name: At_Open_Flower_P Parameter: Age (day) Value: 21
  misc_feature: MA Experiment 20000286 PARAMETER Experiment Name: At_Open_Flower_P Parameter: Plant Line Value: WS
  misc_feature: MA Experiment 20000286 PARAMETER Experiment Name: At_Open_Flower_P Parameter: Tissue Value: Half Open vs. Whole Plant
  misc_feature: MA Experiment ID: 20000438 Result: Up-regulated in Transcription
  misc_feature: MA Experiment 20000438 PARAMETER Experiment Name: At_Shoots__P Parameter: Age (day) Value: 14
  misc_feature: MA Experiment 20000438 PARAMETER Experiment Name: At_Shoots__P Parameter: Tissue Value: Shoots vs. Whole Plant
  misc_feature: MA Experiment ID: 20000495 Result: Down-regulated in Transcription
  misc_feature: MA Experiment 20000495 PARAMETER Experiment Name: At_Guard_Cells_P Parameter: Harvest Date Value: 8/2/2002
  misc_feature: MA Experiment 20000495 PARAMETER Experiment Name: At_Guard_Cells_P Parameter: Organism Value: A. thaliana
  misc_feature: MA Experiment 20000495 PARAMETER Experiment Name: At_Guard_Cells_P Parameter: Tissue Value: Guard Cells vs. Leaves
  misc_feature: MA Experiment ID: 20000794 Result: Up-regulated in Transcription
  misc_feature: MA Experiment 20000794 PARAMETER Experiment Name: At_Petals_P Parameter: Age (day) Value: 23-25 days
  misc_feature: MA Experiment 20000794 PARAMETER Experiment Name: At_Petals_P Parameter: Plant Line Value: WS
  misc_feature: MA Experiment 20000794 PARAMETER Experiment Name: At_Petals_P Parameter: Tissue Value: Petals vs. Whole plant
  misc_feature: MA Experiment ID: 20001247 Result: Up-regulated in Transcription
  misc_feature: MA Experiment 20001247 PARAMETER Experiment Name: At_Far-red-induction_P Parameter: Age (day) Value: 7
  misc_feature: MA Experiment 20001247 PARAMETER Experiment Name: At_Far-red-induction_P Parameter: Light Value: Far-red vs. White
  misc_feature: MA Experiment 20001247 PARAMETER Experiment Name: At_Far-red-induction_P Parameter: Organism Value: A. thaliana
  misc_feature: MA Experiment 20001247 PARAMETER Experiment Name: At_Far-red-induction_P Parameter: Plant Line Value: Columbia
  misc_feature: MA Experiment 20001247 PARAMETER Experiment Name: At_Far-red-induction_P Parameter: Timepoint (hr) Value: 1
  misc_feature: MA Experiment 20001247 PARAMETER Experiment Name: At_Far-red-induction_P Parameter: Tissue Value: Whole Plant
  misc_feature: MA Experiment ID: 20001248 Result: Down-regulated in Transcription
  misc_feature: MA Experiment 20001248 PARAMETER Experiment Name: At_Far-red-induction_P Parameter: Age (day) Value: 7
  misc_feature: MA Experiment 20001248 PARAMETER Experiment Name: At_Far-red-induction_P Parameter: Light Value: Far-red vs. White
  misc_feature: MA Experiment 20001248 PARAMETER Experiment Name: At_Far-red-induction_P Parameter: Organism Value: A. thaliana
  misc_feature: MA Experiment 20001248 PARAMETER Experiment Name: At_Far-red-induction_P Parameter: Plant Line Value: Columbia
  misc_feature: MA Experiment 20001248 PARAMETER Experiment Name: At_Far-red-induction_P Parameter: Timepoint (hr) Value: 4
  misc_feature: MA Experiment 20001248 PARAMETER Experiment Name: At_Far-red-induction_P Parameter: Tissue Value: Whole Plant
  misc_feature: MA Experiment ID: 20001557 Result: Down-regulated in Transcription
  misc_feature: MA Experiment 20001557 PARAMETER Experiment Name: At_Drought_Soil_Dry_P Parameter: Age (day) Value: 27
  misc_feature: MA Experiment 20001557 PARAMETER Experiment Name: At_Drought_Soil_Dry_P Parameter: Organism Value: A. thaliana
  misc_feature: MA Experiment 20001557 PARAMETER Experiment Name: At_Drought_Soil_Dry_P Parameter: Plant Line Value: WS
  misc_feature: MA Experiment 20001557 PARAMETER Experiment Name: At_Drought_Soil_Dry_P Parameter: Post Timepoint (hr) Value: 3
  misc_feature: MA Experiment 20001557 PARAMETER Experiment Name: At_Drought_Soil_Dry_P Parameter: Post-Treatment Value: Re-Water vs. No Drought
  misc_feature: MA Experiment 20001557 PARAMETER Experiment Name: At_Drought_Soil_Dry_P Parameter: Timepoint (day) Value: 13
  misc_feature: MA Experiment 20001557 PARAMETER Experiment Name: At_Drought_Soil_Dry_P Parameter: Treatment Value: Drought vs. No Drought
  misc_feature: MA Experiment ID: 20001558 Result: Down-regulated in Transcription
  misc_feature: MA Experiment 20001558 PARAMETER Experiment Name: At_Drought_Soil_Dry_P Parameter: Age (day) Value: 27
  misc_feature: MA Experiment 20001558 PARAMETER Experiment Name: At_Drought_Soil_Dry_P Parameter: Organism Value: A. thaliana
  misc_feature: MA Experiment 20001558 PARAMETER Experiment Name: At_Drought_Soil_Dry_P Parameter: Plant Line Value: WS
  misc_feature: MA Experiment 20001558 PARAMETER Experiment Name: At_Drought_Soil_Dry_P Parameter: Post Timepoint (hr) Value: 6
  misc_feature: MA Experiment 20001558 PARAMETER Experiment Name: At_Drought_Soil_Dry_P Parameter: Post-Treatment Value: Re-Water vs. No Drought
  misc_feature: MA Experiment 20001558 PARAMETER Experiment Name: At_Drought_Soil_Dry_P Parameter: Timepoint (day) Value: 13
  misc_feature: MA Experiment 20001558 PARAMETER Experiment Name: At_Drought_Soil_Dry_P Parameter: Treatment Value: Drought vs. No Drought
  misc_feature: MA Experiment ID: 20001560 Result: Down-regulated in Transcription
  misc_feature: MA Experiment 20001560 PARAMETER Experiment Name: At_Drought_Soil_Dry_P Parameter: Age (day) Value: 28
  misc_feature: MA Experiment 20001560 PARAMETER Experiment Name: At_Drought_Soil_Dry_P Parameter: Organism Value: A. thaliana
  misc_feature: MA Experiment 20001560 PARAMETER Experiment Name: At_Drought_Soil_Dry_P Parameter: Plant Line Value: WS
  misc_feature: MA Experiment 20001560 PARAMETER Experiment Name: At_Drought_Soil_Dry_P Parameter: Post Timepoint (hr) Value: None
  misc_feature: MA Experiment 20001560 PARAMETER Experiment Name: At_Drought_Soil_Dry_P Parameter: Post-Treatment Value: None
  misc_feature: MA Experiment 20001560 PARAMETER Experiment Name: At_Drought_Soil_Dry_P Parameter: Timepoint (day) Value: 14
  misc_feature: MA Experiment 20001560 PARAMETER Experiment Name: At_Drought_Soil_Dry_P Parameter: Treatment Value: Drought vs. No Drought
ggcatatcaacagataaagtcttgaactttgatcaagaattttaaacggagttcttactcttctcgtcggtgaaagaaaaatcgagatgggttcaactccgttttgctattcgatcaatccatctccatcaaagcttgatttcacaaggacccatgtgtttagtcccgttgctaaacagttttacttagatttatcatcgttttccggaagatccggaggaggattatccgtgtttaggagccggaaaactttgctcggagtaaaggcggcgacggcgttagttgagaaggaggagaagagagaggcggtgacggagaagaagaaatcgagggttttagttgccggaggtggaatcggaggattggtgtttgctttagcggctaagaagaaaggattcgatgtgttagtgtttgagaaagatttgagtgctataagaggagaaggaaaatacagaggcccgattcaaatacagagcaacgctttagctgctttggaagctattgatattgaagttgctgaacaagttatggaagctgggtgtatcactggtgatcggattaacggtctcgttgatggtatctctggtacttggtatgtaaagtttgatactttcactcctgcggcgtcacggggacttcctgtgactagagtaattagtagaatgactctgcagcagattctagcacgtgcggttggagaagatgtgattagaaacgagagtaatgttgttgattttgaagattctggagataaggttactgtggtactcgagaatggtcaacgctatgaaggtgatctgcttgtgggtgcagatggcatttggtctaaggtgagaaataatttgtttggccgtagtgaagctacttattcaggctacacttgttacacggggattgcagattttataccagcggatatcgagtctgttggctaccgggttttcttgggacacaaacagtactttgtttcttcggatgttggtggtggaaaaatgcaatggtatgcatttcacgaggaaccagctggtggggctgatgctccaaatggtatgaagaaaaggttgtttgaaatatttgacggttggtgcgacaatgtactcgacttgttgcatgcgactgaggaggaagccattctgagaagagatatttatgatagaagtcctggttttacttggggtaaagggcgtgttacgctgctcggggattctatccatgcgatgcagccaaatatgggtcaaggtggatgcatggccattgaggatagttttcaactagcattggagcttgatgaagcatggaaacagagtgttgaaacgactacacctgttgatgttgtttcctctttgaaaagatatgaggaatctagaagactgagagtcgctattatccatgcaatggcgaggatggctgcaattatggcttccacttacaaagcatacttaggtgttgggcttggtcctctgtctttcttgacaaagtttagagtaccacatccaggaagagttggtggtagattcttcgttgacattgctatgccatcgatgcttgactgggtccttggaggtaacagtgaaaaactccaaggaaggccacctagttgcagactcactgacaaagccgatgaccggcttcgagagtggtttgaagatgacgatgctcttgaacgtactataaagggagaatggtatctaattccacacggcgacgattgttgcgtttcggaaacattatgtctaaccaaagatgaagatcaaccttgcatcgtcggaagcgaaccagatcaagattttcctggaatgcgcattgtgatcccttcgtctcaggtttcgaagatgcatgctcgtgtgatttacaaagacggagctttcttcttgatggatcttcgaagcgaacacggaacctatgtgaccgataacgaaggaagaagatatagagcaacaccgaattttcccgcgcggtttagatcgtccgacatcatcgagtttggttcagataagaaggcggcgtttagggtaaaagtaatcaggaaaactccgaaatcgacgaggaagaatgagagtaacaacgataaattacttcagacagcttgaaataagtaaaccgatggtgaaattaagtaattttaatcggtttggcagataatttgagtagtaattttctcaaaagaaaaaaaatctgctttcagctattccttgcatgacaatgtatatataggtctgaaacaaaatataaattatacaagacattaatcttcatttcttc

SEQ ID NO: 76206 - protein, 667 aa, Arabidopsis thaliana
  peptide (1)..(667): Ceres Seq. ID no. 7107098
  misc_feature (235)..(439): Pfam Name: Monooxygenase Pfam Description: Monooxygenase
  misc_feature (1)..(494): Homolog of NCBI NO: 19698915 NR Description: zeaxanthin epoxidase precursor [Arabidopsis >gi|27311909|gb|AAO00920.1| zeaxanthin epoxidase precursor
  misc_feature (1)..(655): Homolog of NCBI NO: 5902708 NR Description: Zeaxanthin epoxidase, chloroplast precursor >gi|3264757|gb|AAC24582.1| zeaxanthin epoxidase [Prunus >gi|5360186|gb|AAD42899.1|AF159948_1 zeaxanthin epoxidase [Prunus
  misc_feature (1)..(665): Homolog of NCBI NO: 17402597 NR Description: zeaxanthin epoxidase [Citrus unshiu]
  misc_feature (1)..(657): Homolog of NCBI NO: 5902707 NR Description: Zeaxanthin epoxidase, chloroplast precursor
  misc_feature (59)..(657): Homolog of NCBI NO: 9857294 NR Description: CpABA1 [Vigna unguiculata]
  misc_feature (1)..(657): Homolog of NCBI NO: 5902706 NR Description: Zeaxanthin epoxidase, chloroplast precursor
  misc_feature (41)..(536): Homolog of NCBI NO: 28883203 NR Description: zeaxanthin epoxidase precursor [Chlamydomonas sp.
  misc_feature (79)..(540): Homolog of NCBI NO: 28629442 NR Description: zeaxanthin epoxidase precursor [Chlamydomonas >gi|28883201|gb|AAO48940.1| zeaxanthin epoxidase precursor
  misc_feature (274)..(373): Homolog of NCBI NO: 30523256 NR Description: zeoxanthin epoxidase [Poncirus trifoliata]
  misc_feature (78)..(397): Homolog of NCBI NO: 21219844 NR Description: putative monooxygenase (putative secreted [Streptomyces coelicolor A3(2)] >gi|8977928|emb|CAB95795.1| monooxygenase (putative secreted protein) [Streptomyces
MGSTPFCYSINPSPSKLDFTRTHVFSPVAKQFYLDLSSFSGRSGGGLSVFRSRKTLLGVKAATALVEKEEKREAVTEKKKSRVLVAGGGIGGLVFALAAKKKGFDVLVFEKDLSAIRGEGKYRGPIQIQSNALAALEAIDIEVAEQVMEAGCITGDRINGLVDGISGTWYVKFDTFTPAASRGLPVTRVISRMTLQQILARAVGEDVIRNESNVVDFEDSGDKVTVVLENGQRYEGDLLVGADGIWSKVRNNLFGRSEATYSGYTCYTGIADFIPADIESVGYRVFLGHKQYFVSSDVGGGKMQWYAFHEEPAGGADAPNGMKKRLFEIFDGWCDNVLDLLHATEEEAILRRDIYDRSPGFTWGKGRVTLLGDSIHAMQPNMGQGGCMAIEDSFQLALELDEAWKQSVETTTPVDVVSSLKRYEESRRLRVAIIHAMARMAAIMASTYKAYLGVGLGPLSFLTKFRVPHPGRVGGRFFVDIAMPSMLDWVLGGNSEKLQGRPPSCRLTDKADDRLREWFEDDDALERTIKGEWYLIPHGDDCCVSETLCLTKDEDQPCIVGSEPDQDFPGMRIVIPSSQVSKMHARVIYKDGAFFLMDLRSEHGTYVTDNEGRRYRATPNFPARFRSSDIIEFGSDKKAAFRVKVIRKTPKSTRKNESNNDKLLQTA

SEQ ID NO: 76207 - protein, 520 aa, Arabidopsis thaliana; identical to SEQ ID NO: 49000
  peptide (1)..(520): Ceres Seq. ID no. 7107099
  misc_feature (88)..(292): Pfam Name: Monooxygenase Pfam Description: Monooxygenase
  misc_feature (1)..(347): Homolog of NCBI NO: 19698915 NR Description: zeaxanthin epoxidase precursor [Arabidopsis >gi|27311909|gb|AAO00920.1| zeaxanthin epoxidase precursor
  misc_feature (1)..(508): Homolog of NCBI NO: 5902708 NR Description: Zeaxanthin epoxidase, chloroplast precursor >gi|3264757|gb|AAC24582.1| zeaxanthin epoxidase [Prunus >gi|5360186|gb|AAD42899.1|AF159948_1 zeaxanthin epoxidase [Prunus
  misc_feature (1)..(518): Homolog of NCBI NO: 17402597 NR Description: zeaxanthin epoxidase [Citrus unshiu]
  misc_feature (1)..(510): Homolog of NCBI NO: 5902707 NR Description: Zeaxanthin epoxidase, chloroplast precursor
  misc_feature (1)..(510): Homolog of NCBI NO: 9857294 NR Description: CpABA1 [Vigna unguiculata]
  misc_feature (1)..(510): Homolog of NCBI NO: 5902706 NR Description: Zeaxanthin epoxidase, chloroplast precursor
  misc_feature (1)..(389): Homolog of NCBI NO: 28883203 NR Description: zeaxanthin epoxidase precursor [Chlamydomonas sp.
  misc_feature (1)..(393): Homolog of NCBI NO: 28629442 NR Description: zeaxanthin epoxidase precursor [Chlamydomonas >gi|28883201|gb|AAO48940.1| zeaxanthin epoxidase precursor
  misc_feature (127)..(226): Homolog of NCBI NO: 30523256 NR Description: zeoxanthin epoxidase [Poncirus trifoliata]
  misc_feature (1)..(250): Homolog of NCBI NO: 21219844 NR Description: putative monooxygenase (putative secreted [Streptomyces coelicolor A3(2)] >gi|8977928|emb|CAB95795.1| monooxygenase (putative secreted protein) [Streptomyces

SEQ ID NO: 76208 - protein, 475 aa, Arabidopsis thaliana; identical to SEQ ID NO: 49001
  peptide (1)..(475): Ceres Seq. ID no. 7107100
  misc_feature (43)..(247): Pfam Name: Monooxygenase Pfam Description: Monooxygenase
  misc_feature (1)..(302): Homolog of NCBI NO: 19698915 NR Description: zeaxanthin epoxidase precursor [Arabidopsis >gi|27311909|gb|AAO00920.1| zeaxanthin epoxidase precursor
  misc_feature (1)..(463): Homolog of NCBI NO: 5902708 NR Description: Zeaxanthin epoxidase, chloroplast precursor >gi|3264757|gb|AAC24582.1| zeaxanthin epoxidase [Prunus >gi|5360186|gb|AAD42899.1|AF159948_1 zeaxanthin epoxidase [Prunus
  misc_feature (1)..(473): Homolog of NCBI NO: 17402597 NR Description: zeaxanthin epoxidase [Citrus unshiu]
  misc_feature (1)..(465): Homolog of NCBI NO: 5902707 NR Description: Zeaxanthin epoxidase, chloroplast precursor
  misc_feature (1)..(465): Homolog of NCBI NO: 9857294 NR Description: CpABA1 [Vigna unguiculata]
  misc_feature (1)..(465): Homolog of NCBI NO: 5902706 NR Description: Zeaxanthin epoxidase, chloroplast precursor
  misc_feature (1)..(344): Homolog of NCBI NO: 28883203 NR Description: zeaxanthin epoxidase precursor [Chlamydomonas sp.
  misc_feature (1)..(348): Homolog of NCBI NO: 28629442 NR Description: zeaxanthin epoxidase precursor [Chlamydomonas >gi|28883201|gb|AAO48940.1| zeaxanthin epoxidase precursor
  misc_feature (82)..(181): Homolog of NCBI NO: 30523256 NR Description: zeoxanthin epoxidase [Poncirus trifoliata]
  misc_feature (1)..(205): Homolog of NCBI NO: 21219844 NR Description: putative monooxygenase (putative secreted [Streptomyces coelicolor A3(2)] >gi|8977928|emb|CAB95795.1| monooxygenase (putative secreted protein) [Streptomyces

SEQ ID NO: 76209 - DNA, 1926 bp, Arabidopsis thaliana
  misc_feature (1)..(1926): Ceres Seq. ID no. 7107101
  misc_feature: MA Experiment ID: 108434 Result: Down-regulated in Transcription
  misc_feature: MA Experiment 108434 PARAMETER Experiment Name: At_Root_Tips_cDNA_P Parameter: Tissue Value: Root Tips
  misc_feature: MA Experiment ID: 108435 Result: Down-regulated in Transcription
  misc_feature: MA Experiment 108435 PARAMETER Experiment Name: At_stm_Mutants_cDNA_P Parameter: Plant Line Value: wt Landsburg vs stm
  misc_feature: MA Experiment 108435 PARAMETER Experiment Name: At_stm_Mutants_cDNA_P Parameter: Tissue Value: Shoot Apical Meristem Region
  misc_feature: MA Experiment ID: 108462 Result: Up-regulated in Transcription
  misc_feature: MA Experiment 108462 PARAMETER Experiment Name: At_Germinating_Seeds_cDNA_P Parameter: Age (day) Value: 2 vs. 0
  misc_feature: MA Experiment 108462 PARAMETER Experiment Name: At_Germinating_Seeds_cDNA_P Parameter: Tissue Value: Germinating Seeds
  misc_feature: MA Experiment ID: 108463 Result: Up-regulated in Transcription
  misc_feature: MA Experiment 108463 PARAMETER Experiment Name: At_Germinating_Seeds_cDNA_P Parameter: Age (day) Value: 3 vs. 0
  misc_feature: MA Experiment 108463 PARAMETER Experiment Name: At_Germinating_Seeds_cDNA_P Parameter: Tissue Value: Germinating Seeds
  misc_feature: MA Experiment ID: 108464 Result: Up-regulated in Transcription
  misc_feature: MA Experiment 108464 PARAMETER Experiment Name: At_Germinating_Seeds_cDNA_P Parameter: Age (day) Value: 4 vs. 0
  misc_feature: MA Experiment 108464 PARAMETER Experiment Name: At_Germinating_Seeds_cDNA_P Parameter: Tissue Value: Germinating Seeds
  misc_feature: MA Experiment ID: 108489 Result: Down-regulated in Transcription
  misc_feature: MA Experiment ID: 108569 Result: Down-regulated in Transcription
  misc_feature: MA Experiment 108569 PARAMETER Experiment Name: At_0.001%_MeJA__cDNA_P Parameter: Timepoint (hr) Value: 6
  misc_feature: MA Experiment 108569 PARAMETER Experiment Name: At_0.001%_MeJA__cDNA_P Parameter: Tissue Value: Aerial
  misc_feature: MA Experiment 108569 PARAMETER Experiment Name: At_0.001%_MeJA__cDNA_P Parameter: Treatment Value: 0.001% MeJA vs. No Treatment
  misc_feature: MA Experiment ID: 108572 Result: Down-regulated in Transcription
  misc_feature: MA Experiment 108572 PARAMETER Experiment Name: At_Drought_cDNA_P Parameter: Timepoint (hr) Value: 1
  misc_feature: MA Experiment 108572 PARAMETER Experiment Name: At_Drought_cDNA_P Parameter: Tissue Value: Aerial
  misc_feature: MA Experiment 108572 PARAMETER Experiment Name: At_Drought_cDNA_P Parameter: Treatment Value: Drought vs. No Drought
  misc_feature: MA Experiment ID: 108573 Result: Down-regulated in Transcription
  misc_feature: MA Experiment 108573 PARAMETER Experiment Name: At_Drought_cDNA_P Parameter: Timepoint (hr) Value: 6
  misc_feature: MA Experiment 108573 PARAMETER Experiment Name: At_Drought_cDNA_P Parameter: Tissue Value: Aerial
  misc_feature: MA Experiment 108573 PARAMETER Experiment Name: At_Drought_cDNA_P Parameter: Treatment Value: Drought vs. No Drought
  misc_feature: MA Experiment ID: 108574 Result: Up-regulated in Transcription
  misc_feature: MA Experiment 108574 PARAMETER Experiment Name: At_Wounding__cDNA_P Parameter: Timepoint (hr) Value: 1
  misc_feature: MA Experiment 108574 PARAMETER Experiment Name: At_Wounding__cDNA_P Parameter: Tissue Value: Aerial
  misc_feature: MA Experiment 108574 PARAMETER Experiment Name: At_Wounding__cDNA_P Parameter: Treatment Value: Wounding vs. No Wounding
  misc_feature: MA Experiment ID: 108579 Result: Up-regulated in Transcription
  misc_feature: MA Experiment 108579 PARAMETER Experiment Name: At_4deg_Cold_cDNA_P Parameter: Temperature (deg C) Value: 4 vs. 22
  misc_feature: MA Experiment 108579 PARAMETER Experiment Name: At_4deg_Cold_cDNA_P Parameter: Timepoint (hr) Value: 6
  misc_feature: MA Experiment 108579 PARAMETER Experiment Name: At_4deg_Cold_cDNA_P Parameter: Tissue Value: Aerial
  misc_feature: MA Experiment ID: 108585 Result: Down-regulated in Transcription
  misc_feature: MA Experiment 108585 PARAMETER Experiment Name: At_5mM_NaNP_cDNA_P Parameter: Timepoint (hr) Value: 6
  misc_feature: MA Experiment 108585 PARAMETER Experiment Name: At_5mM_NaNP_cDNA_P Parameter: Tissue Value: Aerial
  misc_feature: MA Experiment 108585 PARAMETER Experiment Name: At_5mM_NaNP_cDNA_P Parameter: Treatment Value: null
  misc_feature: MA Experiment ID: 108605 Result: Down-regulated in Transcription
  misc_feature: MA Experiment 108605 PARAMETER Experiment Name: At_100uM_ABA_cDNA_P Parameter: Timepoint (hr) Value: 6
  misc_feature: MA Experiment 108605 PARAMETER Experiment Name: At_100uM_ABA_cDNA_P Parameter: Tissue Value: Aerial
  misc_feature: MA Experiment 108605 PARAMETER Experiment Name: At_100uM_ABA_cDNA_P Parameter: Treatment Value: 100uM ABA vs. No Treatment
  misc_feature: MA Experiment ID: 108607 Result: Down-regulated in Transcription
  misc_feature: MA Experiment 108607 PARAMETER Experiment Name: At_100uM_ABA_cDNA_P Parameter: Timepoint (hr) Value: 4
  misc_feature: MA Experiment 108607 PARAMETER Experiment Name: At_100uM_ABA_cDNA_P Parameter: Tissue Value: Aerial
  misc_feature: MA Experiment 108607 PARAMETER Experiment Name: At_100uM_ABA_cDNA_P Parameter: Treatment Value: 100uM ABA vs. No Treatment
  misc_feature: MA Experiment ID: 108668 Result: Down-regulated in Transcription
  misc_feature: MA Experiment 108668 PARAMETER Experiment Name: At_2mM_SA_cDNA_P Parameter: Plant Line Value: WS
  misc_feature: MA Experiment 108668 PARAMETER Experiment Name: At_2mM_SA_cDNA_P Parameter: Timepoint (hr) Value: 6
  misc_feature: MA Experiment 108668 PARAMETER Experiment Name: At_2mM_SA_cDNA_P Parameter: Treatment Value: 2mM SA vs. No Treatment
  misc_feature: MA Experiment ID: 20000087 Result: Down-regulated in Transcription
  misc_feature: MA Experiment 20000087 PARAMETER Experiment Name: At_100uM_ABA_Mutants_cDNA_P Parameter: Plant Line Value: WS
  misc_feature: MA Experiment 20000087 PARAMETER Experiment Name: At_100uM_ABA_Mutants_cDNA_P Parameter: Timepoint (hr) Value: 6
  misc_feature: MA Experiment 20000087 PARAMETER Experiment Name: At_100uM_ABA_Mutants_cDNA_P Parameter: Tissue Value: Aerial
  misc_feature: MA Experiment 20000087 PARAMETER Experiment Name: At_100uM_ABA_Mutants_cDNA_P Parameter: Treatment Value: 100uM ABA vs. No Treatment
  misc_feature: MA Experiment ID: 20000113 Result: Down-regulated in Transcription
  misc_feature: MA Experiment 20000113 PARAMETER Experiment Name: At_42deg_Heat_cDNA_P Parameter: Temperature (deg C) Value: 42 vs. 22
  misc_feature: MA Experiment 20000113 PARAMETER Experiment Name: At_42deg_Heat_cDNA_P Parameter: Timepoint (hr) Value: 8
  misc_feature: MA Experiment 20000113 PARAMETER Experiment Name: At_42deg_Heat_cDNA_P Parameter: Tissue Value: Aerial
  misc_feature: MA Experiment ID: 20000169 Result: Down-regulated in Transcription
  misc_feature: MA Experiment 20000169 PARAMETER Experiment Name: At_100uM_ABA_P Parameter: Age (day) Value: 14
  misc_feature: MA Experiment 20000169 PARAMETER Experiment Name: At_100uM_ABA_P Parameter: Organism Value: A. thaliana
  misc_feature: MA Experiment 20000169 PARAMETER Experiment Name: At_100uM_ABA_P Parameter: Plant Line Value: WS
  misc_feature: MA Experiment 20000169 PARAMETER Experiment Name: At_100uM_ABA_P Parameter: Timepoint (hr) Value: 6
  misc_feature: MA Experiment 20000169 PARAMETER Experiment Name: At_100uM_ABA_P Parameter: Tissue Value: Aerial
  misc_feature: MA Experiment 20000169 PARAMETER Experiment Name: At_100uM_ABA_P Parameter: Treatment Value: 100uM ABA vs. No Treatment
  misc_feature: MA Experiment ID: 20000184 Result: Down-regulated in Transcription
  misc_feature: MA Experiment 20000184 PARAMETER Experiment Name: At_Shoots__P Parameter: Age (day) Value: 7
  misc_feature: MA Experiment 20000184 PARAMETER Experiment Name: At_Shoots__P Parameter: Tissue Value: Shoots vs. Whole Plant
  misc_feature: MA Experiment ID: 20000185 Result: Down-regulated in Transcription
  misc_feature: MA Experiment 20000185 PARAMETER Experiment Name: At_Roots__P Parameter: Age (day) Value: 7 vs. 21
  misc_feature: MA Experiment 20000185 PARAMETER Experiment Name: At_Roots__P Parameter: Organism Value: A. thaliana
  misc_feature: MA Experiment 20000185 PARAMETER Experiment Name: At_Roots__P Parameter: Tissue Value: Roots vs. Whole Plant
  misc_feature: MA Experiment ID: 20000213 Result: Up-regulated in Transcription
  misc_feature: MA Experiment 20000213 PARAMETER Experiment Name: At_4deg_Cold_P Parameter: Timepoint (hr) Value: 2
  misc_feature: MA Experiment ID: 20000214 Result: Up-regulated in Transcription
  misc_feature: MA Experiment 20000214 PARAMETER Experiment Name: At_4deg_Cold_P Parameter: Timepoint (hr) Value: 6
  misc_feature: MA Experiment ID: 20000224 Result: Up-regulated in Transcription
  misc_feature: MA Experiment ID: 20000264 Result: Down-regulated in Transcription
  misc_feature: MA Experiment 20000264 PARAMETER Experiment Name: At_Open_Flower_P Parameter: Age (day) Value: 21
  misc_feature: MA Experiment 20000264 PARAMETER Experiment Name: At_Open_Flower_P Parameter: Plant Line Value: WS
  misc_feature: MA Experiment 20000264 PARAMETER Experiment Name: At_Open_Flower_P Parameter: Tissue Value: Open Flower vs. Whole Plant
  misc_feature: MA Experiment ID: 20000436 Result: Down-regulated in Transcription
  misc_feature: MA Experiment 20000436 PARAMETER Experiment Name: At_Drought_P Parameter: Age (day) Value: 7
  misc_feature: MA Experiment 20000436 PARAMETER Experiment Name: At_Drought_P Parameter: Organism Value: A. thaliana
  misc_feature: MA Experiment 20000436 PARAMETER Experiment Name: At_Drought_P Parameter: Plant Line Value: WS
  misc_feature: MA Experiment 20000436 PARAMETER Experiment Name: At_Drought_P Parameter: Timepoint (hr) Value: 12
  misc_feature: MA Experiment 20000436 PARAMETER Experiment Name: At_Drought_P Parameter: Tissue Value: Whole Plant
  misc_feature: MA Experiment 20000436 PARAMETER Experiment Name: At_Drought_P Parameter: Treatment Value: Drought vs. No Drought
  misc_feature: MA Experiment ID: 20000437 Result: Down-regulated in Transcription
  misc_feature: MA Experiment 20000437 PARAMETER Experiment Name: At_Drought_P Parameter: Age (day) Value: 8
  misc_feature: MA Experiment 20000437 PARAMETER Experiment Name: At_Drought_P Parameter: Organism Value: A. thaliana
  misc_feature: MA Experiment 20000437 PARAMETER Experiment Name: At_Drought_P Parameter: Plant Line Value: WS
  misc_feature: MA Experiment 20000437 PARAMETER Experiment Name: At_Drought_P Parameter: Timepoint (hr) Value: 24
  misc_feature: MA Experiment 20000437 PARAMETER Experiment Name: At_Drought_P Parameter: Tissue Value: Whole Plant
  misc_feature: MA Experiment 20000437 PARAMETER Experiment Name: At_Drought_P Parameter: Treatment Value: Drought vs. No Drought
  misc_feature: MA Experiment ID: 20000439 Result: Down-regulated in Transcription
  misc_feature: MA Experiment 20000439 PARAMETER Experiment Name: At_Roots__P Parameter: Age (day) Value: 14 vs. 21
  misc_feature: MA Experiment 20000439 PARAMETER Experiment Name: At_Roots__P Parameter: Organism Value: A. thaliana
  misc_feature: MA Experiment 20000439 PARAMETER Experiment Name: At_Roots__P Parameter: Tissue Value: Roots vs. Whole Plant
  misc_feature: MA Experiment ID: 20000452 Result: Up-regulated in Transcription
  misc_feature: MA Experiment 20000452 PARAMETER Experiment Name: At_CS6879_Shoots-Roots_P Parameter: Age (day) Value: 14
  misc_feature: MA Experiment 20000452 PARAMETER Experiment Name: At_CS6879_Shoots-Roots_P Parameter: Organism Value: A. thaliana
  misc_feature: MA Experiment 20000452 PARAMETER Experiment Name: At_CS6879_Shoots-Roots_P Parameter: Plant Line Value: CS6879 vs. WS
  misc_feature: MA Experiment 20000452 PARAMETER Experiment Name: At_CS6879_Shoots-Roots_P Parameter: Tissue Value: Shoots
  misc_feature: MA Experiment ID: 20000495 Result: Down-regulated in Transcription
  misc_feature: MA Experiment 20000495 PARAMETER Experiment Name: At_Guard_Cells_P Parameter: Harvest Date Value: 8/2/2002
  misc_feature: MA Experiment 20000495 PARAMETER Experiment Name: At_Guard_Cells_P Parameter: Organism Value: A. thaliana
  misc_feature: MA Experiment 20000495 PARAMETER Experiment Name: At_Guard_Cells_P Parameter: Tissue Value: Guard Cells vs. Leaves
  misc_feature: MA Experiment ID: 20000573 Result: Down-regulated in Transcription
  misc_feature: MA Experiment 20000573 PARAMETER Experiment Name: At_100uM_ABA_Mutants__P Parameter: Organism Value: A. thaliana
  misc_feature: MA Experiment 20000573 PARAMETER Experiment Name: At_100uM_ABA_Mutants__P Parameter: Plant Line Value: CS22 vs. Ler wt
  misc_feature: MA Experiment 20000573 PARAMETER Experiment Name: At_100uM_ABA_Mutants__P Parameter: Timepoint (hr) Value: N/A
  misc_feature: MA Experiment 20000573 PARAMETER Experiment Name: At_100uM_ABA_Mutants__P Parameter: Tissue Value: Whole Plant
  misc_feature: MA Experiment 20000573 PARAMETER Experiment Name: At_100uM_ABA_Mutants__P Parameter: Treatment Value: None
  misc_feature: MA Experiment ID: 20001450 Result: Down-regulated in Transcription
  misc_feature: MA Experiment 20001450 PARAMETER Experiment Name: At_Far-red-induction_P Parameter: Age (day) Value: 7
  misc_feature: MA Experiment 20001450 PARAMETER Experiment Name: At_Far-red-induction_P Parameter: Light Value: Far-red vs. White
  misc_feature: MA Experiment 20001450 PARAMETER Experiment Name: At_Far-red-induction_P Parameter: Organism Value: A. thaliana
  misc_feature: MA Experiment 20001450 PARAMETER Experiment Name: At_Far-red-induction_P Parameter: Plant Line Value: Columbia
  misc_feature: MA Experiment 20001450 PARAMETER Experiment Name: At_Far-red-induction_P Parameter: Timepoint (hr) Value: 8
  misc_feature: MA Experiment 20001450 PARAMETER Experiment Name: At_Far-red-induction_P Parameter: Tissue Value: Whole Plant
  misc_feature: MA Experiment ID: 20001555 Result: Down-regulated in Transcription
  misc_feature: MA Experiment 20001555 PARAMETER Experiment Name: At_Drought_Soil_Dry_P Parameter: Age (day) Value: 24
  misc_feature: MA Experiment 20001555 PARAMETER Experiment Name: At_Drought_Soil_Dry_P Parameter: Organism Value: A. thaliana
  misc_feature: MA Experiment 20001555 PARAMETER Experiment Name: At_Drought_Soil_Dry_P Parameter: Plant Line Value: WS
  misc_feature: MA Experiment 20001555 PARAMETER Experiment Name: At_Drought_Soil_Dry_P Parameter: Post Timepoint (hr) Value: None
  misc_feature: MA Experiment 20001555 PARAMETER Experiment Name: At_Drought_Soil_Dry_P Parameter: Post-Treatment Value: None
  misc_feature: MA Experiment 20001555 PARAMETER Experiment Name: At_Drought_Soil_Dry_P Parameter: Timepoint (day) Value: 10
  misc_feature: MA Experiment 20001555 PARAMETER Experiment Name: At_Drought_Soil_Dry_P Parameter: Treatment Value: Drought vs. No Drought
  misc_feature: MA Experiment ID: 20001560 Result: Down-regulated in Transcription
  misc_feature: MA Experiment 20001560 PARAMETER Experiment Name: At_Drought_Soil_Dry_P Parameter: Age (day) Value: 28
  misc_feature: MA Experiment 20001560 PARAMETER Experiment Name: At_Drought_Soil_Dry_P Parameter: Organism Value: A. thaliana
  misc_feature: MA Experiment 20001560 PARAMETER Experiment Name: At_Drought_Soil_Dry_P Parameter: Plant Line Value: WS
  misc_feature: MA Experiment 20001560 PARAMETER Experiment Name: At_Drought_Soil_Dry_P Parameter: Post Timepoint (hr) Value: None
  misc_feature: MA Experiment 20001560 PARAMETER Experiment Name: At_Drought_Soil_Dry_P Parameter: Post-Treatment Value: None
  misc_feature: MA Experiment 20001560 PARAMETER Experiment Name: At_Drought_Soil_Dry_P Parameter: Timepoint (day) Value: 14
  misc_feature: MA Experiment 20001560 PARAMETER Experiment Name: At_Drought_Soil_Dry_P Parameter: Treatment Value: Drought vs. No Drought
  misc_feature: MA Experiment ID: 20001761 Result: Down-regulated in Transcription
  misc_feature: MA Experiment 20001761 PARAMETER Experiment Name: At_50mM_NH4NO3_L-to-H_P Parameter: Timepoint (hr) Value: 4
  misc_feature: MA Experiment 20001761 PARAMETER Experiment Name: At_50mM_NH4NO3_L-to-H_P Parameter: Tissue Value: Siliques
  misc_feature: MA Experiment 20001761 PARAMETER Experiment Name: At_50mM_NH4NO3_L-to-H_P Parameter: Treatment Value: 50mM NH4NO3 vs 100mM Mannitol
  misc_feature: MA Experiment ID: 20001904 Result: Down-regulated in Transcription
  misc_feature: MA Experiment 20001904 PARAMETER Experiment Name: At_Drought_Reproduction_P Parameter: Age (day) Value: 37
  misc_feature: MA Experiment 20001904 PARAMETER Experiment Name: At_Drought_Reproduction_P Parameter: Organism Value: A. thaliana
  misc_feature: MA Experiment 20001904 PARAMETER Experiment Name: At_Drought_Reproduction_P Parameter: Plant Line Value: WS
  misc_feature: MA Experiment 20001904 PARAMETER Experiment Name: At_Drought_Reproduction_P Parameter: Timepoint (day) Value: 7
  misc_feature: MA Experiment 20001904 PARAMETER Experiment Name: At_Drought_Reproduction_P Parameter: Tissue Value: Rosettes
  misc_feature: MA Experiment 20001904 PARAMETER Experiment Name: At_Drought_Reproduction_P Parameter: Treatment Value: Drought vs. No Drought
  misc_feature: MA Experiment ID: 20001905 Result: Down-regulated in Transcription
  misc_feature: MA Experiment 20001905 PARAMETER Experiment Name: At_Drought_Reproduction_P Parameter: Age (day) Value: 40
  misc_feature: MA Experiment 20001905 PARAMETER Experiment Name: At_Drought_Reproduction_P Parameter: Organism Value: A. thaliana
  misc_feature: MA Experiment 20001905 PARAMETER Experiment Name: At_Drought_Reproduction_P Parameter: Plant Line Value: WS
  misc_feature: MA Experiment 20001905 PARAMETER Experiment Name: At_Drought_Reproduction_P Parameter: Timepoint (day) Value: 10
  misc_feature: MA Experiment 20001905 PARAMETER Experiment Name: At_Drought_Reproduction_P Parameter: Tissue Value: Rosettes
  misc_feature: MA Experiment 20001905 PARAMETER Experiment Name: At_Drought_Reproduction_P Parameter: Treatment Value: Drought vs. No Drought
ccacgcgtccgtcatttctcatcataacaaagagagagaaaaaaactatggaattgacactgaattcctcgagttctcttatcaaacgtaaagatgccaagagttctagaaaccaagaaagttcctccaacaacatgacctttgcgaagatgaagccgccaacatatcagttccaagcaaagaactcggttaaggaaatgaagttcactcacgagaagaccttcacgccagaaggtgaaacccttgagaaatgggagaagctccacgttctctcatacccacactccaagaacgacgctagcgttccggtgttcgtcatgttaccgctcgacacagtaacaatgtcagggcatttgaacaaaccacgagccatgaacgctagtttgatggctctgaaaggagctggtgtggaaggtgtgatggtggatgcttggtggggattggtggagaaagatggacctatgaattataactgggaaggctatgccgagcttatacagatggttcaaaagcacggtctcaaactccaggtcgttatgtcattccatcaatgtggaggaaacgtaggagactcttgcagtatccccttgcctccatgggtgcttgaagagatcagcaagaaccctgatcttgtctacacagacaaatctgggagaaggaaccctgaatatatctccttgggatgtgattctgtgcctgtcctaagaggaagaacacctatccaggtctactcagatttcatgaggagcttccgtgaacgatttgaaggctacataggaggagttattgcggaaattcaagtaggaatgggaccttgtggagaattgagatacccatcataccctgaaagcaacgggacctggagattccccggaattggagagttccagtgctacgacaagtatatgaaatcgtcacttcaggcatatgctgaatcaattgggaaaactaactggggaacaagcggacctcatgatgccggcgagtacaagaacctcccagaagatactgaatttttcaggagagacggaacatggaatagcgagtatggaaagtttttcatggaatggtactccgggaagctgctagaacatggagaccaactcctatcttcagcgaaaggtatctttcaaggaagcggagcaaagctatcaggaaaggtagctggaattcactggcactacaacaccaggtcacacgcagctgagctaaccgctggatattacaacacaagaaaccatgacgggtatctgccaatagctaagatgttcaacaaacatggagttgtgctcaacttcacctgcatggagatgaaagacggggagcaacctgagcacgcgaattgctcaccagaaggtctggtcaagcaagtacagaacgcgacaaggcaggccggaaccgaactagcaggggagaacgcgctagaacgatatgactcgagcgcattcggacaagtggtagcaacaaataggtcagattctggaaatgggttaaccgcatttacttacctaagaatgaacaagcggttatttgagggtcaaaattggcagcagttagtggagtttgttaagaacatgaaggaaggtggtcatgggaggagactctcaaaagaagacacaactggaagtgacctttatgttggatttgtcaaaggcaagatcgctgagaatgtggaggaggctgctttagtgtaatttcccacataggtacatacatatagtgtggtgtttattgtattcctgtctgataaataactagagagatcaaaccagtaagagtgttaaagctatagatttgcacaattctgggtcagagtcagagcaaagagaagcaaaatcaagatgatgtacacttagatgtatcctatgagttttccttgtacatcatcttcatactcttaatctcaaatactatgcatttttctcc

SEQ ID NO: 76210 - protein, 563 aa, Arabidopsis thaliana
  peptide (1)..(563): Ceres Seq. ID no. 7107102
  misc_feature (104)..(521): Pfam Name: Glycosyl hydrolase family 14 Pfam Description: Glycosyl hydrolase family 14
  misc_feature (16)..(563): Homolog of NCBI NO: 18414813 NR Description: glycosyl hydrolase family 14 (beta-amylase); id: At4g17090.1, supported by cDNA: 36882., supported by cDNA:
  misc_feature (66)..(563): Homolog of NCBI NO: 25289326 NR Description: probable beta-amylase [imported] - Arabidopsis
  misc_feature (66)..(563): Homolog of NCBI NO: 7435338 NR Description: probable Beta-Amylase - Arabidopsis thaliana
  misc_feature (16)..(563): Homolog of NCBI NO: 15082058 NR Description: beta-amylase PCT-BMYI [Solanum tuberosum]
  misc_feature (16)..(391): Homolog of NCBI NO: 15450429 NR Description: AT4g17090/dl4575c [Arabidopsis thaliana]
  misc_feature (16)..(561): Homolog of NCBI NO: 37536926 NR Description: putative chloroplast-targeted beta-amylase [Oryza
  misc_feature (88)..(541): Homolog of NCBI NO: 37535192 NR Description: putative amylase [Oryza sativa (japonica
  misc_feature (101)..(555): Homolog of NCBI NO: 15229544 NR Description: glycosyl hydrolase family 14 (beta-amylase); id: At3g23920.1, supported by cDNA: gi_14194172, supported by
  misc_feature (14)..(555): Homolog of NCBI NO: 17224922 NR Description: putative chloroplast-targeted beta-amylase
  misc_feature (101)..(525): Homolog of NCBI NO: 3913031 NR Description: BETA-AMYLASE (1,4-ALPHA-D-GLUCAN MALTOHYDROLASE)
TRPSFLIITKREKKTMELTLNSSSSLIKRKDAKSSRNQESSSNNMTFAKMKPPTYQFQAKNSVKEMKFTHEKTFTPEGETLEKWEKLHVLSYPHSKNDASVPVFVMLPLDTVTMSGHLNKPRAMNASLMALKGAGVEGVMVDAWWGLVEKDGPMNYNWEGYAELIQMVQKHGLKLQVVMSFHQCGGNVGDSCSIPLPPWVLEEISKNPDLVYTDKSGRRNPEYISLGCDSVPVLRGRTPIQVYSDFMRSFRERFEGYIGGVIAEIQVGMGPCGELRYPSYPESNGTWRFPGIGEFQCYDKYMKSSLQAYAESIGKTNWGTSGPHDAGEYKNLPEDTEFFRRDGTWNSEYGKFFMEWYSGKLLEHGDQLLSSAKGIFQGSGAKLSGKVAGIHWHYNTRSHAAELTAGYYNTRNHDGYLPIAKMFNKHGVVLNFTCMEMKDGEQPEHANCSPEGLVKQVQNATRQAGTELAGENALERYDSSAFGQVVATNRSDSGNGLTAFTYLRMNKRLFEGQNWQQLVEFVKNMKEGGHGRRLSKEDTTGSDLYVGFVKGKIAENVEEAALV

SEQ ID NO: 76211 - protein, 548 aa, Arabidopsis thaliana; identical to SEQ ID NO: 23678
  peptide (1)..(548): Ceres Seq. ID no. 7107103
  misc_feature (89)..(506): Pfam Name: Glycosyl hydrolase family 14 Pfam Description: Glycosyl hydrolase family 14
  misc_feature (1)..(548): Homolog of NCBI NO: 18414813 NR Description: glycosyl hydrolase family 14 (beta-amylase); id: At4g17090.1, supported by cDNA: 36882., supported by cDNA:
  misc_feature (51)..(548): Homolog of NCBI NO: 25289326 NR Description: probable beta-amylase [imported] - Arabidopsis
  misc_feature (51)..(548): Homolog of NCBI NO: 7435338 NR Description: probable Beta-Amylase - Arabidopsis thaliana
  misc_feature (1)..(548): Homolog of NCBI NO: 15082058 NR Description: beta-amylase PCT-BMYI [Solanum tuberosum]
  misc_feature (1)..(376): Homolog of NCBI NO: 15450429 NR Description: AT4g17090/dl4575c [Arabidopsis thaliana]
  misc_feature (1)..(546): Homolog of NCBI NO: 37536926 NR Description: putative chloroplast-targeted beta-amylase [Oryza
  misc_feature (73)..(526): Homolog of NCBI NO: 37535192 NR Description: putative amylase [Oryza sativa (japonica
  misc_feature (86)..(540): Homolog of NCBI NO: 15229544 NR Description: glycosyl hydrolase family 14 (beta-amylase); id: At3g23920.1, supported by cDNA: gi_14194172, supported by
  misc_feature (1)..(540): Homolog of NCBI NO: 17224922 NR Description: putative chloroplast-targeted beta-amylase
  misc_feature (86)..(510): Homolog of NCBI NO: 3913031 NR Description: BETA-AMYLASE (1,4-ALPHA-D-GLUCAN MALTOHYDROLASE)

SEQ ID NO: 76212 - protein, 519 aa, Arabidopsis thaliana; identical to SEQ ID NO: 23679
  peptide (1)..(519): Ceres Seq. ID no. 7107104
  misc_feature (60)..(477): Pfam Name: Glycosyl hydrolase family 14 Pfam Description: Glycosyl hydrolase family 14
  misc_feature (1)..(519): Homolog of NCBI NO: 18414813 NR Description: glycosyl hydrolase family 14 (beta-amylase); id: At4g17090.1, supported by cDNA: 36882., supported by cDNA:
  misc_feature (22)..(519): Homolog of NCBI NO: 25289326 NR Description: probable beta-amylase [imported] - Arabidopsis
  misc_feature (22)..(519): Homolog of NCBI NO: 7435338 NR Description: probable Beta-Amylase - Arabidopsis thaliana
  misc_feature (1)..(519): Homolog of NCBI NO: 15082058 NR Description: beta-amylase PCT-BMYI [Solanum tuberosum]
  misc_feature (1)..(347): Homolog of NCBI NO: 15450429 NR Description: AT4g17090/dl4575c [Arabidopsis thaliana]
  misc_feature (1)..(517): Homolog of NCBI NO: 37536926 NR Description: putative chloroplast-targeted beta-amylase [Oryza
  misc_feature (44)..(497): Homolog of NCBI NO: 37535192 NR Description: putative amylase [Oryza sativa (japonica
  misc_feature (57)..(511): Homolog of NCBI NO: 15229544 NR Description: glycosyl hydrolase family 14 (beta-amylase); id: At3g23920.1, supported by cDNA: gi_14194172, supported by
  misc_feature (1)..(511): Homolog of NCBI NO: 17224922 NR Description: putative chloroplast-targeted beta-amylase
  misc_feature (57)..(481): Homolog of NCBI NO: 3913031 NR Description: BETA-AMYLASE (1,4-ALPHA-D-GLUCAN MALTOHYDROLASE)

SEQ ID NO: 76213 - DNA, 1233 bp, Arabidopsis thaliana
  misc_feature (1)..(1233): Ceres Seq. ID no. 7107105
  misc_feature: MA Experiment ID: 20001248 Result: Up-regulated in Transcription
  misc_feature: MA Experiment 20001248 PARAMETER Experiment Name: At_Far-red-induction_P Parameter: Age (day) Value: 7
  misc_feature: MA Experiment 20001248 PARAMETER Experiment Name: At_Far-red-induction_P Parameter: Light Value: Far-red vs. White
  misc_feature: MA Experiment 20001248 PARAMETER Experiment Name: At_Far-red-induction_P Parameter: Organism Value: A. thaliana
  misc_feature: MA Experiment 20001248 PARAMETER Experiment Name: At_Far-red-induction_P Parameter: Plant Line Value: Columbia
  misc_feature: MA Experiment 20001248 PARAMETER Experiment Name: At_Far-red-induction_P Parameter: Timepoint (hr) Value: 4
  misc_feature: MA Experiment 20001248 PARAMETER Experiment Name: At_Far-red-induction_P Parameter: Tissue Value: Whole Plant
  misc_feature: MA Experiment ID: 20001557 Result: Down-regulated in Transcription
  misc_feature: MA Experiment 20001557 PARAMETER Experiment Name: At_Drought_Soil_Dry_P Parameter: Age (day) Value: 27
  misc_feature: MA Experiment 20001557 PARAMETER Experiment Name: At_Drought_Soil_Dry_P Parameter: Organism Value: A. thaliana
  misc_feature: MA Experiment 20001557 PARAMETER Experiment Name: At_Drought_Soil_Dry_P Parameter: Plant Line Value: WS
  misc_feature: MA Experiment 20001557 PARAMETER Experiment Name: At_Drought_Soil_Dry_P Parameter: Post Timepoint (hr) Value: 3
  misc_feature: MA Experiment 20001557 PARAMETER Experiment Name: At_Drought_Soil_Dry_P Parameter: Post-Treatment Value: Re-Water vs. No Drought
  misc_feature: MA Experiment 20001557 PARAMETER Experiment Name: At_Drought_Soil_Dry_P Parameter: Timepoint (day) Value: 13
  misc_feature: MA Experiment 20001557 PARAMETER Experiment Name: At_Drought_Soil_Dry_P Parameter: Treatment Value: Drought vs. No Drought
cgacccacgcgtccgctctctggtnaagaaaccaatgcatttcggcgacagcctgggggngaaaagccatcgatcgaccgagaaagcgaaaagagagagagatgagactcgtcgtctcaagctgtctactagttgcagctccttttctctcctctctgttacgagtctcactcgccactgttgtcctcaattccatctccgcctcttttgccgatctcccagccaaatttgacggctccgtgaccaaaaacggaatctgtggagctctatacgtcgcagatcctctcgacggttgctcaccgcttctccacgccgccgcatccaactggacgcaacacagaactactaagttcgctttgataatcagaggcgaatgttcttttgaggataagctgctcaatgcccagaactcaggttttcaagctgtgattgtctatgacaacattgacaacgaagatctcatcgtcatgaaggtgaaccctcaggacattacagttgatgcagtcttcgtttcaaatgtcgccggtgagattttgagaaagtacgcgagaggccgagatggtgaatgctgccttaatccgccagacagagggagcgcttggactgtgttggccatctccttcttctctctccttcttatagtcactttcctgttgattgccttctttgcacccagacactggacccaatggcgagggaggcacaccaggaccatcaggttagatgcaaagctcgtccacacactcccctgcttcaccttcactgattctgctcaccacaaggccggggaaacatgtgctatatgtctcgaggattacagatttggagaaagcctcagacttctcccctgccaacatgcttttcacttgaattgcatcgactcttggttgacaaaatggggtacatcttgccctgtgtgcaagcatgacataagaaccgagactatgtcttctgaggtacataaacgagagagtccgagaacagatacaagtacgagtagatttgcctttgcccaatccagtcaaagccgttagagttattatcggcttagcagctgaacactcatatcagtgctcggttacctggatcaggtccaggtttgcatcttatattgaatggntaatcatggtgggataagtttaggtaaagggaccggatctgccatactgggcgggctttgctggattccagatcaaaaagatatganttgctttgcctctttttctttgcatg

SEQ ID NO: 76214 - protein, 343 aa, Arabidopsis thaliana
  peptide (1)..(343): Ceres Seq. ID no. 7107106
  misc_feature (80)..(182): Pfam Name: PA domain Pfam Description: PA domain
  misc_feature (34)..(343): Homolog of NCBI NO: 15239276 NR Description: ReMembR-H2 protein JR700 (gb|AAF32325.1); protein At5g66160.1, supported by cDNA: gi_14334831, supported by cDNA:
  misc_feature (60)..(314): Homolog of NCBI NO: 38637053 NR Description: putative ReMembR-H2 protein [Oryza sativa
  misc_feature (51)..(334): Homolog of NCBI NO: 22330577 NR Description: unknown protein; protein id: At1g71980.1, by cDNA: gi_17529199 [Arabidopsis thaliana] unknown protein [Arabidopsis thaliana]
  misc_feature (63)..(334): Homolog of NCBI NO: 25406132 NR Description: unknown protein F17M19.13 [imported] -
  misc_feature (51)..(334): Homolog of NCBI NO: 6942149 NR Description: ReMembR-H2 protein JR702 [Arabidopsis thaliana]
  misc_feature (30)..(312): Homolog of NCBI NO: 19071633 NR Description: putative integral membrane protein [Oryza sativa
  misc_feature (34)..(330): Homolog of NCBI NO: 15219930 NR Description: putative RING zinc finger protein; protein id:
  misc_feature (36)..(342): Homolog of NCBI NO: 15233945 NR Description: putative protein; protein id: At4g09560.1
  misc_feature (80)..(336): Homolog of NCBI NO: 15219668 NR Description: integral membrane protein, putative; protein id:
  misc_feature (52)..(336): Homolog of NCBI NO: 15219670 NR Description: integral membrane protein, putative; protein id:
  misc_feature (8)..(8): Xaa is any aa, unknown or other
  misc_feature (20)..(20): Xaa is any aa, unknown or other
THASALWXRNQCISATAWGXKAIDRPRKRKEREMRLVVSSCLLVAAPFLSSLLRVSLATVVLNSISASFADLPAKFDGSVTKNGICGALYVADPLDGCSPLLHAAASNWTQHRTTKFALIIRGECSFEDKLLNAQNSGFQAVIVYDNIDNEDLIVMKVNPQDITVDAVFVSNVAGEILRKYARGRDGECCLNPPDRGSAWTVLAISFFSLLLIVTFLLIAFFAPRHWTQWRGRHTRTIRLDAKLVHTLPCFTFTDSAHHKAGETCAICLEDYRFGESLRLLPCQHAFHLNCIDSWLTKWGTSCPVCKHDIRTETMSSEVHKRESPRTDTSTSRFAFAQSSQSR

SEQ ID NO: 76215 - protein, 310 aa, Arabidopsis thaliana; identical to SEQ ID NO: 45641
  peptide (1)..(310): Ceres Seq. ID no. 7107107
  misc_feature (47)..(149): Pfam Name: PA domain Pfam Description: PA domain
  misc_feature (1)..(310): Homolog of NCBI NO: 15239276 NR Description: ReMembR-H2 protein JR700 (gb|AAF32325.1); protein At5g66160.1, supported by cDNA: gi_14334831, supported by cDNA:
  misc_feature (27)..(281): Homolog of NCBI NO: 38637053 NR Description: putative ReMembR-H2 protein [Oryza sativa
  misc_feature (18)..(301): Homolog of NCBI NO: 22330577 NR Description: unknown protein; protein id: At1g71980.1, by cDNA: gi_17529199 [Arabidopsis thaliana] unknown protein [Arabidopsis thaliana]
  misc_feature (30)..(301): Homolog of NCBI NO: 25406132 NR Description: unknown protein F17M19.13 [imported] -
  misc_feature (18)..(301): Homolog of NCBI NO: 6942149 NR Description: ReMembR-H2 protein JR702 [Arabidopsis thaliana]
  misc_feature (1)..(279): Homolog of NCBI NO: 19071633 NR Description: putative integral membrane protein [Oryza sativa
  misc_feature (1)..(297): Homolog of NCBI NO: 15219930 NR Description: putative RING zinc finger protein; protein id:
  misc_feature (3)..(309): Homolog of NCBI NO: 15233945 NR Description: putative protein; protein id: At4g09560.1
  misc_feature (47)..(303): Homolog of NCBI NO: 15219668 NR Description: integral membrane protein, putative; protein id:
  misc_feature (19)..(303): Homolog of NCBI NO: 15219670 NR Description: integral membrane protein, putative; protein id:

SEQ ID NO: 76216 - protein, 188 aa, Arabidopsis thaliana; identical to SEQ ID NO: 45642
  peptide (1)..(188): Ceres Seq. ID no. 7107108
  misc_feature (110)..(151): Pfam Name: Zinc finger, C3HC4 type (RING finger) Pfam Description: Zinc finger, C3HC4 type (RING finger)
  misc_feature (1)..(188): Homolog of NCBI NO: 15239276 NR Description: ReMembR-H2 protein JR700 (gb|AAF32325.1); protein At5g66160.1, supported by cDNA: gi_14334831, supported by cDNA:
  misc_feature (1)..(159): Homolog of NCBI NO: 38637053 NR Description: putative ReMembR-H2 protein [Oryza sativa
  misc_feature (1)..(179): Homolog of NCBI NO: 22330577 NR Description: unknown protein; protein id: At1g71980.1, by cDNA: gi_17529199 [Arabidopsis thaliana] unknown protein [Arabidopsis thaliana]
  misc_feature (1)..(179): Homolog of NCBI NO: 25406132 NR Description: unknown protein F17M19.13 [imported] -
  misc_feature (1)..(179): Homolog of NCBI NO: 6942149 NR Description: ReMembR-H2 protein JR702 [Arabidopsis thaliana]
  misc_feature (1)..(157): Homolog of NCBI NO: 19071633 NR Description: putative integral membrane protein [Oryza sativa
  misc_feature (1)..(175): Homolog of NCBI NO: 15219930 NR Description: putative RING zinc finger protein; protein id:
  misc_feature (1)..(187): Homolog of NCBI NO: 15233945 NR Description: putative protein; protein id: At4g09560.1
  misc_feature (1)..(181): Homolog of NCBI NO: 15219668 NR Description: integral membrane protein, putative; protein id:
  misc_feature (1)..(181): Homolog of NCBI NO: 15219670 NR Description: integral membrane protein, putative; protein id:

SEQ ID NO: 76217 - DNA, 1603 bp, Arabidopsis thaliana
  misc_feature (1)..(1603): Ceres Seq. ID no. 7107113
  misc_feature: MA Experiment ID: 20001247 Result: Up-regulated in Transcription
  misc_feature: MA Experiment 20001247 PARAMETER Experiment Name: At_Far-red-induction_P Parameter: Age (day) Value: 7
  misc_feature: MA Experiment 20001247 PARAMETER Experiment Name: At_Far-red-induction_P Parameter: Light Value: Far-red vs. White
  misc_feature: MA Experiment 20001247 PARAMETER Experiment Name: At_Far-red-induction_P Parameter: Organism Value: A. thaliana
  misc_feature: MA Experiment 20001247 PARAMETER Experiment Name: At_Far-red-induction_P Parameter: Plant Line Value: Columbia
  misc_feature: MA Experiment 20001247 PARAMETER Experiment Name: At_Far-red-induction_P Parameter: Timepoint (hr) Value: 1
  misc_feature: MA Experiment 20001247 PARAMETER Experiment Name: At_Far-red-induction_P Parameter: Tissue Value: Whole Plant
  misc_feature: Pfam Name: Pkinase Pfam Description: Protein kinase domain
ggtgactgctgatccatctaaagtcctacgcccgactactaggaaatcgaaaagcaatacggctattattgcaggcgcacagtggtgcagttgttctggcccttatcattgggttttgtgtgtttggtgcttaccgcagacgtaagcgtggtgattaccagcctgctagtgatgcaacatcagggtggcttccactatctctgtatggaaactcacattctgctggctcggcgaagaaaacacaacaggaagttatgcctcgtccttccgtcaaatctttgccgtcacttctcgtttgctgagatcaaagctgccactaaaaactttgatgagtcccgggtgcttggtgttggtggtttcggcaaggtttacagaggagagattgatggcggaactacaaaggtagccatcaagagaggcaacccaatgtccgagcaaggtgtacatgagttccagactgagattgaaatgctttcaaagcttagacatcgtcatcttgtgtccttgattggatactgtgaagagaactgcgaaatgatcttagtctatgattacatggctcatggtacaatgagggagcatctctacaaaacccagaatccttctcttccatggaagcaacgtcttgagatatgcattggagcagcccgaggtttacactatctacacactggtgcaaaacacacaatcatccatagagatgtgaagacaacaaacattctattggatgagaagtgggtggccaaggtctctgattttggtctatcgaagactggtcctacactagaccacacacacgtaagcacagttgtgaaaggaagtttcggttatcttgacccagagtatttcagacggcagcaactgactgagaaatccgatgtctactcctttggcgttgttctattcgaagctctatgcgctcgtccagccttgaacccaacacttgcaaaggaacaagtgagcttagctgagtgggcaccatactgctacaagaaaggcatgctagatcaaatcgttgatccctacctcaagggcaagatcacaccagaatgcttcaaaaagtttgctgaaaccgcgatgaagtgtgttctagaccagggcattgagagaccatcaatggagatgttctgtggaacttagaatttgcgttgcagctcaggaagcgcagaagagaacgaaaggagtatcgtgactcggcataggtagagattaagtacgatgatggaaactgtaaaggaaagaacgacaagagttctgatgtgtatgaagggaatgtgacggactcgaggagcagtggaatagatatgagcatcggtggtcggagtttggccagcgaagattcagatggactcactccaagtgctgtgttttctcagatcatgaatccaaagggacgttagagaagtcttataacacggtacaacactactacctttctaaaccggctccatccaaaggagaccgttcgtttctcttttttttatattttttttcctcttaactatttattattattctctttgctgttatttatttagaattttggatttgtgtatttgatactgccacgatggagagtgtaaaaaataatgtattttttttt

SEQ ID NO: 76218 - protein, 322 aa, Arabidopsis thaliana
  peptide (1)..(322): Ceres Seq. ID no. 7107114
  misc_feature: Pfam Name: Pkinase Pfam Description: Protein kinase domain
  misc_feature (32)..(322): Homolog of NCBI NO: 15230520 NR Description: receptor-protein kinase-like protein; protein id:
  misc_feature (32)..(322): Homolog of NCBI NO: 14334760 NR Description: putative receptor-protein kinase [Arabidopsis
  misc_feature (32)..(316): Homolog of NCBI NO: 17887381 NR Description: receptor protein kinase-like protein [Capsicum
  misc_feature (1)..(322): Homolog of NCBI NO: 8247189 NR Description: putative serine threonine kinase [Arabidopsis
  misc_feature (1)..(316): Homolog of NCBI NO: 34909896 NR Description: putative receptor-protein kinase [Oryza sativa
  misc_feature (32)..(282): Homolog of NCBI NO: 31747035 NR Description: tyrosine kinase [Cucumis sativus]
  misc_feature (32)..(316): Homolog of NCBI NO: 15241880 NR Description: receptor-like protein kinase precursor - like;
  misc_feature (32)..(316): Homolog of NCBI NO: 15229329 NR Description: putative protein kinase; protein id: At3g04690.1 thaliana] >gi|6175184|gb|AAF04910.1|AC011437_25 putative protein
  misc_feature (34)..(316): Homolog of NCBI NO: 34902826 NR Description: unnamed protein product [Oryza sativa (japonica group)] >gi|6498463|dbj|BAA87852.1| unnamed protein product
  misc_feature (29)..(316): Homolog of NCBI NO: 15239630 NR Description: receptor-protein kinase-like protein; protein id:
MQHQGGFHYLCMETHILLARRRKHNRKLCLVLPSNLCRHFSFAEIKAATKNFDESRVLGVGGFGKVYRGEIDGGTTKVAIKRGNPMSEQGVHEFQTEIEMLSKLRHRHLVSLIGYCEENCEMILVYDYMAHGTMREHLYKTQNPSLPWKQRLEICIGAARGLHYLHTGAKHTIIHRDVKTTNILLDEKWVAKVSDFGLSKTGPTLDHTHVSTVVKGSFGYLDPEYFRRQQLTEKSDVYSFGVVLFEALCARPALNPTLAKEQVSLAEWAPYCYKKGMLDQIVDPYLKGKITPECFKKFAETAMKCVLDQGIERPSMEMFCGT

SEQ ID NO: 76219 - protein, 311 aa, Arabidopsis thaliana
  peptide (1)..(311): Ceres Seq. ID no. 7107115
  misc_feature: Pfam Name: Pkinase Pfam Description: Protein kinase domain
  misc_feature (21)..(311): Homolog of NCBI NO: 15230520 NR Description: receptor-protein kinase-like protein; protein id:
  misc_feature (21)..(311): Homolog of NCBI NO: 14334760 NR Description: putative receptor-protein kinase [Arabidopsis
  misc_feature (21)..(305): Homolog of NCBI NO: 17887381 NR Description: receptor protein kinase-like protein [Capsicum
  misc_feature (1)..(311): Homolog of NCBI NO: 8247189 NR Description: putative serine threonine kinase [Arabidopsis
  misc_feature (1)..(305): Homolog of NCBI NO: 34909896 NR Description: putative receptor-protein kinase [Oryza sativa
  misc_feature (21)..(271): Homolog of NCBI NO: 31747035 NR Description: tyrosine kinase [Cucumis sativus]
  misc_feature (21)..(305): Homolog of NCBI NO: 15241880 NR Description: receptor-like protein kinase precursor - like;
  misc_feature (21)..(305): Homolog of NCBI NO: 15229329 NR Description: putative protein kinase; protein id: At3g04690.1 thaliana] >gi|6175184|gb|AAF04910.1|AC011437_25 putative protein
  misc_feature (23)..(305): Homolog of NCBI NO: 34902826 NR Description: unnamed protein product [Oryza sativa (japonica group)] >gi|6498463|dbj|BAA87852.1| unnamed protein product
  misc_feature (18)..(305): Homolog of NCBI NO: 15239630 NR Description: receptor-protein kinase-like protein; protein id:
METHILLARRRKHNRKLCLVLPSNLCRHFSFAEIKAATKNFDESRVLGVGGFGKVYRGEIDGGTTKVAIKRGNPMSEQGVHEFQTEIEMLSKLRHRHLVSLIGYCEENCEMILVYDYMAHGTMREHLYKTQNPSLPWKQRLEICIGAARGLHYLHTGAKHTIIHRDVKTTNILLDEKWVAKVSDFGLSKTGPTLDHTHVSTVVKGSFGYLDPEYFRRQQLTEKSDVYSFGVVLFEALCARPALNPTLAKEQVSLAEWAPYCYKKGMLDQIVDPYLKGKITPECFKKFAETAMKCVLDQGIERPSMEMFCGT

SEQ ID NO: 76220 - protein, 237 aa, Arabidopsis thaliana
  peptide (1)..(237): Ceres Seq. ID no. 7107116
  misc_feature: Pfam Name: Pkinase Pfam Description: Protein kinase domain
  misc_feature (1)..(237): Homolog of NCBI NO: 15230520 NR Description: receptor-protein kinase-like protein; protein id:
  misc_feature (1)..(237): Homolog of NCBI NO: 14334760 NR Description: putative receptor-protein kinase [Arabidopsis
  misc_feature (1)..(231): Homolog of NCBI NO: 17887381 NR Description: receptor protein kinase-like protein [Capsicum
  misc_feature (1)..(237): Homolog of NCBI NO: 8247189 NR Description: putative serine threonine kinase [Arabidopsis
  misc_feature (1)..(231): Homolog of NCBI NO: 34909896 NR Description: putative receptor-protein kinase [Oryza sativa
  misc_feature (1)..(197): Homolog of NCBI NO: 31747035 NR Description: tyrosine kinase [Cucumis sativus]
  misc_feature (1)..(231): Homolog of NCBI NO: 15241880 NR Description: receptor-like protein kinase precursor - like;
  misc_feature (1)..(231): Homolog of NCBI NO: 15229329 NR Description: putative protein kinase; protein id: At3g04690.1 thaliana] >gi|6175184|gb|AAF04910.1|AC011437_25 putative protein
  misc_feature (1)..(231): Homolog of NCBI NO: 34902826 NR Description: unnamed protein product [Oryza sativa (japonica group)] >gi|6498463|dbj|BAA87852.1| unnamed protein product
  misc_feature (1)..(231): Homolog of NCBI NO: 15239630 NR Description: receptor-protein kinase-like protein; protein id:
MSEQGVHEFQTEIEMLSKLRHRHLVSLIGYCEENCEMILVYDYMAHGTMREHLYKTQNPSLPWKQRLEICIGAARGLHYLHTGAKHTIIHRDVKTTNILLDEKWVAKVSDFGLSKTGPTLDHTHVSTVVKGSFGYLDPEYFRRQQLTEKSDVYSFGVVLFEALCARPALNPTLAKEQVSLAEWAPYCYKKGMLDQIVDPYLKGKITPECFKKFAETAMKCVLDQGIERPSMEMFCGT

SEQ ID NO: 76221 - DNA, 1575 bp, Arabidopsis thaliana
  misc_feature (1)..(1575): Ceres Seq. ID no. 7107125
  misc_feature: MA Experiment ID: 108461 Result: Down-regulated in Transcription
  misc_feature: MA Experiment 108461 PARAMETER Experiment Name: At_Germinating_Seeds_cDNA_P Parameter: Age (day) Value: 1 vs. 0
  misc_feature: MA Experiment 108461 PARAMETER Experiment Name: At_Germinating_Seeds_cDNA_P Parameter: Tissue Value: Germinating Seeds
  misc_feature: MA Experiment ID: 108462 Result: Down-regulated in Transcription
  misc_feature: MA Experiment 108462 PARAMETER Experiment Name: At_Germinating_Seeds_cDNA_P Parameter: Age (day) Value: 2 vs. 0
  misc_feature: MA Experiment 108462 PARAMETER Experiment Name: At_Germinating_Seeds_cDNA_P Parameter: Tissue Value: Germinating Seeds
  misc_feature: MA Experiment ID: 108463 Result: Down-regulated in Transcription
  misc_feature: MA Experiment 108463 PARAMETER Experiment Name: At_Germinating_Seeds_cDNA_P Parameter: Age (day) Value: 3 vs. 0
  misc_feature: MA Experiment 108463 PARAMETER Experiment Name: At_Germinating_Seeds_cDNA_P Parameter: Tissue Value: Germinating Seeds
  misc_feature: MA Experiment ID: 108573 Result: Up-regulated in Transcription
  misc_feature: MA Experiment 108573 PARAMETER Experiment Name: At_Drought_cDNA_P Parameter: Timepoint (hr) Value: 6
  misc_feature: MA Experiment 108573 PARAMETER Experiment Name: At_Drought_cDNA_P Parameter: Tissue Value: Aerial
  misc_feature: MA Experiment 108573 PARAMETER Experiment Name: At_Drought_cDNA_P Parameter: Treatment Value: Drought vs. No Drought
  misc_feature: MA Experiment ID: 108585 Result: Up-regulated in Transcription
  misc_feature: MA Experiment 108585 PARAMETER Experiment Name: At_5mM_NaNP_cDNA_P Parameter: Timepoint (hr) Value: 6
  misc_feature: MA Experiment 108585 PARAMETER Experiment Name: At_5mM_NaNP_cDNA_P Parameter: Tissue Value: Aerial
  misc_feature: MA Experiment 108585 PARAMETER Experiment Name: At_5mM_NaNP_cDNA_P Parameter: Treatment Value: null
  misc_feature: MA Experiment ID: 20000179 Result: Down-regulated in Transcription
  misc_feature: MA Experiment 20000179 PARAMETER Experiment Name: At_Germinating_Seeds_P Parameter: Age (hr) Value: 6 vs. 0
  misc_feature: MA Experiment 20000179 PARAMETER Experiment Name: At_Germinating_Seeds_P Parameter: Tissue Value: Germinating Seeds
  misc_feature: Pfam Name: AAA Pfam Description: ATPase family associated with various cellular activities (AAA)
ccacgcgtccgctttaccctttcgagaaaaaagaaaagaaaaaagaacttgttttcctcttcagcaagacacataaatcgtaatccattttctctcaactttaggaatctcaaatctccgatttggaaatccggcgacaatggtgagagatattgaagatgagattagagacgagaagaatcctcgtcctcttgatgaagatgatatcgctctcctcaagacttatgggttagggccttactctgcacctatcaagaaagtggagaaagaaattaaggatctcgccaagaagatcaacgatctatgtggtatcaaggagtctgatactggtttagctcctcccagtcaatgggatcttgtatctgataagcaaatgatgcaagaagagcaacctctgcaggttgcgagatgcacaaagattataagtccaaacactgaagacgccaaatacgtcataaatgtcaaacaaattgctaagtttgttgttggacttggcgataaagtttctcccactgatattgaggaaggcatgcgtgttggagttgatcggaataaatatcagattcagattcctctacctcccaaaatcgatcctagcgtgaccatgatgactgtcgaagagaaacctgatgtaacttacaatgatgttggtggatgcaaggagcagattgagaagatgcgagaggttgttgaactgccaatgcttcatccagagaaatttgtgaagcttggaatagatcctcccaagggtgttctctgctacggacctcctggtactggtaaaactcttctggctagagctgtggccaacagaaccgatgcttgctttatcagggttattggaagtgagcttgttcagaagtatgttggtgaaggagctaggatggttcgtgaactgtttcagatggcacggtccaagaaagcctgcattgtgttctttgacgaagttgatgccattggtggtgcaagatttgatgatggtgttggtggtgataacgaagtccaacgtactatgcttgagattgtgaatcagcttgatgggtttgacgcacgtggtaacatcaaggttcttatggcaacaaacaggcctgacacactagacccagctcttttacgttctggacgtcttgaccgtaaggttgagtttggtctacctgacctggagagcagaacacagatcttcaagattcacacaagaaccatgaactgcgaaagagacatccgtttcgaactccttgctcgcctctgcccaaactcaacgggagctgatattcgaagtgtatgcactgaagcaggaatgtacgcaatcagagctaggagaaagactgtgactgagaaagactttctagacgcagtgaacaaagtcattaaaggttaccaaaagttcagtgccactcccaagtatatggtctacaattagagagattgagacagatagaagaactccgaaataaaactccgaaacactctttgttctttgtttgtgtctcttcccttcaagctcttttgtagtacttgtttcacaacttattccagtaactcgggtttatcttcttcaatgtctactacttttgg

SEQ ID NO: 76222 - protein, 426 aa, Arabidopsis thaliana
  peptide (1)..(426): Ceres Seq. ID no. 7107126
  misc_feature: Pfam Name: AAA Pfam Description: ATPase family associated with various cellular activities (AAA)
  misc_feature (1)..(426): Homolog of NCBI NO: 6652878 NR Description: 26S proteasome AAA-ATPase subunit RPT1a
  misc_feature (1)..(426): Homolog of NCBI NO: 15220930 NR Description: 26S proteasome AAA-ATPase subunit RPT1a; protein At1g53750.1, supported by cDNA: 36419., supported by cDNA: supported by cDNA: gi_6652877 [Arabidopsis thaliana] (26S
  misc_feature (1)..(426): Homolog of NCBI NO: 28558165 NR Description: 26S protease regulatory subunit 7 (26S proteasome
  misc_feature (1)..(426): Homolog of NCBI NO: 2492519 NR Description: 26S protease regulatory subunit 7 (26S proteasome
  misc_feature (7)..(426): Homolog of NCBI NO: 3914449 NR Description: 26S protease regulatory subunit 7 (26S proteasome
  misc_feature (33)..(425): Homolog of NCBI NO: 15220933 NR Description: 26S proteasome ATPase subunit, putative; protein
  misc_feature (33)..(425): Homolog of NCBI NO: 25289951 NR Description: hypothetical protein T18A20.2 [imported] - thaliana >gi|6056389|gb|AAF02853.1|AC009324_2 Putative 26S
  misc_feature (4)..(426): Homolog of NCBI NO: 28829138 NR Description: similar to Oryza sativa (Rice). 26S proteasome
  misc_feature (3)..(426): Homolog of NCBI NO: 20532410 NR Description: 26S protease regulatory subunit 7 (MSS1 protein) unnamed protein product [Mus musculus] proteasome (prosome, macropain) 26S subunit, ATPase 2 [Mus
  misc_feature (3)..(426): Homolog of NCBI NO: 33859604 NR Description: proteasome (prosome, macropain) 26S subunit,
MVRDIEDEIRDEKNPRPLDEDDIALLKTYGLGPYSAPIKKVEKEIKDLAKKINDLCGIKESDTGLAPPSQWDLVSDKQMMQEEQPLQVARCTKIISPNTEDAKYVINVKQIAKFVVGLGDKVSPTDIEEGMRVGVDRNKYQIQIPLPPKIDPSVTMMTVEEKPDVTYNDVGGCKEQIEKMREVVELPMLHPEKFVKLGIDPPKGVLCYGPPGTGKTLLARAVANRTDACFIRVIGSELVQKYVGEGARMVRELFQMARSKKACIVFFDEVDAIGGARFDDGVGGDNEVQRTMLEIVNQLDGFDARGNIKVLMATNRPDTLDPALLRSGRLDRKVEFGLPDLESRTQIFKIHTRTMNCERDIRFELLARLCPNSTGADIRSVCTEAGMYAIRARRKTVTEKDFLDAVNKVIKGYQKFSATPKYMVYN

SEQ ID NO: 76223 - protein, 348 aa, Arabidopsis thaliana
  peptide (1)..(348): Ceres Seq. ID no. 7107127
  misc_feature: Pfam Name: AAA Pfam Description: ATPase family associated with various cellular activities (AAA)
  misc_feature (1)..(348): Homolog of NCBI NO: 6652878 NR Description: 26S proteasome AAA-ATPase subunit RPT1a
  misc_feature (1)..(348): Homolog of NCBI NO: 15220930 NR Description: 26S proteasome AAA-ATPase subunit RPT1a; protein At1g53750.1, supported by cDNA: 36419., supported by cDNA: supported by cDNA: gi_6652877 [Arabidopsis thaliana] (26S
  misc_feature (1)..(348): Homolog of NCBI NO: 28558165 NR Description: 26S protease regulatory subunit 7 (26S proteasome
  misc_feature (1)..(348): Homolog of NCBI NO: 2492519 NR Description: 26S protease regulatory subunit 7 (26S proteasome
  misc_feature (1)..(348): Homolog of NCBI NO: 3914449 NR Description: 26S protease regulatory subunit 7 (26S proteasome
  misc_feature (1)..(347): Homolog of NCBI NO: 15220933 NR Description: 26S proteasome ATPase subunit, putative; protein
  misc_feature (1)..(347): Homolog of NCBI NO: 25289951 NR Description: hypothetical protein T18A20.2 [imported] - thaliana >gi|6056389|gb|AAF02853.1|AC009324_2 Putative 26S
  misc_feature (1)..(348): Homolog of NCBI NO: 28829138 NR Description: similar to Oryza sativa (Rice). 26S proteasome
  misc_feature (1)..(348): Homolog of NCBI NO: 20532410 NR Description: 26S protease regulatory subunit 7 (MSS1 protein) unnamed protein product [Mus musculus] proteasome (prosome, macropain) 26S subunit, ATPase 2 [Mus
  misc_feature (1)..(348): Homolog of NCBI NO: 33859604 NR Description: proteasome (prosome, macropain) 26S subunit,
MMQEEQPLQVARCTKIISPNTEDAKYVINVKQIAKFVVGLGDKVSPTDIEEGMRVGVDRNKYQIQIPLPPKIDPSVTMMTVEEKPDVTYNDVGGCKEQIEKMREVVELPMLHPEKFVKLGIDPPKGVLCYGPPGTGKTLLARAVANRTDACFIRVIGSELVQKYVGEGARMVRELFQMARSKKACIVFFDEVDAIGGARFDDGVGGDNEVQRTMLEIVNQLDGFDARGNIKVLMATNRPDTLDPALLRSGRLDRKVEFGLPDLESRTQIFKIHTRTMNCERDIRFELLARLCPNSTGADIRSVCTEAGMYAIRARRKTVTEKDFLDAVNKVIKGYQKFSATPKYMVYN

SEQ ID NO: 76224 - protein, 347 aa, Arabidopsis thaliana
  peptide (1)..(347): Ceres Seq. ID no. 7107128
  misc_feature: Pfam Name: AAA Pfam Description: ATPase family associated with various cellular activities (AAA)
  misc_feature (1)..(347): Homolog of NCBI NO: 6652878 NR Description: 26S proteasome AAA-ATPase subunit RPT1a
  misc_feature (1)..(347): Homolog of NCBI NO: 15220930 NR Description: 26S proteasome AAA-ATPase subunit RPT1a; protein At1g53750.1, supported by cDNA: 36419., supported by cDNA: supported by cDNA: gi_6652877 [Arabidopsis thaliana] (26S
  misc_feature (1)..(347): Homolog of NCBI NO: 28558165 NR Description: 26S protease regulatory subunit 7 (26S proteasome
  misc_feature (1)..(347): Homolog of NCBI NO: 2492519 NR Description: 26S protease regulatory subunit 7 (26S proteasome
  misc_feature (1)..(347): Homolog of NCBI NO: 3914449 NR Description: 26S protease regulatory subunit 7 (26S proteasome
  misc_feature (1)..(346): Homolog of NCBI NO: 15220933 NR Description: 26S proteasome ATPase subunit, putative; protein
  misc_feature (1)..(346): Homolog of NCBI NO: 25289951 NR Description: hypothetical protein T18A20.2 [imported] - thaliana >gi|6056389|gb|AAF02853.1|AC009324_2 Putative 26S
  misc_feature (1)..(347): Homolog of NCBI NO: 28829138 NR Description: similar to Oryza sativa (Rice). 26S proteasome
  misc_feature (1)..(347): Homolog of NCBI NO: 20532410 NR Description: 26S protease regulatory subunit 7 (MSS1 protein) unnamed protein product [Mus musculus] proteasome (prosome, macropain) 26S subunit, ATPase 2 [Mus
  misc_feature (1)..(347): Homolog of NCBI NO: 33859604 NR Description: proteasome (prosome, macropain) 26S subunit,
MQEEQPLQVARCTKIISPNTEDAKYVINVKQIAKFVVGLGDKVSPTDIEEGMRVGVDRNKYQIQIPLPPKIDPSVTMMTVEEKPDVTYNDVGGCKEQIEKMREVVELPMLHPEKFVKLGIDPPKGVLCYGPPGTGKTLLARAVANRTDACFIRVIGSELVQKYVGEGARMVRELFQMARSKKACIVFFDEVDAIGGARFDDGVGGDNEVQRTMLEIVNQLDGFDARGNIKVLMATNRPDTLDPALLRSGRLDRKVEFGLPDLESRTQIFKIHTRTMNCERDIRFELLARLCPNSTGADIRSVCTEAGMYAIRARRKTVTEKDFLDAVNKVIKGYQKFSATPKYMVYN

SEQ ID NO: 76225 - DNA, 1373 bp, Arabidopsis thaliana
  misc_feature (1)..(1373): Ceres Seq. ID no. 7107165
  misc_feature: MA Experiment ID: 108434 Result: Down-regulated in Transcription
  misc_feature: MA Experiment 108434 PARAMETER Experiment Name: At_Root_Tips_cDNA_P Parameter: Tissue Value: Root Tips
  misc_feature: MA Experiment ID: 108461 Result: Up-regulated in Transcription
  misc_feature: MA Experiment 108461 PARAMETER Experiment Name: At_Germinating_Seeds_cDNA_P Parameter: Age (day) Value: 1 vs. 0
  misc_feature: MA Experiment 108461 PARAMETER Experiment Name: At_Germinating_Seeds_cDNA_P Parameter: Tissue Value: Germinating Seeds
  misc_feature: MA Experiment ID: 108462 Result: Up-regulated in Transcription
  misc_feature: MA Experiment 108462 PARAMETER Experiment Name: At_Germinating_Seeds_cDNA_P Parameter: Age (day) Value: 2 vs. 0
  misc_feature: MA Experiment 108462 PARAMETER Experiment Name: At_Germinating_Seeds_cDNA_P Parameter: Tissue Value: Germinating Seeds
  misc_feature: MA Experiment ID: 108464 Result: Up-regulated in Transcription
  misc_feature: MA Experiment 108464 PARAMETER Experiment Name: At_Germinating_Seeds_cDNA_P Parameter: Age (day) Value: 4 vs. 0
  misc_feature: MA Experiment 108464 PARAMETER Experiment Name: At_Germinating_Seeds_cDNA_P Parameter: Tissue Value: Germinating Seeds
  misc_feature: MA Experiment ID: 108577 Result: Up-regulated in Transcription
  misc_feature: MA Experiment 108577 PARAMETER Experiment Name: At_42deg_Heat_cDNA_P Parameter: Temperature (deg C) Value: 42 vs. 22
  misc_feature: MA Experiment 108577 PARAMETER Experiment Name: At_42deg_Heat_cDNA_P Parameter: Timepoint (hr) Value: 6
  misc_feature: MA Experiment 108577 PARAMETER Experiment Name: At_42deg_Heat_cDNA_P Parameter: Tissue Value: Aerial
  misc_feature: MA Experiment ID: 108595 Result: Down-regulated in Transcription
  misc_feature: MA Experiment 108595 PARAMETER Experiment Name: At_Ler-pi_Ovule_cDNA_P Parameter: Plant Line Value: null
  misc_feature: MA Experiment ID: 20000072 Result: Down-regulated in Transcription
  misc_feature: MA Experiment 20000072 PARAMETER Experiment Name: At_100uM_ABA_Mutants_cDNA_P Parameter: Plant Line Value: CS8105
  misc_feature: MA Experiment 20000072 PARAMETER Experiment Name: At_100uM_ABA_Mutants_cDNA_P Parameter: Timepoint (hr) Value: 6
  misc_feature: MA Experiment 20000072 PARAMETER Experiment Name: At_100uM_ABA_Mutants_cDNA_P Parameter: Tissue Value: Aerial
  misc_feature: MA Experiment 20000072 PARAMETER Experiment Name: At_100uM_ABA_Mutants_cDNA_P Parameter: Treatment Value: 100uM ABA vs. No Treatment
  misc_feature: MA Experiment ID: 20000087 Result: Down-regulated in Transcription
  misc_feature: MA Experiment 20000087 PARAMETER Experiment Name: At_100uM_ABA_Mutants_cDNA_P Parameter: Plant Line Value: WS
  misc_feature: MA Experiment 20000087 PARAMETER Experiment Name: At_100uM_ABA_Mutants_cDNA_P Parameter: Timepoint (hr) Value: 6
  misc_feature: MA Experiment 20000087 PARAMETER Experiment Name: At_100uM_ABA_Mutants_cDNA_P Parameter: Tissue Value: Aerial
  misc_feature: MA Experiment 20000087 PARAMETER Experiment Name: At_100uM_ABA_Mutants_cDNA_P Parameter: Treatment Value: 100uM ABA vs. No Treatment
  misc_feature: MA Experiment ID: 20000306 Result: Up-regulated in Transcription
  misc_feature: MA Experiment 20000306 PARAMETER Experiment Name: At_Germinating_Seeds_Sub_P Parameter: Age (hr) Value: 6 vs. 0
  misc_feature: MA Experiment 20000306 PARAMETER Experiment Name: At_Germinating_Seeds_Sub_P Parameter: Organism Value: A. thaliana
  misc_feature: MA Experiment 20000306 PARAMETER Experiment Name: At_Germinating_Seeds_Sub_P Parameter: Plant Line Value: WS
  misc_feature: MA Experiment 20000306 PARAMETER Experiment Name: At_Germinating_Seeds_Sub_P Parameter: Tissue Value: Germinating Seeds
  misc_feature: MA Experiment ID: 20000307 Result: Up-regulated in Transcription
  misc_feature: MA Experiment 20000307 PARAMETER Experiment Name: At_Germinating_Seeds_Sub_P Parameter: Age (hr) Value: 24 vs. 0
  misc_feature: MA Experiment 20000307 PARAMETER Experiment Name: At_Germinating_Seeds_Sub_P Parameter: Organism Value: A. thaliana
  misc_feature: MA Experiment 20000307 PARAMETER Experiment Name: At_Germinating_Seeds_Sub_P Parameter: Plant Line Value: WS
  misc_feature: MA Experiment 20000307 PARAMETER Experiment Name: At_Germinating_Seeds_Sub_P Parameter: Tissue Value: Germinating Seeds
  misc_feature: MA Experiment ID: 20000440 Result: Down-regulated in Transcription
  misc_feature: MA Experiment 20000440 PARAMETER Experiment Name: At_Closed-Flower__Sub_P Parameter: Tissue Value: Closed Flower vs. Whole Plant
ccgacccacgcgtccgctcctctaaacttttcttcactctcttgtctcttcaaacttcggttactccgttttagtcgacaacaatggcctctgtttcaaggaggttactgaggagagagacgatcccctgtttcagccacaccgtgaggaaactcttctccaccgttggatctccttcttttgctcagagactcagagatctccccaaagacttcccctctaccaacgccaaacgtgacgcctctctgcttattgggaaaacgcctcttgtgttcctcaacaaagtcactgaaggttgtgaagcgtatgttgcagccaaacaagaacatttccagccaacttgtagcattaaagacagaccagctatagccatgattgcagatgcagagaagaaaaaactaatcatccctggaaaaacaacactgatagagcctacttcaggaaacatgggaatcagtttggctttcatggctgctatgaaagggtacaggattataatgacgatgccttcgtacactagcttggagaggagagtcacgatgagatcctttggtgctgagcttgttctcactgatccagccaaaggaatgggtggaactgttaagaaagcttatgacctccttgatagtactcctgatgctttcatgtgtcaacagtttgctaatcctgcaaacactcagattcattttgatacaactggtcctgagatttgggaagatacacttggaaatgttgatatatttgtgatgggaattggcagtggaggcacagtctctggtgttggccgataccttaaatctaaaaaccccaatgtcaagatatatggagtggagcctgctgaaagcaacatactcaacggtggcaaaccaggtccacatgctatcacaggcaatggtgttggattcaaaccagaaatcttggatatggatgttatggagagtgttcttgaggttagtagtgaggatgctataaagatggctagagaattggcattgaaagaaggtctcatggttgggatatcgtcgggagctaacaccgtggcagcaattagactggcgaaaatgccagagaataaaggcaaactcattgtgacaattcatgcgagcttcggagaaagatatctgtcgtctgttctgtttgatgagctgaggaaagaagcagaggagatgaagccagtttcagtggattgatgaaggaagactgacactttaccaaaaatctcgggagcaaaagattataaaaagaaagatgtaagagtaataagtttgtgtttatattgttctattgttgatgtataatataatcacagtattgttgatgttgatcttggatattgaagatccaactaaataaagttcatcattttctgtttc

SEQ ID NO: 76226 - protein, 368 aa, Arabidopsis thaliana; identical to SEQ ID NO: 22215
  peptide (1)..(368): Ceres Seq. ID no. 7107166
  misc_feature (53)..(342): Pfam Name: Pyridoxal-phosphate dependent enzyme Pfam Description: Pyridoxal-phosphate dependent enzyme
  misc_feature (1)..(368): Homolog of NCBI NO: 15233111 NR Description: cysteine synthase AtcysC1; protein id: supported by cDNA: 32851., supported by cDNA: gi_20260389, by cDNA: gi_4996615 [Arabidopsis thaliana]
  misc_feature (31)..(368): Homolog of NCBI NO: 30840956 NR Description: beta-cyanoalanine synthase [Betula pendula]
  misc_feature (22)..(368): Homolog of NCBI NO: 11559260 NR Description: beta-cyanoalanine synthase [Solanum tuberosum]
  misc_feature (45)..(368): Homolog of NCBI NO: 11995005 NR Description: beta-cyanoalanine synthase like protein [Solanum
  misc_feature (1)..(368): Homolog of NCBI NO: 1071913 NR Description: cysteine synthase (EC 4.2.99.8) C precursor, - spinach >gi|1066153|dbj|BAA07177.1| cysteine synthase [Spinacia
  misc_feature (25)..(368): Homolog of NCBI NO: 10241630 NR Description: cysteine synthase [Oryza sativa (indica
  misc_feature (25)..(368): Homolog of NCBI NO: 38346461 NR Description: OSJNBa0019G23.9 [Oryza sativa (japonica
  misc_feature (41)..(364): Homolog of NCBI NO: 303902 NR Description: cysteine synthase [Spinacia oleracea]
  misc_feature (41)..(364): Homolog of NCBI NO: 12644209 NR Description: CYSTEINE SYNTHASE, CHLOROPLAST PRECURSOR
  misc_feature (41)..(364): Homolog of NCBI NO: 421795 NR Description: cysteine synthase (EC 4.2.99.8) B precursor, - spinach >gi|312944|emb|CAA47329.1| cysteine synthase [Spinacia

SEQ ID NO: 76227 - protein, 272 aa, Arabidopsis thaliana; identical to SEQ ID NO: 22216
  peptide (1)..(272): Ceres Seq. ID no. 7107167
  misc_feature (1)..(246): Pfam Name: Pyridoxal-phosphate dependent enzyme Pfam Description: Pyridoxal-phosphate dependent enzyme
  misc_feature (1)..(272): Homolog of NCBI NO: 15233111 NR Description: cysteine synthase AtcysC1; protein id: supported by cDNA: 32851., supported by cDNA: gi_20260389, by cDNA: gi_4996615 [Arabidopsis thaliana]
  misc_feature (1)..(272): Homolog of NCBI NO: 30840956 NR Description: beta-cyanoalanine synthase [Betula pendula]
  misc_feature (1)..(272): Homolog of NCBI NO: 11559260 NR Description: beta-cyanoalanine synthase [Solanum tuberosum]
  misc_feature (1)..(272): Homolog of NCBI NO: 11995005 NR Description: beta-cyanoalanine synthase like protein [Solanum
  misc_feature (1)..(272): Homolog of NCBI NO: 1071913 NR Description: cysteine synthase (EC 4.2.99.8) C precursor, - spinach >gi|1066153|dbj|BAA07177.1| cysteine synthase [Spinacia
  misc_feature (1)..(272): Homolog of NCBI NO: 10241630 NR Description: cysteine synthase [Oryza sativa (indica
  misc_feature (1)..(272): Homolog of NCBI NO: 38346461 NR Description: OSJNBa0019G23.9 [Oryza sativa (japonica
  misc_feature (1)..(268): Homolog of NCBI NO: 303902 NR Description: cysteine synthase [Spinacia oleracea]
  misc_feature (1)..(268): Homolog of NCBI NO: 12644209 NR Description: CYSTEINE SYNTHASE, CHLOROPLAST PRECURSOR
  misc_feature (1)..(268): Homolog of NCBI NO: 421795 NR Description: cysteine synthase (EC 4.2.99.8) B precursor, - spinach >gi|312944|emb|CAA47329.1| cysteine synthase [Spinacia

SEQ ID NO: 76228 - protein, 247 aa, Arabidopsis thaliana; identical to SEQ ID NO: 22217
  peptide (1)..(247): Ceres Seq. ID no. 7107168
  misc_feature (1)..(221): Pfam Name: Pyridoxal-phosphate dependent enzyme Pfam Description: Pyridoxal-phosphate dependent enzyme
  misc_feature (1)..(247): Homolog of NCBI NO: 15233111 NR Description: cysteine synthase AtcysC1; protein id: supported by cDNA: 32851., supported by cDNA: gi_20260389, by cDNA: gi_4996615 [Arabidopsis thaliana]
  misc_feature (1)..(247): Homolog of NCBI NO: 30840956 NR Description: beta-cyanoalanine synthase [Betula pendula]
  misc_feature (1)..(247): Homolog of NCBI NO: 11559260 NR Description: beta-cyanoalanine synthase [Solanum tuberosum]
  misc_feature (1)..(247): Homolog of NCBI NO: 11995005 NR Description: beta-cyanoalanine synthase like protein [Solanum
  misc_feature (1)..(247): Homolog of NCBI NO: 1071913 NR Description: cysteine synthase (EC 4.2.99.8) C precursor, - spinach >gi|1066153|dbj|BAA07177.1| cysteine synthase [Spinacia
  misc_feature (1)..(247): Homolog of NCBI NO: 10241630 NR Description: cysteine synthase [Oryza sativa (indica
  misc_feature (1)..(247): Homolog of NCBI NO: 38346461 NR Description: OSJNBa0019G23.9 [Oryza sativa (japonica
  misc_feature (1)..(243): Homolog of NCBI NO: 303902 NR Description: cysteine synthase [Spinacia oleracea]
  misc_feature (1)..(243): Homolog of NCBI NO: 12644209 NR Description: CYSTEINE SYNTHASE, CHLOROPLAST PRECURSOR
  misc_feature (1)..(243): Homolog of NCBI NO: 421795 NR Description: cysteine synthase (EC 4.2.99.8) B precursor, - spinach >gi|312944|emb|CAA47329.1| cysteine synthase [Spinacia

SEQ ID NO: 76229 - DNA, 1940 bp, Arabidopsis thaliana
  misc_feature (1)..(1940): Ceres Seq. ID no. 7107228
  misc_feature: MA Experiment ID: 108573 Result: Up-regulated in Transcription
  misc_feature: MA Experiment 108573 PARAMETER Experiment Name: At_Drought_cDNA_P Parameter: Timepoint (hr) Value: 6
  misc_feature: MA Experiment 108573 PARAMETER Experiment Name: At_Drought_cDNA_P Parameter: Tissue Value: Aerial
  misc_feature: MA Experiment 108573 PARAMETER Experiment Name: At_Drought_cDNA_P Parameter: Treatment Value: Drought vs. No Drought
  misc_feature: MA Experiment ID: 20000144 Result: Down-regulated in Transcription
  misc_feature: MA Experiment 20000144 PARAMETER Experiment Name: At_42deg_Heat_cDNA_P Parameter: Temperature (deg C) Value: 42 vs. 22
  misc_feature: MA Experiment 20000144 PARAMETER Experiment Name: At_42deg_Heat_cDNA_P Parameter: Timepoint (hr) Value: 1
  misc_feature: MA Experiment 20000144 PARAMETER Experiment Name: At_42deg_Heat_cDNA_P Parameter: Tissue Value: Aerial
  misc_feature: MA Experiment ID: 20000184 Result: Down-regulated in Transcription
  misc_feature: MA Experiment 20000184 PARAMETER Experiment Name: At_Shoots__P Parameter: Age (day) Value: 7
  misc_feature: MA Experiment 20000184 PARAMETER Experiment Name: At_Shoots__P Parameter: Tissue Value: Shoots vs. Whole Plant
  misc_feature: MA Experiment ID: 20000224 Result: Up-regulated in Transcription
  misc_feature: MA Experiment ID: 20000286 Result: Up-regulated in Transcription
  misc_feature: MA Experiment 20000286 PARAMETER Experiment Name: At_Open_Flower_P Parameter: Age (day) Value: 21
  misc_feature: MA Experiment 20000286 PARAMETER Experiment Name: At_Open_Flower_P Parameter: Plant Line Value: WS
  misc_feature: MA Experiment 20000286 PARAMETER Experiment Name: At_Open_Flower_P Parameter: Tissue Value: Half Open vs. Whole Plant
  misc_feature: MA Experiment ID: 20000794 Result: Up-regulated in Transcription
  misc_feature: MA Experiment 20000794 PARAMETER Experiment Name: At_Petals_P Parameter: Age (day) Value: 23-25 days
  misc_feature: MA Experiment 20000794 PARAMETER Experiment Name: At_Petals_P Parameter: Plant Line Value: WS
  misc_feature: MA Experiment 20000794 PARAMETER Experiment Name: At_Petals_P Parameter: Tissue Value: Petals vs. Whole plant
  misc_feature: MA Experiment ID: 20001247 Result: Up-regulated in Transcription
  misc_feature: MA Experiment 20001247 PARAMETER Experiment Name: At_Far-red-induction_P Parameter: Age (day) Value: 7
  misc_feature: MA Experiment 20001247 PARAMETER Experiment Name: At_Far-red-induction_P Parameter: Light Value: Far-red vs. White
  misc_feature: MA Experiment 20001247 PARAMETER Experiment Name: At_Far-red-induction_P Parameter: Organism Value: A. thaliana
  misc_feature: MA Experiment 20001247 PARAMETER Experiment Name: At_Far-red-induction_P Parameter: Plant Line Value: Columbia
  misc_feature: MA Experiment 20001247 PARAMETER Experiment Name: At_Far-red-induction_P Parameter: Timepoint (hr) Value: 1
  misc_feature: MA Experiment 20001247 PARAMETER Experiment Name: At_Far-red-induction_P Parameter: Tissue Value: Whole Plant
cgtacccatggggaaaagtttctccctttgttagagattttaatttgtctggtttgaactgcattagggtttctagaaggaattatattctcatggatcctcataaaaaggttgcactggagactgagttctttacagaatacggtgaagctagccgataccaaatccaagaagttatagggaaaggaagttacggtgttgtggcatctgcaatcgacacacattcatgcgaaaaggttgccattaagaaaagcaatgatgtgtttgagcacgtctctgatgcaacgcggattctaagagagatcaagcttctcaggttgctccgccatcctgatatagtggagataaagcatgtaatgcttcctccttcacgccgtgatttcagagacatttatgttgttttcgagttgatggaatcagatcttcaccaagttatcaaggcgaacgatgatcttacacctgagcactaccagtttttcctctaccagcttcttcgtggtctgaagttcatacacacagctaatgtgtttcatcgtgatttgaagcctaaaaatattctagccaactctgattgcaagttgaagatttgcgactttgggcttgctcgagtgtcctttaatgatgcaccttcggctatattctggactgactatgttgctaaccgatggtaccgtgcgccagaactttgtggctctttcttctccaaatatactcctgccattgatatatggagcataggatgcatatttgcagaaatgctcactgggaagccattgtttcctgggaagaatgtggtgcaccaattggatattatgactgatttgcttggtactcctcctcccgaagctattgcaaggattcgtaatgaaaaggcgaggagatatctcggcaatatgaggagaaaaccgccagttccattcactcacaaatttcctcatgtagacccattggcccttcgcttactgcaccgtcttcttgcatttgatcccaaagaccgtccctcagctgaagaggcactggcagatccttacttctatggtctggcaaacgttgatcgggaaccatctactcaaccgattccgaaactcgagtttgagtttgaaagaaggaagttaacaaaagaagatgtgagagaattgatctacagagagatattagagtatcatcctcagatgctgcaagaatatcttcgaggtggagaacagactagcttcatgtacccaagtggtgttgatcgctttaagagacaatttgctcatcttgaggaaaattacggtaagggtgagaaaggctcacctcttcaacgccaacacgcttccttgcctagagagcgagtccctgctcctaagaaagagaatggatcacataatcacgatatcgagaacagatccatagcgtctttagtcacgaccctcgaaagccctccaacgtcacaacacgaggggtcagactacaggaatgggacgagccagcagggttacagcgctcgcagcttgctgaaaagtgccagcatcagtgcatctaaatgcattggcatgaaaccaagaaacaagtccgagtacggggaatcaaacaatgatacggttgatgctctgtctcaaaaggtcgcggctctccacacttgacttgtttcagagattgaggattgaaacttgttgctaacagtagacggctgattctacaagtcttgtacacatctctcagagaagacgaagaagaagtctgatcttgatagagatattgagaaacatgactcatgagctatgaacaaaacaacttaacctctaattggtcttcaatttgtccatcaagtcgagttgtattaaaaatggatggagaatataattaaaggagaattgtgttaacccctggatttatgccttacaagtatttgactttatcaggcattataaattatagttaaagtgtgtgtttccttc

SEQ ID NO: 76230 - protein, 540 aa, Arabidopsis thaliana
  peptide (1)..(540): Ceres Seq. ID no. 7107229
  misc_feature (53)..(344): Pfam Name: Protein kinase domain Pfam Description: Protein kinase domain
  misc_feature (10)..(540): Homolog of NCBI NO: 9294059 NR Description: MAP kinase [Arabidopsis thaliana]
  misc_feature (31)..(540): Homolog of NCBI NO: 7106544 NR Description: ATMPK9 [Arabidopsis thaliana]
  misc_feature (31)..(540): Homolog of NCBI NO: 18401750 NR Description: putative MAP kinase; protein id: At3g18040.1,
  misc_feature (12)..(539): Homolog of NCBI NO: 15220976 NR Description: mitogen-activated protein kinase, putative; id: At1g18150.1, supported by cDNA: gi_7106541 [Arabidopsis >gi|9719729|gb|AAF97831.1|AC034107_14 Strong similarity
  misc_feature (16)..(539): Homolog of NCBI NO: 25406284 NR Description: probable MAP kinase F25P22.9 [imported] -
  misc_feature (42)..(540): Homolog of NCBI NO: 5815410 NR Description: blast and wounding induced mitogen-activated
  misc_feature (42)..(540): Homolog of NCBI NO: 6689924 NR Description: MAP kinase homolog [Oryza sativa]
  misc_feature (10)..(539): Homolog of NCBI NO: 38174819 NR Description: putative MAP kinase [Hordeum vulgare subsp.
  misc_feature (12)..(539): Homolog of NCBI NO: 8671782 NR Description: T10O22.12 [Arabidopsis thaliana]
  misc_feature (12)..(480): Homolog of NCBI NO: 7106542 NR Description: ATMPK8 [Arabidopsis thaliana]
YPWGKVSPFVRDFNLSGLNCIRVSRRNYILMDPHKKVALETEFFTEYGEASRYQIQEVIGKGSYGVVASAIDTHSCEKVAIKKSNDVFEHVSDATRILREIKLLRLLRHPDIVEIKHVMLPPSRRDFRDIYVVFELMESDLHQVIKANDDLTPEHYQFFLYQLLRGLKFIHTANVFHRDLKPKNILANSDCKLKICDFGLARVSFNDAPSAIFWTDYVANRWYRAPELCGSFFSKYTPAIDIWSIGCIFAEMLTGKPLFPGKNVVHQLDIMTDLLGTPPPEAIARIRNEKARRYLGNMRRKPPVPFTHKFPHVDPLALRLLHRLLAFDPKDRPSAEEALADPYFYGLANVDREPSTQPIPKLEFEFERRKLTKEDVRELIYREILEYHPQMLQEYLRGGEQTSFMYPSGVDRFKRQFAHLEENYGKGEKGSPLQRQHASLPRERVPAPKKENGSHNHDIENRSIASLVTTLESPPTSQHEGSDYRNGTSQQGYSARSLLKSASISASKCIGMKPRNKSEYGESNNDTVDALSQKVAALHT

SEQ ID NO: 76231 - protein, 510 aa, Arabidopsis thaliana
  peptide (1)..(510): Ceres Seq. ID no. 7107230
  misc_feature (23)..(314): Pfam Name: Protein kinase domain Pfam Description: Protein kinase domain
  misc_feature (1)..(510): Homolog of NCBI NO: 9294059 NR Description: MAP kinase [Arabidopsis thaliana]
  misc_feature (1)..(510): Homolog of NCBI NO: 7106544 NR Description: ATMPK9 [Arabidopsis thaliana]
  misc_feature (1)..(510): Homolog of NCBI NO: 18401750 NR Description: putative MAP kinase; protein id: At3g18040.1,
  misc_feature (1)..(509): Homolog of NCBI NO: 15220976 NR Description: mitogen-activated protein kinase, putative; id: At1g18150.1, supported by cDNA: gi_7106541 [Arabidopsis >gi|9719729|gb|AAF97831.1|AC034107_14 Strong similarity
  misc_feature (1)..(509): Homolog of NCBI NO: 25406284 NR Description: probable MAP kinase F25P22.9 [imported] -
  misc_feature (12)..(510): Homolog of NCBI NO: 5815410 NR Description: blast and wounding induced mitogen-activated
  misc_feature (12)..(510): Homolog of NCBI NO: 6689924 NR Description: MAP kinase homolog [Oryza sativa]
  misc_feature (1)..(509): Homolog of NCBI NO: 38174819 NR Description: putative MAP kinase [Hordeum vulgare subsp.
  misc_feature (1)..(509): Homolog of NCBI NO: 8671782 NR Description: T10O22.12 [Arabidopsis thaliana]
  misc_feature (1)..(450): Homolog of NCBI NO: 7106542 NR Description: ATMPK8 [Arabidopsis thaliana]
MDPHKKVALETEFFTEYGEASRYQIQEVIGKGSYGVVASAIDTHSCEKVAIKKSNDVFEHVSDATRILREIKLLRLLRHPDIVEIKHVMLPPSRRDFRDIYVVFELMESDLHQVIKANDDLTPEHYQFFLYQLLRGLKFIHTANVFHRDLKPKNILANSDCKLKICDFGLARVSFNDAPSAIFWTDYVANRWYRAPELCGSFFSKYTPAIDIWSIGCIFAEMLTGKPLFPGKNVVHQLDIMTDLLGTPPPEAIARIRNEKARRYLGNMRRKPPVPFTHKFPHVDPLALRLLHRLLAFDPKDRPSAEEALADPYFYGLANVDREPSTQPIPKLEFEFERRKLTKEDVRELIYREILEYHPQMLQEYLRGGEQTSFMYPSGVDRFKRQFAHLEENYGKGEKGSPLQRQHASLPRERVPAPKKENGSHNHDIENRSIASLVTTLESPPTSQHEGSDYRNGTSQQGYSARSLLKSASISASKCIGMKPRNKSEYGESNNDTVDALSQKVAALHT

SEQ ID NO: 76232 - protein, 422 aa, Arabidopsis thaliana
  peptide (1)..(422): Ceres Seq. ID no. 7107231
  misc_feature (1)..(226): Pfam Name: Protein kinase domain Pfam Description: Protein kinase domain
  misc_feature (1)..(422): Homolog of NCBI NO: 9294059 NR Description: MAP kinase [Arabidopsis thaliana]
  misc_feature (1)..(422): Homolog of NCBI NO: 7106544 NR Description: ATMPK9 [Arabidopsis thaliana]
  misc_feature (1)..(422): Homolog of NCBI NO: 18401750 NR Description: putative MAP kinase; protein id: At3g18040.1,
  misc_feature (1)..(421): Homolog of NCBI NO: 15220976 NR Description: mitogen-activated protein kinase, putative; id: At1g18150.1, supported by cDNA: gi_7106541 [Arabidopsis >gi|9719729|gb|AAF97831.1|AC034107_14 Strong similarity
  misc_feature (1)..(421): Homolog of NCBI NO: 25406284 NR Description: probable MAP kinase F25P22.9 [imported] -
  misc_feature (1)..(422): Homolog of NCBI NO: 5815410 NR Description: blast and wounding induced mitogen-activated
  misc_feature (1)..(422): Homolog of NCBI NO: 6689924 NR Description: MAP kinase homolog [Oryza sativa]
  misc_feature (1)..(421): Homolog of NCBI NO: 38174819 NR Description: putative MAP kinase [Hordeum vulgare subsp.
  misc_feature (1)..(421): Homolog of NCBI NO: 8671782 NR Description: T10O22.12 [Arabidopsis thaliana]
  misc_feature (1)..(362): Homolog of NCBI NO: 7106542 NR Description: ATMPK8 [Arabidopsis thaliana]
MLPPSRRDFRDIYVVFELMESDLHQVIKANDDLTPEHYQFFLYQLLRGLKFIHTANVFHRDLKPKNILANSDCKLKICDFGLARVSFNDAPSAIFWTDYVANRWYRAPELCGSFFSKYTPAIDIWSIGCIFAEMLTGKPLFPGKNVVHQLDIMTDLLGTPPPEAIARIRNEKARRYLGNMRRKPPVPFTHKFPHVDPLALRLLHRLLAFDPKDRPSAEEALADPYFYGLANVDREPSTQPIPKLEFEFERRKLTKEDVRELIYREILEYHPQMLQEYLRGGEQTSFMYPSGVDRFKRQFAHLEENYGKGEKGSPLQRQHASLPRERVPAPKKENGSHNHDIENRSIASLVTTLESPPTSQHEGSDYRNGTSQQGYSARSLLKSASISASKCIGMKPRNKSEYGESNNDTVDALSQKVAALHT

SEQ ID NO: 76233 - DNA, 626 bp, Arabidopsis thaliana
  misc_feature (1)..(626): Ceres Seq. ID no. 7107240
  misc_feature: MA Experiment ID: 108434 Result: Down-regulated in Transcription
  misc_feature: MA Experiment 108434 PARAMETER Experiment Name: At_Root_Tips_cDNA_P Parameter: Tissue Value: Root Tips
  misc_feature: MA Experiment ID: 108462 Result: Down-regulated in Transcription
  misc_feature: MA Experiment 108462 PARAMETER Experiment Name: At_Germinating_Seeds_cDNA_P Parameter: Age (day) Value: 2 vs. 0
  misc_feature: MA Experiment 108462 PARAMETER Experiment Name: At_Germinating_Seeds_cDNA_P Parameter: Tissue Value: Germinating Seeds
  misc_feature: MA Experiment ID: 108463 Result: Down-regulated in Transcription
  misc_feature: MA Experiment 108463 PARAMETER Experiment Name: At_Germinating_Seeds_cDNA_P Parameter: Age (day) Value: 3 vs. 0
  misc_feature: MA Experiment 108463 PARAMETER Experiment Name: At_Germinating_Seeds_cDNA_P Parameter: Tissue Value: Germinating Seeds
  misc_feature: MA Experiment ID: 108561 Result: Up-regulated in Transcription
  misc_feature: MA Experiment 108561 PARAMETER Experiment Name: At_100uM_ABA_cDNA_P Parameter: Timepoint (hr) Value: 6
  misc_feature: MA Experiment 108561 PARAMETER Experiment Name: At_100uM_ABA_cDNA_P Parameter: Tissue Value: Aerial
  misc_feature: MA Experiment 108561 PARAMETER Experiment Name: At_100uM_ABA_cDNA_P Parameter: Treatment Value: 100uM ABA vs. No Treatment
  misc_feature: MA Experiment ID: 108576 Result: Up-regulated in Transcription
  misc_feature: MA Experiment 108576 PARAMETER Experiment Name: At_42deg_Heat_cDNA_P Parameter: Temperature (deg C) Value: 42 vs. 22
  misc_feature: MA Experiment 108576 PARAMETER Experiment Name: At_42deg_Heat_cDNA_P Parameter: Timepoint (hr) Value: 1
  misc_feature: MA Experiment 108576 PARAMETER Experiment Name: At_42deg_Heat_cDNA_P Parameter: Tissue Value: Aerial
  misc_feature: MA Experiment ID: 108595 Result: Up-regulated in Transcription
  misc_feature: MA Experiment 108595 PARAMETER Experiment Name: At_Ler-pi_Ovule_cDNA_P Parameter: Plant Line Value: null
  misc_feature: MA Experiment ID: 20000069 Result: Up-regulated in Transcription
  misc_feature: MA Experiment 20000069 PARAMETER Experiment Name: At_100uM_ABA_Mutants_cDNA_P Parameter: Plant Line Value: CS23
  misc_feature: MA Experiment 20000069 PARAMETER Experiment Name: At_100uM_ABA_Mutants_cDNA_P Parameter: Timepoint (hr) Value: 6
  misc_feature: MA Experiment 20000069 PARAMETER Experiment Name: At_100uM_ABA_Mutants_cDNA_P Parameter: Tissue Value: Aerial
  misc_feature: MA Experiment 20000069 PARAMETER Experiment Name: At_100uM_ABA_Mutants_cDNA_P Parameter: Treatment Value: 100uM ABA vs. No Treatment
  misc_feature: MA Experiment ID: 20000072 Result: Up-regulated in Transcription
  misc_feature: MA Experiment 20000072 PARAMETER Experiment Name: At_100uM_ABA_Mutants_cDNA_P Parameter: Plant Line Value: CS8105
  misc_feature: MA Experiment 20000072 PARAMETER Experiment Name: At_100uM_ABA_Mutants_cDNA_P Parameter: Timepoint (hr) Value: 6
  misc_feature: MA Experiment 20000072 PARAMETER Experiment Name: At_100uM_ABA_Mutants_cDNA_P Parameter: Tissue Value: Aerial
  misc_feature: MA Experiment 20000072 PARAMETER Experiment Name: At_100uM_ABA_Mutants_cDNA_P Parameter: Treatment Value: 100uM ABA vs. No Treatment
  misc_feature: MA Experiment ID: 20000093 Result: Up-regulated in Transcription
  misc_feature: MA Experiment 20000093 PARAMETER Experiment Name: At_42deg_Heat_cDNA_P Parameter: Temperature (deg C) Value: 42 vs. 22
  misc_feature: MA Experiment 20000093 PARAMETER Experiment Name: At_42deg_Heat_cDNA_P Parameter: Timepoint (hr) Value: 0.5
  misc_feature: MA Experiment 20000093 PARAMETER Experiment Name: At_42deg_Heat_cDNA_P Parameter: Tissue Value: Aerial
  misc_feature: MA Experiment ID: 20000111 Result: Up-regulated in Transcription
  misc_feature: MA Experiment 20000111 PARAMETER Experiment Name: At_42deg_Heat_cDNA_P Parameter: Temperature (deg C) Value: 42 vs. 22
  misc_feature: MA Experiment 20000111 PARAMETER Experiment Name: At_42deg_Heat_cDNA_P Parameter: Timepoint (hr) Value: 6
  misc_feature: MA Experiment 20000111 PARAMETER Experiment Name: At_42deg_Heat_cDNA_P Parameter: Tissue Value: Aerial
  misc_feature: MA Experiment ID: 20000112 Result: Up-regulated in Transcription
  misc_feature: MA Experiment 20000112 PARAMETER Experiment Name: At_42deg_Heat_cDNA_P Parameter: Temperature (deg C) Value: 42 vs. 22
  misc_feature: MA Experiment 20000112 PARAMETER Experiment Name: At_42deg_Heat_cDNA_P Parameter: Timepoint (hr) Value: 2
  misc_feature: MA Experiment 20000112 PARAMETER Experiment Name: At_42deg_Heat_cDNA_P Parameter: Tissue Value: Aerial
  misc_feature: MA Experiment ID: 20000113 Result: Up-regulated in Transcription
  misc_feature: MA Experiment 20000113 PARAMETER Experiment Name: At_42deg_Heat_cDNA_P Parameter: Temperature (deg C) Value: 42 vs. 22
  misc_feature: MA Experiment 20000113 PARAMETER Experiment Name: At_42deg_Heat_cDNA_P Parameter: Timepoint (hr) Value: 8
  misc_feature: MA Experiment 20000113 PARAMETER Experiment Name: At_42deg_Heat_cDNA_P Parameter: Tissue Value: Aerial
  misc_feature: MA Experiment ID: 20000144 Result: Up-regulated in Transcription
  misc_feature: MA Experiment 20000144 PARAMETER Experiment Name: At_42deg_Heat_cDNA_P Parameter: Temperature (deg C) Value: 42 vs. 22
  misc_feature: MA Experiment 20000144 PARAMETER Experiment Name: At_42deg_Heat_cDNA_P Parameter: Timepoint (hr) Value: 1
  misc_feature: MA Experiment 20000144 PARAMETER Experiment Name: At_42deg_Heat_cDNA_P Parameter: Tissue Value: Aerial
  misc_feature: MA Experiment ID: 20000314 Result: Up-regulated in Transcription
  misc_feature: MA Experiment 20000314 PARAMETER Experiment Name: At_14day_Shoots-Roots_Sub_P Parameter: Age (day) Value: 14
  misc_feature: MA Experiment 20000314 PARAMETER Experiment Name: At_14day_Shoots-Roots_Sub_P Parameter: Organism Value: A. thaliana
  misc_feature: MA Experiment 20000314 PARAMETER Experiment Name: At_14day_Shoots-Roots_Sub_P Parameter: Plant Line Value: WS
  misc_feature: MA Experiment 20000314 PARAMETER Experiment Name: At_14day_Shoots-Roots_Sub_P Parameter: Tissue Value: Roots vs. Whole Plant
  misc_feature: MA Experiment ID: 20000327 Result: Up-regulated in Transcription
  misc_feature: MA Experiment 20000327 PARAMETER Experiment Name: At_42deg_Heat_Sub_P Parameter: Age (day) Value: 14
  misc_feature: MA Experiment 20000327 PARAMETER Experiment Name: At_42deg_Heat_Sub_P Parameter: Organism Value: A. thaliana
  misc_feature: MA Experiment 20000327 PARAMETER Experiment Name: At_42deg_Heat_Sub_P Parameter: Plant Line Value: WS
  misc_feature: MA Experiment 20000327 PARAMETER Experiment Name: At_42deg_Heat_Sub_P Parameter: Temperature (deg C) Value: 42 vs. 22
  misc_feature: MA Experiment 20000327 PARAMETER Experiment Name: At_42deg_Heat_Sub_P Parameter: Timepoint (hr) Value: 1
  misc_feature: MA Experiment 20000327 PARAMETER Experiment Name: At_42deg_Heat_Sub_P Parameter: Tissue Value: Aerial
  misc_feature: MA Experiment ID: 20000328 Result: Up-regulated in Transcription
  misc_feature: MA Experiment 20000328 PARAMETER Experiment Name: At_42deg_Heat_Sub_P Parameter: Age (day) Value: 14
  misc_feature: MA Experiment 20000328 PARAMETER Experiment Name: At_42deg_Heat_Sub_P Parameter: Organism Value: A. thaliana
  misc_feature: MA Experiment 20000328 PARAMETER Experiment Name: At_42deg_Heat_Sub_P Parameter: Plant Line Value: WS
  misc_feature: MA Experiment 20000328 PARAMETER Experiment Name: At_42deg_Heat_Sub_P Parameter: Temperature (deg C) Value: 42 vs. 22
  misc_feature: MA Experiment 20000328 PARAMETER Experiment Name: At_42deg_Heat_Sub_P Parameter: Timepoint (hr) Value: 6
  misc_feature: MA Experiment 20000328 PARAMETER Experiment Name: At_42deg_Heat_Sub_P Parameter: Tissue Value: Aerial
  misc_feature: MA Experiment ID: 20000329 Result: Down-regulated in Transcription
  misc_feature: MA Experiment 20000329 PARAMETER Experiment Name: At_4deg_Cold_Sub_P Parameter: Age (day) Value: 14
  misc_feature: MA Experiment 20000329 PARAMETER Experiment Name: At_4deg_Cold_Sub_P Parameter: Organism Value: A. thaliana
  misc_feature: MA Experiment 20000329 PARAMETER Experiment Name: At_4deg_Cold_Sub_P Parameter: Plant Line Value: WS
  misc_feature: MA Experiment 20000329 PARAMETER Experiment Name: At_4deg_Cold_Sub_P Parameter: Temperature (deg C) Value: 4 vs. 22
  misc_feature: MA Experiment 20000329 PARAMETER Experiment Name: At_4deg_Cold_Sub_P Parameter: Timepoint (hr) Value: 6
  misc_feature: MA Experiment 20000329 PARAMETER Experiment Name: At_4deg_Cold_Sub_P Parameter: Tissue Value: Aerial
  misc_feature: MA Experiment ID: 20000347 Result: Up-regulated in Transcription
  misc_feature: MA Experiment 20000347 PARAMETER Experiment Name: At_2mM_SA_Sub_P Parameter: Age (day) Value: 14
  misc_feature: MA Experiment 20000347 PARAMETER Experiment Name: At_2mM_SA_Sub_P Parameter: Organism Value: A. thaliana
  misc_feature: MA Experiment 20000347 PARAMETER Experiment Name: At_2mM_SA_Sub_P Parameter: Plant Line Value: WS
  misc_feature: MA Experiment 20000347 PARAMETER Experiment Name: At_2mM_SA_Sub_P Parameter: Timepoint (hr) Value: 6
  misc_feature: MA Experiment 20000347 PARAMETER Experiment Name: At_2mM_SA_Sub_P Parameter: Tissue Value: Aerial
  misc_feature: MA Experiment 20000347 PARAMETER Experiment Name: At_2mM_SA_Sub_P Parameter: Treatment Value: 2mM SA vs. No Treatment
  misc_feature: MA Experiment ID: 20000355 Result: Up-regulated in Transcription
  misc_feature: MA Experiment 20000355 PARAMETER Experiment Name: At_Siliques_Sub_P Parameter: Age (day) Value: 21
  misc_feature: MA Experiment 20000355 PARAMETER Experiment Name: At_Siliques_Sub_P Parameter: Organism Value: A. thaliana
  misc_feature: MA Experiment 20000355 PARAMETER Experiment Name: At_Siliques_Sub_P Parameter: Plant Line Value: WS
  misc_feature: MA Experiment 20000355 PARAMETER Experiment Name: At_Siliques_Sub_P Parameter: Tissue Value: Less Than 5mm Siliques vs. Whole Plant
  misc_feature: MA Experiment ID: 20001807 Result: Down-regulated in Transcription
  misc_feature: MA Experiment 20001807 PARAMETER Experiment Name: At_50mM_NH4NO3_L-to-H_Sub_P Parameter: Timepoint (hr) Value: 6
  misc_feature: MA Experiment 20001807 PARAMETER Experiment Name: At_50mM_NH4NO3_L-to-H_Sub_P Parameter: Tissue Value: Leaf
  misc_feature: MA Experiment 20001807 PARAMETER Experiment Name: At_50mM_NH4NO3_L-to-H_Sub_P Parameter: Treatment Value: 50mM NH4NO3 vs 100mM Mannitol
ccacgcgtccgcaaaactcttctattttcctctgtcttcaaaaccacagagatctcttcatggctccaattactgtcggcgatgttgtaccagacggaactatctctttcttcgatgaaaatgatcagcttcagaccgtctccgttcactctatcgccgccggtaaaaaagtcattctctttggtgttcctggtgctttcactcccacatgcagtatgagccatgtgcctggattcattgggaaagcagaggagctgaagtcaaagggtattgatgagatcatttgctttagtgtgaatgatccatttgtgatgaaggcatggggaaaaacatatccagagaacaagcatgtgaagtttgtagcagatgggtctggagaatacacgcatcttcttggacttgagcttgaccttaaggacaagggttctggtattagttcagggagattcgctttgttgcttgataaccttaaggtgactgtagccaatgttgaatctggtggcgagttcacggtttccagcgcagaggatattctcaaggctctttaagaaactttatcgtttcgcttgttgtattgtgaatctaaactgctgtatgtgaagaagagatttctatagcttgatttc

SEQ ID NO: 76234 - protein, 181 aa, Arabidopsis thaliana
  peptide (1)..(181): Ceres Seq. ID no. 7107241
  misc_feature (25)..(179): Pfam Name: AhpC/TSA family Pfam Description: AhpC/TSA family
  misc_feature (20)..(181): Homolog of NCBI NO: 4704732 NR Description: peroxiredoxin TPx2 [Arabidopsis thaliana]
  misc_feature (20)..(181): Homolog of NCBI NO: 15218876 NR Description: type 2 peroxiredoxin, putative; protein id: supported by cDNA: 10862., supported by cDNA: gi_12083333, by cDNA: gi_4704731 [Arabidopsis thaliana]
  misc_feature (20)..(181): Homolog of NCBI NO: 18406870 NR Description: peroxiredoxin, putative; protein id: At1g60740.1,
  misc_feature (20)..(181): Homolog of NCBI NO: 21553913 NR Description: peroxiredoxin, putative [Arabidopsis thaliana]
  misc_feature (20)..(181): Homolog of NCBI NO: 15218877 NR Description: type 2 peroxiredoxin, putative; protein id: supported by cDNA: 5476., supported by cDNA: gi_12083335,
  misc_feature (20)..(181): Homolog of NCBI NO: 4928472 NR Description: type 2 peroxiredoxin [Brassica rapa subsp.
  misc_feature (20)..(181): Homolog of NCBI NO: 21593881 NR Description: type 2 peroxiredoxin, putative [Arabidopsis
  misc_feature (20)..(181): Homolog of NCBI NO: 3913633 NR Description: Hypothetical protein At1g60740
  misc_feature (20)..(181): Homolog of NCBI NO: 30841938 NR Description: thioredoxin peroxidase 1 [Lycopersicon esculentum]
  misc_feature (20)..(181): Homolog of NCBI NO: 18654477 NR Description: thioredoxin peroxidase [Capsicum annuum]
TRPQNSSIFLCLQNHRDLFMAPITVGDVVPDGTISFFDENDQLQTVSVHSIAAGKKVILFGVPGAFTPTCSMSHVPGFIGKAEELKSKGIDEIICFSVNDPFVMKAWGKTYPENKHVKFVADGSGEYTHLLGLELDLKDKGSGISSGRFALLLDNLKVTVANVESGGEFTVSSAEDILKAL

SEQ ID NO: 76235 - protein, 162 aa, Arabidopsis thaliana
  peptide (1)..(162): Ceres Seq. ID no. 7107242
  misc_feature (6)..(160): Pfam Name: AhpC/TSA family Pfam Description: AhpC/TSA family
  misc_feature (1)..(162): Homolog of NCBI NO: 4704732 NR Description: peroxiredoxin TPx2 [Arabidopsis thaliana]
  misc_feature (1)..(162): Homolog of NCBI NO: 15218876 NR Description: type 2 peroxiredoxin, putative; protein id: supported by cDNA: 10862., supported by cDNA: gi_12083333, by cDNA: gi_4704731 [Arabidopsis thaliana]
  misc_feature (1)..(162): Homolog of NCBI NO: 18406870 NR Description: peroxiredoxin, putative; protein id: At1g60740.1,
  misc_feature (1)..(162): Homolog of NCBI NO: 21553913 NR Description: peroxiredoxin, putative [Arabidopsis thaliana]
  misc_feature (1)..(162): Homolog of NCBI NO: 15218877 NR Description: type 2 peroxiredoxin, putative; protein id: supported by cDNA: 5476., supported by cDNA: gi_12083335,
  misc_feature (1)..(162): Homolog of NCBI NO: 4928472 NR Description: type 2 peroxiredoxin [Brassica rapa subsp.
  misc_feature (1)..(162): Homolog of NCBI NO: 21593881 NR Description: type 2 peroxiredoxin, putative [Arabidopsis
  misc_feature (1)..(162): Homolog of NCBI NO: 3913633 NR Description: Hypothetical protein At1g60740
  misc_feature (1)..(162): Homolog of NCBI NO: 30841938 NR Description: thioredoxin peroxidase 1 [Lycopersicon esculentum]
  misc_feature (1)..(162): Homolog of NCBI NO: 18654477 NR Description: thioredoxin peroxidase [Capsicum annuum]
MAPITVGDVVPDGTISFFDENDQLQTVSVHSIAAGKKVILFGVPGAFTPTCSMSHVPGFIGKAEELKSKGIDEIICFSVNDPFVMKAWGKTYPENKHVKFVADGSGEYTHLLGLELDLKDKGSGISSGRFALLLDNLKVTVANVESGGEFTVSSAEDILKAL

SEQ ID NO: 76236 - protein, 110 aa, Arabidopsis thaliana
  peptide (1)..(110): Ceres Seq. ID no. 7107243
  misc_feature (1)..(108): Pfam Name: AhpC/TSA family Pfam Description: AhpC/TSA family
  misc_feature (1)..(110): Homolog of NCBI NO: 4704732 NR Description: peroxiredoxin TPx2 [Arabidopsis thaliana]
  misc_feature (1)..(110): Homolog of NCBI NO: 15218876 NR Description: type 2 peroxiredoxin, putative; protein id: supported by cDNA: 10862., supported by cDNA: gi_12083333, by cDNA: gi_4704731 [Arabidopsis thaliana]
  misc_feature (1)..(110): Homolog of NCBI NO: 18406870 NR Description: peroxiredoxin, putative; protein id: At1g60740.1,
  misc_feature (1)..(110): Homolog of NCBI NO: 21553913 NR Description: peroxiredoxin, putative [Arabidopsis thaliana]
  misc_feature (1)..(110): Homolog of NCBI NO: 15218877 NR Description: type 2 peroxiredoxin, putative; protein id: supported by cDNA: 5476., supported by cDNA: gi_12083335,
  misc_feature (1)..(110): Homolog of NCBI NO: 4928472 NR Description: type 2 peroxiredoxin [Brassica rapa subsp.
  misc_feature (1)..(110): Homolog of NCBI NO: 21593881 NR Description: type 2 peroxiredoxin, putative [Arabidopsis
  misc_feature (1)..(110): Homolog of NCBI NO: 3913633 NR Description: Hypothetical protein At1g60740
  misc_feature (1)..(110): Homolog of NCBI NO: 30841938 NR Description: thioredoxin peroxidase 1 [Lycopersicon esculentum]
  misc_feature (1)..(110): Homolog of NCBI NO: 18654477 NR Description: thioredoxin peroxidase [Capsicum annuum]
MSHVPGFIGKAEELKSKGIDEIICFSVNDPFVMKAWGKTYPENKHVKFVADGSGEYTHLLGLELDLKDKGSGISSGRFALLLDNLKVTVANVESGGEFTVSSAEDILKAL

SEQ ID NO: 76237 - DNA, 1274 bp, Arabidopsis thaliana
  misc_feature (1)..(1274): Ceres Seq. ID no. 7107266
  misc_feature: MA Experiment ID: 20000171 Result: Up-regulated in Transcription
  misc_feature: MA Experiment 20000171 PARAMETER Experiment Name: At_42deg_Heat_P Parameter: Age (day) Value: 14
  misc_feature: MA Experiment 20000171 PARAMETER Experiment Name: At_42deg_Heat_P Parameter: Organism Value: A. thaliana
  misc_feature: MA Experiment 20000171 PARAMETER Experiment Name: At_42deg_Heat_P Parameter: Plant Line Value: WS
  misc_feature: MA Experiment 20000171 PARAMETER Experiment Name: At_42deg_Heat_P Parameter: Temperature (deg C) Value: 42 vs. 22
  misc_feature: MA Experiment 20000171 PARAMETER Experiment Name: At_42deg_Heat_P Parameter: Timepoint (hr) Value: 1
  misc_feature: MA Experiment 20000171 PARAMETER Experiment Name: At_42deg_Heat_P Parameter: Tissue Value: Aerial
  misc_feature: MA Experiment ID: 20000185 Result: Up-regulated in Transcription
  misc_feature: MA Experiment 20000185 PARAMETER Experiment Name: At_Roots__P Parameter: Age (day) Value: 7 vs. 21
  misc_feature: MA Experiment 20000185 PARAMETER Experiment Name: At_Roots__P Parameter: Organism Value: A. thaliana
  misc_feature: MA Experiment 20000185 PARAMETER Experiment Name: At_Roots__P Parameter: Tissue Value: Roots vs. Whole Plant
  misc_feature: MA Experiment ID: 20000234 Result: Down-regulated in Transcription
  misc_feature: MA Experiment 20000234 PARAMETER Experiment Name: At_Siliques_P Parameter: Age (day) Value: 21
  misc_feature: MA Experiment 20000234 PARAMETER Experiment Name: At_Siliques_P Parameter: Organism Value: A. thaliana
  misc_feature: MA Experiment 20000234 PARAMETER Experiment Name: At_Siliques_P Parameter: Plant Line Value: WS
  misc_feature: MA Experiment 20000234 PARAMETER Experiment Name: At_Siliques_P Parameter: Tissue Value: Less Than 5mm Siliques vs. Whole Plant
  misc_feature: MA Experiment ID: 20000439 Result: Up-regulated in Transcription
  misc_feature: MA Experiment 20000439 PARAMETER Experiment Name: At_Roots__P Parameter: Age (day) Value: 14 vs. 21
  misc_feature: MA Experiment 20000439 PARAMETER Experiment Name: At_Roots__P Parameter: Organism Value: A. thaliana
  misc_feature: MA Experiment 20000439 PARAMETER Experiment Name: At_Roots__P Parameter: Tissue Value: Roots vs. Whole Plant
  misc_feature: MA Experiment ID: 20000495 Result: Up-regulated in Transcription
  misc_feature: MA Experiment 20000495 PARAMETER Experiment Name: At_Guard_Cells_P Parameter: Harvest Date Value: 8/2/2002
  misc_feature: MA Experiment 20000495 PARAMETER Experiment Name: At_Guard_Cells_P Parameter: Organism Value: A. thaliana
  misc_feature: MA Experiment 20000495 PARAMETER Experiment Name: At_Guard_Cells_P Parameter: Tissue Value: Guard Cells vs. Leaves
ccacgcgtccggagtaagggaaccaacatcagctagaatgtgtcacaactgaccagaaccctaataattacttacggcagctctcatcaccaccgacttctcaggttgcaggttcgagtcaagctagagtgaattcaatggtggaacgtgctcggatcgcaaaagtcccattgcctgaagcagctctaaattgccctagatgtgactcaaccaatactaagttctgttacttcaataactatagccttactcaacctcgccatttctgcaaaacatgtcgtcgctattggacacgtggcggttccttgaggaatgttcctgttggaggaggctttaggaggaacaagagaagcaaatccagatcgaaatctacggtcgtggtctcgactgataatactactagtacttcatcacttacttctcgcccaagttactcaaaccctagcaagtttcatagctacggtcaaatcccggagtttaattccaacttgcccatcttgcctcctctccaaagccttggagattacaattcaagcaacactggattagattttggtggaactcaaataagcaacatgataagtggtatgagttctagtggtgggatcttggatgcatggagaatacctccatcacaacaagctcagcaattccctttcttgatcaacactaccggattggtgcaatcttcaaacgcgttatatccattactagaaggcggggttagcgccacgcaaacaagaaatgtgaaggcggaagagaatgatcaggatcggggtagggatggggatggagtgaataacttatcaagaaactttttgggtaatatcaacataaactcaggcaggaacgaggaatacacatcatggggaggtaacagttcttggaccggtttcacctccaacaactcaacaggccatctctcattctaagtactcagcactagctattcttgatgattcttttgttggttggggtgtacattggtgcttgtcatgcgagttattgctgaggaagatcaaaccatgcagctatatccaaaggctaattttgaggctcaaaggaaaggtatggttataaaactatctttttgatcctttaaaagatcttcaaagtgtgagtatgtttattggttggcttctggtgatatttatgttttattagaatttggtcttatatattggctatatatagaggtgtgggtgatatgtatgaattcaagagttgatgttggaaacttttttgtgtgttcattgaataatcatcgaattctc

SEQ ID NO: 76238 - protein, 264 aa, Arabidopsis thaliana
  peptide (1)..(264): Ceres Seq. ID no. 7107267
  misc_feature (12)..(74): Pfam Name: Dof domain, zinc finger Pfam Description: Dof domain, zinc finger
  misc_feature (1)..(264): Homolog of NCBI NO: 11282341 NR Description: zinc finger protein OBP3 - Arabidopsis thaliana
  misc_feature (1)..(264): Homolog of NCBI NO: 30694234 NR Description: Dof zinc finger protein [Arabidopsis thaliana]
  misc_feature (1)..(263): Homolog of NCBI NO: 7688355 NR Description: Dof zinc finger protein [Solanum tuberosum]
  misc_feature (1)..(190): Homolog of NCBI NO: 29124139 NR Description: putative DNA-binding protein [Oryza sativa
  misc_feature (1)..(175): Homolog of NCBI NO: 2130125 NR Description: DNA-binding protein Dof3 - maize (fragment)
  misc_feature (1)..(162): Homolog of NCBI NO: 15224320 NR Description: Dof zinc finger protein; protein id: At2g37590.1 thaliana] >gi|7485442|pir||T02525 probable DOF zinc finger
  misc_feature (1)..(137): Homolog of NCBI NO: 15241827 NR Description: Dof zinc finger protein; protein id: At5g02460.1
  misc_feature (1)..(209): Homolog of NCBI NO: 25352305 NR Description: probable DOF zinc finger protein [imported] - thaliana >gi|3927829|gb|AAC79586.1| putative DOF zinc finger
  misc_feature (1)..(78): Homolog of NCBI NO: 33146614 NR Description: putative dof zinc finger protein [Oryza sativa
  misc_feature (1)..(78): Homolog of NCBI NO: 34900534 NR Description: DNA-binding protein Dof3-like protein [Oryza
MVERARIAKVPLPEAALNCPRCDSTNTKFCYFNNYSLTQPRHFCKTCRRYWTRGGSLRNVPVGGGFRRNKRSKSRSKSTVVVSTDNTTSTSSLTSRPSYSNPSKFHSYGQIPEFNSNLPILPPLQSLGDYNSSNTGLDFGGTQISNMISGMSSSGGILDAWRIPPSQQAQQFPFLINTTGLVQSSNALYPLLEGGVSATQTRNVKAEENDQDRGRDGDGVNNLSRNFLGNININSGRNEEYTSWGGNSSWTGFTSNNSTGHLSF

SEQ ID NO: 76239 - DNA, 1331 bp, Arabidopsis thaliana
  misc_feature (1)..(1331): Ceres Seq. ID no. 7107287
  misc_feature: MA Experiment ID: 20000173 Result: Down-regulated in Transcription
  misc_feature: MA Experiment 20000173 PARAMETER Experiment Name: At_42deg_Heat_P Parameter: Age (day) Value: 14
  misc_feature: MA Experiment 20000173 PARAMETER Experiment Name: At_42deg_Heat_P Parameter: Organism Value: A. thaliana
  misc_feature: MA Experiment 20000173 PARAMETER Experiment Name: At_42deg_Heat_P Parameter: Plant Line Value: WS
  misc_feature: MA Experiment 20000173 PARAMETER Experiment Name: At_42deg_Heat_P Parameter: Temperature (deg C) Value: 42 vs. 22
  misc_feature: MA Experiment 20000173 PARAMETER Experiment Name: At_42deg_Heat_P Parameter: Timepoint (hr) Value: 6
  misc_feature: MA Experiment 20000173 PARAMETER Experiment Name: At_42deg_Heat_P Parameter: Tissue Value: Aerial
  misc_feature: MA Experiment ID: 20000185 Result: Down-regulated in Transcription
  misc_feature: MA Experiment 20000185 PARAMETER Experiment Name: At_Roots__P Parameter: Age (day) Value: 7 vs. 21
  misc_feature: MA Experiment 20000185 PARAMETER Experiment Name: At_Roots__P Parameter: Organism Value: A. thaliana
  misc_feature: MA Experiment 20000185 PARAMETER Experiment Name: At_Roots__P Parameter: Tissue Value: Roots vs. Whole Plant
  misc_feature: MA Experiment ID: 20000234 Result: Up-regulated in Transcription
  misc_feature: MA Experiment 20000234 PARAMETER Experiment Name: At_Siliques_P Parameter: Age (day) Value: 21
  misc_feature: MA Experiment 20000234 PARAMETER Experiment Name: At_Siliques_P Parameter: Organism Value: A. thaliana
  misc_feature: MA Experiment 20000234 PARAMETER Experiment Name: At_Siliques_P Parameter: Plant Line Value: WS
  misc_feature: MA Experiment 20000234 PARAMETER Experiment Name: At_Siliques_P Parameter: Tissue Value: Less Than 5mm Siliques vs. Whole Plant
  misc_feature: MA Experiment ID: 20000264 Result: Up-regulated in Transcription
  misc_feature: MA Experiment 20000264 PARAMETER Experiment Name: At_Open_Flower_P Parameter: Age (day) Value: 21
  misc_feature: MA Experiment 20000264 PARAMETER Experiment Name: At_Open_Flower_P Parameter: Plant Line Value: WS
  misc_feature: MA Experiment 20000264 PARAMETER Experiment Name: At_Open_Flower_P Parameter: Tissue Value: Open Flower vs. Whole Plant
  misc_feature: MA Experiment ID: 20000265 Result: Up-regulated in Transcription
  misc_feature: MA Experiment 20000265 PARAMETER Experiment Name: At_Open_Flower_P Parameter: Age (day) Value: 21
  misc_feature: MA Experiment 20000265 PARAMETER Experiment Name: At_Open_Flower_P Parameter: Plant Line Value: WS
  misc_feature: MA Experiment 20000265 PARAMETER Experiment Name: At_Open_Flower_P Parameter: Tissue Value: Closed Flower vs. Whole Plant
  misc_feature: MA Experiment ID: 20000286 Result: Up-regulated in Transcription
  misc_feature: MA Experiment 20000286 PARAMETER Experiment Name: At_Open_Flower_P Parameter: Age (day) Value: 21
  misc_feature: MA Experiment 20000286 PARAMETER Experiment Name: At_Open_Flower_P Parameter: Plant Line Value: WS
  misc_feature: MA Experiment 20000286 PARAMETER Experiment Name: At_Open_Flower_P Parameter: Tissue Value: Half Open vs. Whole Plant
  misc_feature: MA Experiment ID: 20000439 Result: Down-regulated in Transcription
  misc_feature: MA Experiment 20000439 PARAMETER Experiment Name: At_Roots__P Parameter: Age (day) Value: 14 vs. 21
  misc_feature: MA Experiment 20000439 PARAMETER Experiment Name: At_Roots__P Parameter: Organism Value: A. thaliana
  misc_feature: MA Experiment 20000439 PARAMETER Experiment Name: At_Roots__P Parameter: Tissue Value: Roots vs. Whole Plant
  misc_feature: MA Experiment ID: 20001247 Result: Down-regulated in Transcription
  misc_feature: MA Experiment 20001247 PARAMETER Experiment Name: At_Far-red-induction_P Parameter: Age (day) Value: 7
  misc_feature: MA Experiment 20001247 PARAMETER Experiment Name: At_Far-red-induction_P Parameter: Light Value: Far-red vs. White
  misc_feature: MA Experiment 20001247 PARAMETER Experiment Name: At_Far-red-induction_P Parameter: Organism Value: A. thaliana
  misc_feature: MA Experiment 20001247 PARAMETER Experiment Name: At_Far-red-induction_P Parameter: Plant Line Value: Columbia
  misc_feature: MA Experiment 20001247 PARAMETER Experiment Name: At_Far-red-induction_P Parameter: Timepoint (hr) Value: 1
  misc_feature: MA Experiment 20001247 PARAMETER Experiment Name: At_Far-red-induction_P Parameter: Tissue Value: Whole Plant
  misc_feature: MA Experiment ID: 20001248 Result: Down-regulated in Transcription
  misc_feature: MA Experiment 20001248 PARAMETER Experiment Name: At_Far-red-induction_P Parameter: Age (day) Value: 7
  misc_feature: MA Experiment 20001248 PARAMETER Experiment Name: At_Far-red-induction_P Parameter: Light Value: Far-red vs. White
  misc_feature: MA Experiment 20001248 PARAMETER Experiment Name: At_Far-red-induction_P Parameter: Organism Value: A. thaliana
  misc_feature: MA Experiment 20001248 PARAMETER Experiment Name: At_Far-red-induction_P Parameter: Plant Line Value: Columbia
  misc_feature: MA Experiment 20001248 PARAMETER Experiment Name: At_Far-red-induction_P Parameter: Timepoint (hr) Value: 4
  misc_feature: MA Experiment 20001248 PARAMETER Experiment Name: At_Far-red-induction_P Parameter: Tissue Value: Whole Plant
  misc_feature: MA Experiment ID: 20001905 Result: Down-regulated in Transcription
  misc_feature: MA Experiment 20001905 PARAMETER Experiment Name: At_Drought_Reproduction_P Parameter: Age (day) Value: 40
  misc_feature: MA Experiment 20001905 PARAMETER Experiment Name: At_Drought_Reproduction_P Parameter: Organism Value: A. thaliana
  misc_feature: MA Experiment 20001905 PARAMETER Experiment Name: At_Drought_Reproduction_P Parameter: Plant Line Value: WS
  misc_feature: MA Experiment 20001905 PARAMETER Experiment Name: At_Drought_Reproduction_P Parameter: Timepoint (day) Value: 10
  misc_feature: MA Experiment 20001905 PARAMETER Experiment Name: At_Drought_Reproduction_P Parameter: Tissue Value: Rosettes
  misc_feature: MA Experiment 20001905 PARAMETER Experiment Name: At_Drought_Reproduction_P Parameter: Treatment Value: Drought vs. No Drought
  misc_feature: MA Experiment ID: 20001906 Result: Down-regulated in Transcription
  misc_feature: MA Experiment 20001906 PARAMETER Experiment Name: At_Drought_Reproduction_P Parameter: Age (day) Value: 35
  misc_feature: MA Experiment 20001906 PARAMETER Experiment Name: At_Drought_Reproduction_P Parameter: Organism Value: A. thaliana
  misc_feature: MA Experiment 20001906 PARAMETER Experiment Name: At_Drought_Reproduction_P Parameter: Plant Line Value: WS
  misc_feature: MA Experiment 20001906 PARAMETER Experiment Name: At_Drought_Reproduction_P Parameter: Timepoint (day) Value: 5
  misc_feature: MA Experiment 20001906 PARAMETER Experiment Name: At_Drought_Reproduction_P Parameter: Tissue Value: Siliques
  misc_feature: MA Experiment 20001906 PARAMETER Experiment Name: At_Drought_Reproduction_P Parameter: Treatment Value: Drought vs. No Drought
gagtaaaaccctttctgtctgagtaagaggaaaccaacatggagatgggttccaactcgggtccgggtcatggtccgggtcaggcagagtcgggtggttcctccactgagtcatcctctttcagtggagggctcatgtttggccagaagatctacttcgaggacggtggtggtggatccgggtcttcttcctcaggtggtcgttcaaacagacgtgtccgtggaggcgggtcgggtcagtcgggtcagataccaaggtgccaagtggaaggttgtgggatggatctaaccaatgcaaaaggttattactcgagacaccgagtttgtggagtgcactctaaaacacctaaagtcactgtggctggtatcgaacagaggttttgtcaacagtgcagcaggtttcatcagcttccggaatttgacctagagaaaaggagttgccgcaggagactcgctggtcataatgagcgacgaaggaagccacagcctgcgtctctctctgtgttagcttctcgttacgggaggatcgcaccttcgctttacgaaaatggtgatgctggaatgaatggaagctttcttgggaaccaagagataggatggccaagttcaagaacattggatacaagagtgatgaggcggccagtgtcatcaccgtcatggcagatcaatccaatgaatgtatttagtcaaggttcagttggtggaggagggacaagcttctcatctccagagattatggacactaaactagagagctacaagggaattggcgactcaaactgtgctctctctcttctgtcaaatccacatcaaccacatgacaacaacaacaacaacaacaacaacaacaacaacaacaacaacaacaacaacaacaacaatacatggcgagcttcttcaggttttggcccgatgacggttacaatggctcaaccaccacctgcacctagccagcatcagtatctgaacccgccttgggtattcaaggacaatgataatgatatgtctcctgttttgaatttaggtcagataagtagtggcacggcaatgggtgagttcgagttatctgatcaccatcatcaaagtaggagacagtacatggaagatgagaacacaagggcttatgactcttcttctcaccataccaactggtctctctgacttgtctttgcatcagagaatcttcttacaatgaacgattctgcaatatcttatctttttgcttctttgtttattctgttatctgctatcaataaaccagacaattgttgccagataatggcttttgattttgatttgttgttttatctccatgaaaatccaagttatgag

SEQ ID NO: 76240 - protein, 373 aa, Arabidopsis thaliana
  peptide (1)..(373): Ceres Seq. ID no. 7107288
  misc_feature (73)..(151): Pfam Name: SBP domain Pfam Description: SBP domain
  misc_feature (1)..(373): Homolog of NCBI NO: 25352586 NR Description: squamosa promoter binding protein homolog 9 - Arabidopsis thaliana >gi|5931675|emb|CAB56591.1| squamosa
  misc_feature (1)..(373): Homolog of NCBI NO: 30688933 NR Description: squamosa-promoter binding protein -related
  misc_feature (1)..(373): Homolog of NCBI NO: 15227896 NR Description: putative squamosa-promoter binding protein; id: At2g42200.1, supported by cDNA: gi_15028114 [Arabidopsis
  misc_feature (1)..(373): Homolog of NCBI NO: 15028115 NR Description: putative squamosa-promoter binding protein
  misc_feature (14)..(373): Homolog of NCBI NO: 15230904 NR Description: squamosa promoter-binding protein homolog; id: At3g57920.1, supported by cDNA: 247919. [Arabidopsis
  misc_feature (25)..(273): Homolog of NCBI NO: 25352584 NR Description: squamosa promoter binding protein-homolog 4 - garden snapdragon (fragment) >gi|5931641|emb|CAB56569.1|
  misc_feature (45)..(373): Homolog of NCBI NO: 25352582 NR Description: squamosa promoter binding protein-homolog 5 - garden snapdragon (fragment) >gi|5931643|emb|CAB56570.1|
  misc_feature (16)..(272): Homolog of NCBI NO: 28411864 NR Description: putative SBP-domain protein 5 [Oryza sativa
  misc_feature (73)..(270): Homolog of NCBI NO: 5931786 NR Description: SBP-domain protein 5 [Zea mays]
  misc_feature (13)..(255): Homolog of NCBI NO: 25456646 NR Description: squamosa promoter binding protein 2 [imported] -
MEMGSNSGPGHGPGQAESGGSSTESSSFSGGLMFGQKIYFEDGGGGSGSSSSGGRSNRRVRGGGSGQSGQIPRCQVEGCGMDLTNAKGYYSRHRVCGVHSKTPKVTVAGIEQRFCQQCSRFHQLPEFDLEKRSCRRRLAGHNERRRKPQPASLSVLASRYGRIAPSLYENGDAGMNGSFLGNQEIGWPSSRTLDTRVMRRPVSSPSWQINPMNVFSQGSVGGGGTSFSSPEIMDTKLESYKGIGDSNCALSLLSNPHQPHDNNNNNNNNNNNNNNNNNNNNTWRASSGFGPMTVTMAQPPPAPSQHQYLNPPWVFKDNDNDMSPVLNLGQISSGTAMGEFELSDHHHQSRRQYMEDENTRAYDSSSHHTNWSL

SEQ ID NO: 76241 - protein, 371 aa, Arabidopsis thaliana
  peptide (1)..(371): Ceres Seq. ID no. 7107289
  misc_feature (71)..(149): Pfam Name: SBP domain Pfam Description: SBP domain
  misc_feature (1)..(371): Homolog of NCBI NO: 25352586 NR Description: squamosa promoter binding protein homolog 9 - Arabidopsis thaliana >gi|5931675|emb|CAB56591.1| squamosa
  misc_feature (1)..(371): Homolog of NCBI NO: 30688933 NR Description: squamosa-promoter binding protein -related
  misc_feature (1)..(371): Homolog of NCBI NO: 15227896 NR Description: putative squamosa-promoter binding protein; id: At2g42200.1, supported by cDNA: gi_15028114 [Arabidopsis
  misc_feature (1)..(371): Homolog of NCBI NO: 15028115 NR Description: putative squamosa-promoter binding protein
  misc_feature (12)..(371): Homolog of NCBI NO: 15230904 NR Description: squamosa promoter-binding protein homolog; id: At3g57920.1, supported by cDNA: 247919. [Arabidopsis
  misc_feature (23)..(271): Homolog of NCBI NO: 25352584 NR Description: squamosa promoter binding protein-homolog 4 - garden snapdragon (fragment) >gi|5931641|emb|CAB56569.1|
  misc_feature (43)..(371): Homolog of NCBI NO: 25352582 NR Description: squamosa promoter binding protein-homolog 5 - garden snapdragon (fragment) >gi|5931643|emb|CAB56570.1|
  misc_feature (14)..(270): Homolog of NCBI NO: 28411864 NR Description: putative SBP-domain protein 5 [Oryza sativa
  misc_feature (71)..(268): Homolog of NCBI NO: 5931786 NR Description: SBP-domain protein 5 [Zea mays]
  misc_feature (11)..(253): Homolog of NCBI NO: 25456646 NR Description: squamosa promoter binding protein 2 [imported] -
MGSNSGPGHGPGQAESGGSSTESSSFSGGLMFGQKIYFEDGGGGSGSSSSGGRSNRRVRGGGSGQSGQIPRCQVEGCGMDLTNAKGYYSRHRVCGVHSKTPKVTVAGIEQRFCQQCSRFHQLPEFDLEKRSCRRRLAGHNERRRKPQPASLSVLASRYGRIAPSLYENGDAGMNGSFLGNQEIGWPSSRTLDTRVMRRPVSSPSWQINPMNVFSQGSVGGGGTSFSSPEIMDTKLESYKGIGDSNCALSLLSNPHQPHDNNNNNNNNNNNNNNNNNNNNTWRASSGFGPMTVTMAQPPPAPSQHQYLNPPWVFKDNDNDMSPVLNLGQISSGTAMGEFELSDHHHQSRRQYMEDENTRAYDSSSHHTNWSL

SEQ ID NO: 76242 - protein, 341 aa, Arabidopsis thaliana
  peptide (1)..(341): Ceres Seq. ID no. 7107290
  misc_feature (41)..(119): Pfam Name: SBP domain Pfam Description: SBP domain
  misc_feature (1)..(341): Homolog of NCBI NO: 25352586 NR Description: squamosa promoter binding protein homolog 9 - Arabidopsis thaliana >gi|5931675|emb|CAB56591.1| squamosa
  misc_feature (1)..(341): Homolog of NCBI NO: 30688933 NR Description: squamosa-promoter binding protein -related
  misc_feature (1)..(341): Homolog of NCBI NO: 15227896 NR Description: putative squamosa-promoter binding protein; id: At2g42200.1, supported by cDNA: gi_15028114 [Arabidopsis
  misc_feature (1)..(341): Homolog of NCBI NO: 15028115 NR Description: putative squamosa-promoter binding protein
  misc_feature (1)..(341): Homolog of NCBI NO: 15230904 NR Description: squamosa promoter-binding protein homolog; id: At3g57920.1, supported by cDNA: 247919. [Arabidopsis
  misc_feature (1)..(241): Homolog of NCBI NO: 25352584 NR Description: squamosa promoter binding protein-homolog 4 - garden snapdragon (fragment) >gi|5931641|emb|CAB56569.1|
  misc_feature (13)..(341): Homolog of NCBI NO: 25352582 NR Description: squamosa promoter binding protein-homolog 5 - garden snapdragon (fragment) >gi|5931643|emb|CAB56570.1|
  misc_feature (1)..(240): Homolog of NCBI NO: 28411864 NR Description: putative SBP-domain protein 5 [Oryza sativa
  misc_feature (41)..(238): Homolog of NCBI NO: 5931786 NR Description: SBP-domain protein 5 [Zea mays]
  misc_feature (1)..(223): Homolog of NCBI NO: 25456646 NR Description: squamosa promoter binding protein 2 [imported] -
MFGQKIYFEDGGGGSGSSSSGGRSNRRVRGGGSGQSGQIPRCQVEGCGMDLTNAKGYYSRHRVCGVHSKTPKVTVAGIEQRFCQQCSRFHQLPEFDLEKRSCRRRLAGHNERRRKPQPASLSVLASRYGRIAPSLYENGDAGMNGSFLGNQEIGWPSSRTLDTRVMRRPVSSPSWQINPMNVFSQGSVGGGGTSFSSPEIMDTKLESYKGIGDSNCALSLLSNPHQPHDNNNNNNNNNNNNNNNNNNNNTWRASSGFGPMTVTMAQPPPAPSQHQYLNPPWVFKDNDNDMSPVLNLGQISSGTAMGEFELSDHHHQSRRQYMEDENTRAYDSSSHHTNWSL

SEQ ID NO: 76243 - DNA, 901 bp, Arabidopsis thaliana
  misc_feature (1)..(901): Ceres Seq. ID no. 7107315
  misc_feature: MA Experiment ID: 20000087 Result: Up-regulated in Transcription
  misc_feature: MA Experiment 20000087 PARAMETER Experiment Name: At_100uM_ABA_Mutants_cDNA_P Parameter: Plant Line Value: WS
  misc_feature: MA Experiment 20000087 PARAMETER Experiment Name: At_100uM_ABA_Mutants_cDNA_P Parameter: Timepoint (hr) Value: 6
  misc_feature: MA Experiment 20000087 PARAMETER Experiment Name: At_100uM_ABA_Mutants_cDNA_P Parameter: Tissue Value: Aerial
  misc_feature: MA Experiment 20000087 PARAMETER Experiment Name: At_100uM_ABA_Mutants_cDNA_P Parameter: Treatment Value: 100uM ABA vs. No Treatment
  misc_feature: Pfam Name: CBFD_NFYB_HMF Pfam Description: Histone-like transcription factor (CBF/NF-Y) and archaeal histone
gaattcggcacgagacccaccaagaggatcaaccagtctcttccccttcagattctcctttccacagtaatggatcaacaagaccatggacagtctggagctatgaactatggcacaaacccataccaaaccaacccgatgagcaccactgctgctactgtagcaggaggtgcggcacaaccaggccagctggcgttccaccagatccatcagcagcagcagcagcaacagctggcacagcagcttcaagcattttgggagaaccaattcaaagagattgagaagactaccgatttcaagaagcacagccttccccttgcgagaatcaagaaaatcatgaaagcggatgaagatgtccgtatgatctcggctgaggcgcctgtcgtgtttgcaagggcctgtgagatgttcatcctggagctgacactcaggtcgtggaaccacactgaggagaataagaggcggacgttgcagaagaacgatattgctgctgctgtgactagaaccgatatttttgatttccttgtggatattgttccccgggaggatctccgagatgaagtcttgggaagtattccgaggggcactgtcccggaagctgctgctgctggttacccgtatggatacttgcctgcaggaactgctccaataggaaatccgggaatggttatgggtaatcccggtggtgcgtatccacctaatccttatatgggtcaaccaatgtggcaacaacaggcacctgaccaacctgaccaggaaaattagcaagaaactgtgagtcttcccgcttcttttaggcctaccttgtagtcttggggttttgtttctgttttcgaataatggtaacctttgtataacttatttcagtatcgtctcagtttggtactatgtcagttttggt

SEQ ID NO: 76244 - protein, 254 aa, Arabidopsis thaliana
  peptide (1)..(254): Ceres Seq. ID no. 7107316
  misc_feature: Pfam Name: CBFD_NFYB_HMF Pfam Description: Histone-like transcription factor (CBF/NF-Y) and archaeal histone
  misc_feature (24)..(254): Homolog of NCBI NO: 6289057 NR Description: heme activated protein [Arabidopsis thaliana]
  misc_feature (24)..(254): Homolog of NCBI NO: 15223986 NR Description: putative transcription factor; protein id: supported by cDNA: 1911. [Arabidopsis thaliana] putative transcription factor [Arabidopsis thaliana]
  misc_feature (47)..(254): Homolog of NCBI NO: 25372763 NR Description: hypothetical protein [imported] - Arabidopsis
  misc_feature (24)..(254): Homolog of NCBI NO: 15221912 NR Description: heme activated protein, putative; protein id: [Arabidopsis thaliana] >gi|3776575|gb|AAC64892.1| Similar to
  misc_feature (24)..(210): Homolog of NCBI NO: 15223482 NR Description: transcription factor, putative; protein id: supported by cDNA: 26157., supported by cDNA: gi_18252952 thaliana] >gi|18252953|gb|AAL62403.1| transcription putative
  misc_feature (46)..(243): Homolog of NCBI NO: 15228405 NR Description: transcription factor Hap5a; protein id: supported by cDNA: 21604., supported by cDNA: gi_20260195
  misc_feature (46)..(246): Homolog of NCBI NO: 15242784 NR Description: transcription factor Hap5a-like protein; protein At5g63470.1, supported by cDNA: gi_18252934 [Arabidopsis
  misc_feature (24)..(210): Homolog of NCBI NO: 21554704 NR Description: transcription factor, putative [Arabidopsis
  misc_feature (75)..(206): Homolog of NCBI NO: 5257260 NR Description: Similar to sequence of BAC F7G19 from Arabidopsis
  misc_feature (91)..(210): Homolog of NCBI NO: 2398533 NR Description: Transcription factor [Arabidopsis thaliana]
EFGTRPTKRINQSLPLQILLSTVMDQQDHGQSGAMNYGTNPYQTNPMSTTAATVAGGAAQPGQLAFHQIHQQQQQQQLAQQLQAFWENQFKEIEKTTDFKKHSLPLARIKKIMKADEDVRMISAEAPVVFARACEMFILELTLRSWNHTEENKRRTLQKNDIAAAVTRTDIFDFLVDIVPREDLRDEVLGSIPRGTVPEAAAAGYPYGYLPAGTAPIGNPGMVMGNPGGAYPPNPYMGQPMWQQQAPDQPDQEN

SEQ ID NO: 76245 - protein, 231 aa, Arabidopsis thaliana
  peptide (1)..(231): Ceres Seq. ID no. 7107317
  misc_feature: Pfam Name: CBFD_NFYB_HMF Pfam Description: Histone-like transcription factor (CBF/NF-Y) and archaeal histone
  misc_feature (1)..(231): Homolog of NCBI NO: 6289057 NR Description: heme activated protein [Arabidopsis thaliana]
  misc_feature (1)..(231): Homolog of NCBI NO: 15223986 NR Description: putative transcription factor; protein id: supported by cDNA: 1911. [Arabidopsis thaliana] putative transcription factor [Arabidopsis thaliana]
  misc_feature (24)..(231): Homolog of NCBI NO: 25372763 NR Description: hypothetical protein [imported] - Arabidopsis
  misc_feature (1)..(231): Homolog of NCBI NO: 15221912 NR Description: heme activated protein, putative; protein id: [Arabidopsis thaliana] >gi|3776575|gb|AAC64892.1| Similar to
  misc_feature (1)..(187): Homolog of NCBI NO: 15223482 NR Description: transcription factor, putative; protein id: supported by cDNA: 26157., supported by cDNA: gi_18252952 thaliana] >gi|18252953|gb|AAL62403.1| transcription putative
  misc_feature (23)..(220): Homolog of NCBI NO: 15228405 NR Description: transcription factor Hap5a; protein id: supported by cDNA: 21604., supported by cDNA: gi_20260195
  misc_feature (23)..(223): Homolog of NCBI NO: 15242784 NR Description: transcription factor Hap5a-like protein; protein At5g63470.1, supported by cDNA: gi_18252934 [Arabidopsis
  misc_feature (1)..(187): Homolog of NCBI NO: 21554704 NR Description: transcription factor, putative [Arabidopsis
  misc_feature (52)..(183): Homolog of NCBI NO: 5257260 NR Description: Similar to sequence of BAC F7G19 from Arabidopsis
  misc_feature (68)..(187): Homolog of NCBI NO: 2398533 NR Description: Transcription factor [Arabidopsis thaliana]
MDQQDHGQSGAMNYGTNPYQTNPMSTTAATVAGGAAQPGQLAFHQIHQQQQQQQLAQQLQAFWENQFKEIEKTTDFKKHSLPLARIKKIMKADEDVRMISAEAPVVFARACEMFILELTLRSWNHTEENKRRTLQKNDIAAAVTRTDIFDFLVDIVPREDLRDEVLGSIPRGTVPEAAAAGYPYGYLPAGTAPIGNPGMVMGNPGGAYPPNPYMGQPMWQQQAPDQPDQEN

SEQ ID NO: 76246 - protein, 220 aa, Arabidopsis thaliana
  peptide (1)..(220): Ceres Seq. ID no. 7107318
  misc_feature: Pfam Name: CBFD_NFYB_HMF Pfam Description: Histone-like transcription factor (CBF/NF-Y) and archaeal histone
  misc_feature (1)..(220): Homolog of NCBI NO: 6289057 NR Description: heme activated protein [Arabidopsis thaliana]
  misc_feature (1)..(220): Homolog of NCBI NO: 15223986 NR Description: putative transcription factor; protein id: supported by cDNA: 1911. [Arabidopsis thaliana] putative transcription factor [Arabidopsis thaliana]
  misc_feature (13)..(220): Homolog of NCBI NO: 25372763 NR Description: hypothetical protein [imported] - Arabidopsis
  misc_feature (1)..(220): Homolog of NCBI NO: 15221912 NR Description: heme activated protein, putative; protein id: [Arabidopsis thaliana] >gi|3776575|gb|AAC64892.1| Similar to
  misc_feature (1)..(176): Homolog of NCBI NO: 15223482 NR Description: transcription factor, putative; protein id: supported by cDNA: 26157., supported by cDNA: gi_18252952 thaliana] >gi|18252953|gb|AAL62403.1| transcription putative
  misc_feature (12)..(209): Homolog of NCBI NO: 15228405 NR Description: transcription factor Hap5a; protein id: supported by cDNA: 21604., supported by cDNA: gi_20260195
  misc_feature (12)..(212): Homolog of NCBI NO: 15242784 NR Description: transcription factor Hap5a-like protein; protein At5g63470.1, supported by cDNA: gi_18252934 [Arabidopsis
  misc_feature (1)..(176): Homolog of NCBI NO: 21554704 NR Description: transcription factor, putative [Arabidopsis
  misc_feature (41)..(172): Homolog of NCBI NO: 5257260 NR Description: Similar to sequence of BAC F7G19 from Arabidopsis
  misc_feature (57)..(176): Homolog of NCBI NO: 2398533 NR Description: Transcription factor [Arabidopsis thaliana]
MNYGTNPYQTNPMSTTAATVAGGAAQPGQLAFHQIHQQQQQQQLAQQLQAFWENQFKEIEKTTDFKKHSLPLARIKKIMKADEDVRMISAEAPVVFARACEMFILELTLRSWNHTEENKRRTLQKNDIAAAVTRTDIFDFLVDIVPREDLRDEVLGSIPRGTVPEAAAAGYPYGYLPAGTAPIGNPGMVMGNPGGAYPPNPYMGQPMWQQQAPDQPDQEN

SEQ ID NO: 76247 - DNA, 793 bp, Arabidopsis thaliana
  misc_feature (1)..(793): Ceres Seq. ID no. 7107322
  misc_feature: MA Experiment ID: 108576 Result: Up-regulated in Transcription
  misc_feature: MA Experiment 108576 PARAMETER Experiment Name: At_42deg_Heat_cDNA_P Parameter: Temperature (deg C) Value: 42 vs. 22
  misc_feature: MA Experiment 108576 PARAMETER Experiment Name: At_42deg_Heat_cDNA_P Parameter: Timepoint (hr) Value: 1
  misc_feature: MA Experiment 108576 PARAMETER Experiment Name: At_42deg_Heat_cDNA_P Parameter: Tissue Value: Aerial
  misc_feature: MA Experiment ID: 20000184 Result: Down-regulated in Transcription
  misc_feature: MA Experiment 20000184 PARAMETER Experiment Name: At_Shoots__P Parameter: Age (day) Value: 7
  misc_feature: MA Experiment 20000184 PARAMETER Experiment Name: At_Shoots__P Parameter: Tissue Value: Shoots vs. Whole Plant
  misc_feature: MA Experiment ID: 20000235 Result: Down-regulated in Transcription
  misc_feature: MA Experiment 20000235 PARAMETER Experiment Name: At_Siliques_P Parameter: Age (day) Value: 21
  misc_feature: MA Experiment 20000235 PARAMETER Experiment Name: At_Siliques_P Parameter: Organism Value: A. thaliana
  misc_feature: MA Experiment 20000235 PARAMETER Experiment Name: At_Siliques_P Parameter: Plant Line Value: WS
  misc_feature: MA Experiment 20000235 PARAMETER Experiment Name: At_Siliques_P Parameter: Tissue Value: 5-10mm Siliques vs. Whole Plant
  misc_feature: MA Experiment ID: 20000451 Result: Down-regulated in Transcription
  misc_feature: MA Experiment 20000451 PARAMETER Experiment Name: At_CS6879_Shoots-Roots_P Parameter: Age (day) Value: 14
  misc_feature: MA Experiment 20000451 PARAMETER Experiment Name: At_CS6879_Shoots-Roots_P Parameter: Organism Value: A. thaliana
  misc_feature: MA Experiment 20000451 PARAMETER Experiment Name: At_CS6879_Shoots-Roots_P Parameter: Plant Line Value: CS6879 vs. WS
  misc_feature: MA Experiment 20000451 PARAMETER Experiment Name: At_CS6879_Shoots-Roots_P Parameter: Tissue Value: Roots
  misc_feature: MA Experiment ID: 20000452 Result: Down-regulated in Transcription
  misc_feature: MA Experiment 20000452 PARAMETER Experiment Name: At_CS6879_Shoots-Roots_P Parameter: Age (day) Value: 14
  misc_feature: MA Experiment 20000452 PARAMETER Experiment Name: At_CS6879_Shoots-Roots_P Parameter: Organism Value: A. thaliana
  misc_feature: MA Experiment 20000452 PARAMETER Experiment Name: At_CS6879_Shoots-Roots_P Parameter: Plant Line Value: CS6879 vs. WS
  misc_feature: MA Experiment 20000452 PARAMETER Experiment Name: At_CS6879_Shoots-Roots_P Parameter: Tissue Value: Shoots
  misc_feature: MA Experiment ID: 20001450 Result: Up-regulated in Transcription
  misc_feature: MA Experiment 20001450 PARAMETER Experiment Name: At_Far-red-induction_P Parameter: Age (day) Value: 7
  misc_feature: MA Experiment 20001450 PARAMETER Experiment Name: At_Far-red-induction_P Parameter: Light Value: Far-red vs. White
  misc_feature: MA Experiment 20001450 PARAMETER Experiment Name: At_Far-red-induction_P Parameter: Organism Value: A. thaliana
  misc_feature: MA Experiment 20001450 PARAMETER Experiment Name: At_Far-red-induction_P Parameter: Plant Line Value: Columbia
  misc_feature: MA Experiment 20001450 PARAMETER Experiment Name: At_Far-red-induction_P Parameter: Timepoint (hr) Value: 8
  misc_feature: MA Experiment 20001450 PARAMETER Experiment Name: At_Far-red-induction_P Parameter: Tissue Value: Whole Plant
  misc_feature: Pfam Name: Thioredoxin Pfam Description: Thioredoxin
ccgacgacgacatgttacgatccctacgcttctcgctttacgcttcttctaattctactccgatttctacaccaattgaggcccgacagttactgagttcatgcaatagattttacggtctgtcctcttcgagctcttcttcctcccttactacttcatctttgatcggaaatcttgttttctcatcaaggaatcagtctctctccgtaaaggtccaagcgttagctgctgaaaccgaacagccaaaatggtgggagaggaaagcagggccaaacatgattgacattacctccgctgagcagtttctcaacgcgttaaaagatgcgggagatagattagttatcgtagatttttacggaacttggtgtggttcttgccgtgcaatgttcccaaagctctgcaaaacggcgaaagaacaccctaacatcttgttccttaaagtaaactttgacgagaacaagtctctctgcaaaagcttaaacgtcaaggtgttaccgtatttccacttctaccgcggtgctgatggccaagtcgaatccttctcatgctctcttgccaagttccagaaactgagagaggcgatagagagacacaatgtaggaagtatcagtaacatctcttcttcagcttctgagaaagttgaagattcaagtgaataatcaatgcctggttcagattgatcacagattattttgttaaatcgcttccctgtatatatgttgactgcattttccatgtggtgcatcataattcataatttttgtacataaataaatgagtctgacttcgagtt

SEQ ID NO: 76248 - protein, 218 aa, Arabidopsis thaliana
  peptide (1)..(218): Ceres Seq. ID no. 7107323
  misc_feature: Pfam Name: Thioredoxin Pfam Description: Thioredoxin
  misc_feature (4)..(218): Homolog of NCBI NO: 4973258 NR Description: thioredoxin-like 2 [Arabidopsis thaliana]
  misc_feature (5)..(218): Homolog of NCBI NO: 15236134 NR Description: putative thioredoxin; protein id: At4g26160.1, by cDNA: 148597. [Arabidopsis thaliana] >gi|7488216|pir||T04271
  misc_feature (5)..(218): Homolog of NCBI NO: 21553512 NR Description: putative thioredoxin [Arabidopsis thaliana]
  misc_feature (7)..(203): Homolog of NCBI NO: 18417441 NR Description: Thioredoxin - like protein; protein id:
  misc_feature (7)..(203): Homolog of NCBI NO: 21554313 NR Description: thioredoxin-like protein [Arabidopsis thaliana]
  misc_feature (7)..(189): Homolog of NCBI NO: 30688403 NR Description: thioredoxin family [Arabidopsis thaliana]
  misc_feature (92)..(189): Homolog of NCBI NO: 14423392 NR Description: Thioredoxin-like protein [Arabidopsis thaliana]
  misc_feature (9)..(197): Homolog of NCBI NO: 15225825 NR Description: putative thioredoxin; protein id: At2g33270.1
  misc_feature (3)..(197): Homolog of NCBI NO: 15240254 NR Description: thioredoxin-like 3; protein id: At5g61440.1, by cDNA: gi_4973259 [Arabidopsis thaliana]
  misc_feature (61)..(203): Homolog of NCBI NO: 308906 NR Description: thioredoxin
DDDMLRSLRFSLYASSNSTPISTPIEARQLLSSCNRFYGLSSSSSSSSLTTSSLIGNLVFSSRNQSLSVKVQALAAETEQPKWWERKAGPNMIDITSAEQFLNALKDAGDRLVIVDFYGTWCGSCRAMFPKLCKTAKEHPNILFLKVNFDENKSLCKSLNVKVLPYFHFYRGADGQVESFSCSLAKFQKLREAIERHNVGSISNISSSASEKVEDSSE

SEQ ID NO: 76249 - protein, 215 aa, Arabidopsis thaliana
  peptide (1)..(215): Ceres Seq. ID no. 7107324
  misc_feature: Pfam Name: Thioredoxin Pfam Description: Thioredoxin
  misc_feature (1)..(215): Homolog of NCBI NO: 4973258 NR Description: thioredoxin-like 2 [Arabidopsis thaliana]
  misc_feature (2)..(215): Homolog of NCBI NO: 15236134 NR Description: putative thioredoxin; protein id: At4g26160.1, by cDNA: 148597. [Arabidopsis thaliana] >gi|7488216|pir||T04271
  misc_feature (2)..(215): Homolog of NCBI NO: 21553512 NR Description: putative thioredoxin [Arabidopsis thaliana]
  misc_feature (4)..(200): Homolog of NCBI NO: 18417441 NR Description: Thioredoxin - like protein; protein id:
  misc_feature (4)..(200): Homolog of NCBI NO: 21554313 NR Description: thioredoxin-like protein [Arabidopsis thaliana]
  misc_feature (4)..(186): Homolog of NCBI NO: 30688403 NR Description: thioredoxin family [Arabidopsis thaliana]
  misc_feature (89)..(186): Homolog of NCBI NO: 14423392 NR Description: Thioredoxin-like protein [Arabidopsis thaliana]
  misc_feature (6)..(194): Homolog of NCBI NO: 15225825 NR Description: putative thioredoxin; protein id: At2g33270.1
  misc_feature (1)..(194): Homolog of NCBI NO: 15240254 NR Description: thioredoxin-like 3; protein id: At5g61440.1, by cDNA: gi_4973259 [Arabidopsis thaliana]
  misc_feature (58)..(200): Homolog of NCBI NO: 308906 NR Description: thioredoxin
MLRSLRFSLYASSNSTPISTPIEARQLLSSCNRFYGLSSSSSSSSLTTSSLIGNLVFSSRNQSLSVKVQALAAETEQPKWWERKAGPNMIDITSAEQFLNALKDAGDRLVIVDFYGTWCGSCRAMFPKLCKTAKEHPNILFLKVNFDENKSLCKSLNVKVLPYFHFYRGADGQVESFSCSLAKFQKLREAIERHNVGSISNISSSASEKVEDSSE

SEQ ID NO: 76250 - protein, 127 aa, Arabidopsis thaliana
  peptide (1)..(127): Ceres Seq. ID no. 7107325
  misc_feature: Pfam Name: Thioredoxin Pfam Description: Thioredoxin
  misc_feature (1)..(127): Homolog of NCBI NO: 4973258 NR Description: thioredoxin-like 2 [Arabidopsis thaliana]
  misc_feature (1)..(127): Homolog of NCBI NO: 15236134 NR Description: putative thioredoxin; protein id: At4g26160.1, by cDNA: 148597. [Arabidopsis thaliana] >gi|7488216|pir||T04271
  misc_feature (1)..(127): Homolog of NCBI NO: 21553512 NR Description: putative thioredoxin [Arabidopsis thaliana]
  misc_feature (1)..(112): Homolog of NCBI NO: 18417441 NR Description: Thioredoxin - like protein; protein id:
  misc_feature (1)..(112): Homolog of NCBI NO: 21554313 NR Description: thioredoxin-like protein [Arabidopsis thaliana]
  misc_feature (1)..(98): Homolog of NCBI NO: 30688403 NR Description: thioredoxin family [Arabidopsis thaliana]
  misc_feature (1)..(98): Homolog of NCBI NO: 14423392 NR Description: Thioredoxin-like protein [Arabidopsis thaliana]
  misc_feature (1)..(106): Homolog of NCBI NO: 15225825 NR Description: putative thioredoxin; protein id: At2g33270.1
  misc_feature (1)..(106): Homolog of NCBI NO: 15240254 NR Description: thioredoxin-like 3; protein id: At5g61440.1, by cDNA: gi_4973259 [Arabidopsis thaliana]
  misc_feature (1)..(112): Homolog of NCBI NO: 308906 NR Description: thioredoxin
MIDITSAEQFLNALKDAGDRLVIVDFYGTWCGSCRAMFPKLCKTAKEHPNILFLKVNFDENKSLCKSLNVKVLPYFHFYRGADGQVESFSCSLAKFQKLREAIERHNVGSISNISSSASEKVEDSSE

SEQ ID NO: 76251 - DNA, 843 bp, Arabidopsis thaliana
  misc_feature (1)..(843): Ceres Seq. ID no. 7107338
  misc_feature: MA Experiment ID: 108434 Result: Down-regulated in Transcription
  misc_feature: MA Experiment 108434 PARAMETER Experiment Name: At_Root_Tips_cDNA_P Parameter: Tissue Value: Root Tips
  misc_feature: MA Experiment ID: 108462 Result: Up-regulated in Transcription
  misc_feature: MA Experiment 108462 PARAMETER Experiment Name: At_Germinating_Seeds_cDNA_P Parameter: Age (day) Value: 2 vs. 0
  misc_feature: MA Experiment 108462 PARAMETER Experiment Name: At_Germinating_Seeds_cDNA_P Parameter: Tissue Value: Germinating Seeds
  misc_feature: MA Experiment ID: 108464 Result: Up-regulated in Transcription
  misc_feature: MA Experiment 108464 PARAMETER Experiment Name: At_Germinating_Seeds_cDNA_P Parameter: Age (day) Value: 4 vs. 0
  misc_feature: MA Experiment 108464 PARAMETER Experiment Name: At_Germinating_Seeds_cDNA_P Parameter: Tissue Value: Germinating Seeds
  misc_feature: MA Experiment ID: 108574 Result: Up-regulated in Transcription
  misc_feature: MA Experiment 108574 PARAMETER Experiment Name: At_Wounding__cDNA_P Parameter: Timepoint (hr) Value: 1
  misc_feature: MA Experiment 108574 PARAMETER Experiment Name: At_Wounding__cDNA_P Parameter: Tissue Value: Aerial
  misc_feature: MA Experiment 108574 PARAMETER Experiment Name: At_Wounding__cDNA_P Parameter: Treatment Value: Wounding vs. No Wounding
  misc_feature: MA Experiment ID: 108576 Result: Up-regulated in Transcription
  misc_feature: MA Experiment 108576 PARAMETER Experiment Name: At_42deg_Heat_cDNA_P Parameter: Temperature (deg C) Value: 42 vs. 22
  misc_feature: MA Experiment 108576 PARAMETER Experiment Name: At_42deg_Heat_cDNA_P Parameter: Timepoint (hr) Value: 1
  misc_feature: MA Experiment 108576 PARAMETER Experiment Name: At_42deg_Heat_cDNA_P Parameter: Tissue Value: Aerial
  misc_feature: MA Experiment ID: 108577 Result: Up-regulated in Transcription
  misc_feature: MA Experiment 108577 PARAMETER Experiment Name: At_42deg_Heat_cDNA_P Parameter: Temperature (deg C) Value: 42 vs. 22
  misc_feature: MA Experiment 108577 PARAMETER Experiment Name: At_42deg_Heat_cDNA_P Parameter: Timepoint (hr) Value: 6
  misc_feature: MA Experiment 108577 PARAMETER Experiment Name: At_42deg_Heat_cDNA_P Parameter: Tissue Value: Aerial
  misc_feature: MA Experiment ID: 108607 Result: Up-regulated in Transcription
  misc_feature: MA Experiment 108607 PARAMETER Experiment Name: At_100uM_ABA_cDNA_P Parameter: Timepoint (hr) Value: 4
  misc_feature: MA Experiment 108607 PARAMETER Experiment Name: At_100uM_ABA_cDNA_P Parameter: Tissue Value: Aerial
  misc_feature: MA Experiment 108607 PARAMETER Experiment Name: At_100uM_ABA_cDNA_P Parameter: Treatment Value: 100uM ABA vs. No Treatment
  misc_feature: MA Experiment ID: 108608 Result: Up-regulated in Transcription
  misc_feature: MA Experiment 108608 PARAMETER Experiment Name: At_100uM_ABA_cDNA_P Parameter: Timepoint (hr) Value: 1
  misc_feature: MA Experiment 108608 PARAMETER Experiment Name: At_100uM_ABA_cDNA_P Parameter: Tissue Value: Aerial
  misc_feature: MA Experiment 108608 PARAMETER Experiment Name: At_100uM_ABA_cDNA_P Parameter: Treatment Value: 100uM ABA vs. No Treatment
  misc_feature: MA Experiment ID: 20000068 Result: Down-regulated in Transcription
  misc_feature: MA Experiment ID: 20000111 Result: Up-regulated in Transcription
  misc_feature: MA Experiment 20000111 PARAMETER Experiment Name: At_42deg_Heat_cDNA_P Parameter: Temperature (deg C) Value: 42 vs. 22
  misc_feature: MA Experiment 20000111 PARAMETER Experiment Name: At_42deg_Heat_cDNA_P Parameter: Timepoint (hr) Value: 6
  misc_feature: MA Experiment 20000111 PARAMETER Experiment Name: At_42deg_Heat_cDNA_P Parameter: Tissue Value: Aerial
  misc_feature: MA Experiment ID: 20000112 Result: Up-regulated in Transcription
  misc_feature: MA Experiment 20000112 PARAMETER Experiment Name: At_42deg_Heat_cDNA_P Parameter: Temperature (deg C) Value: 42 vs. 22
  misc_feature: MA Experiment 20000112 PARAMETER Experiment Name: At_42deg_Heat_cDNA_P Parameter: Timepoint (hr) Value: 2
  misc_feature: MA Experiment 20000112 PARAMETER Experiment Name: At_42deg_Heat_cDNA_P Parameter: Tissue Value: Aerial
  misc_feature: MA Experiment ID: 20000113 Result: Up-regulated in Transcription
  misc_feature: MA Experiment 20000113 PARAMETER Experiment Name: At_42deg_Heat_cDNA_P Parameter: Temperature (deg C) Value: 42 vs. 22
  misc_feature: MA Experiment 20000113 PARAMETER Experiment Name: At_42deg_Heat_cDNA_P Parameter: Timepoint (hr) Value: 8
  misc_feature: MA Experiment 20000113 PARAMETER Experiment Name: At_42deg_Heat_cDNA_P Parameter: Tissue Value: Aerial
  misc_feature: MA Experiment ID: 20000144 Result: Up-regulated in Transcription
  misc_feature: MA Experiment 20000144 PARAMETER Experiment Name: At_42deg_Heat_cDNA_P Parameter: Temperature (deg C) Value: 42 vs. 22
  misc_feature: MA Experiment 20000144 PARAMETER Experiment Name: At_42deg_Heat_cDNA_P Parameter: Timepoint (hr) Value: 1
  misc_feature: MA Experiment 20000144 PARAMETER Experiment Name: At_42deg_Heat_cDNA_P Parameter: Tissue Value: Aerial
gaattcgcggccgcaagaaacagagaaaaagagagagagacccctaatggctgagaaagaagaagtgaagcttttggggatatgggcgagcccttttagccgtcgggtcgagatggctctcaaactcaaaggcataccgtacgagtacgtggaagagatactggagaacaaaagccctttgcttcttgctcttaaccctattcacaagaaagtccctgttcttgtccacaatggtaaaaccattctcgagtctcatgtgattcttgaatacatcgatgagacttggccacaaaatccaattctccctcaagatccttatgaaagatccaaagctcgtttctttgctaaactcgtcgatgaacagattatgaacgtggggtttatatcaatggcaagagcagacgagaaaggaagagaagttttagccgagcaggtaagagaactgattatgtatctcgagaaagaacttgtcggaaaagattacttcggaggcaagactgtcggattcttggactttgtcgccggaagtttaattccgttttgtttggagagaggttgggaaggaataggattggaagtgattacagaggagaagtttccagagttcaagagatgggttaggaatttggagaaggttgagattgttaaagattgtgttccaccaagagaggaacatgtagaacacatgaactatatggcagagagagtgagatcttcttaagaaaacaaatcatgtttagttcttgatcatgcaatgtttgtatggttatgttgttgtttattttattgaatatctttgtatgttgtgtggttgagaagtgaggttttagcggccgcgaattc

SEQ ID NO: 76252 - protein, 239 aa, Arabidopsis thaliana
  peptide (1)..(239): Ceres Seq. ID no. 7107339
  misc_feature (101)..(213): Pfam Name: Glutathione S-transferase, C-terminal domain Pfam Description: Glutathione S-transferase, C-terminal domain
  misc_feature (16)..(239): Homolog of NCBI NO: 15227085 NR Description: glutathione transferase (103-1A); protein id: supported by cDNA: 6528., supported by cDNA: gi_17065199,
  misc_feature (16)..(239): Homolog of NCBI NO: 15227084 NR Description: glutathione transferase, putative; protein id: supported by cDNA: gi_11096007 [Arabidopsis thaliana]
  misc_feature (16)..(239): Homolog of NCBI NO: 15227551 NR Description: glutathione transferase, putative; protein id: supported by cDNA: 38727., supported by cDNA: gi_11095999, by cDNA: gi_16226389 [Arabidopsis thaliana]
  misc_feature (16)..(239): Homolog of NCBI NO: 15227086 NR Description: glutathione transferase, putative; protein id: supported by cDNA: gi_11096005, supported by cDNA: gi_14423533
  misc_feature (16)..(239): Homolog of NCBI NO: 14423534 NR Description: putative glutathione S-transferase [Arabidopsis
  misc_feature (16)..(239): Homolog of NCBI NO: 15227550 NR Description: glutathione transferase, putative; protein id: supported by cDNA: gi_11096001, supported by cDNA: gi_20453169
  misc_feature (16)..(238): Homolog of NCBI NO: 15227087 NR Description: glutathione transferase, putative; protein id: supported by cDNA: gi_11096003 [Arabidopsis thaliana]
  misc_feature (16)..(236): Homolog of NCBI NO: 15227082 NR Description: glutathione transferase, putative; protein id: supported by cDNA: 24361., supported by cDNA: gi_11096009, by cDNA: gi_15010755 [Arabidopsis thaliana]
  misc_feature (16)..(239): Homolog of NCBI NO: 15232628 NR Description: glutathione transferase, putative; protein id: supported by cDNA: 21546. [Arabidopsis thaliana] putative glutathione transferase [Arabidopsis thaliana]
  misc_feature (22)..(232): Homolog of NCBI NO: 7595790 NR Description: glutathione S-transferase [Euphorbia esula]
NSRPQETEKKRERPLMAEKEEVKLLGIWASPFSRRVEMALKLKGIPYEYVEEILENKSPLLLALNPIHKKVPVLVHNGKTILESHVILEYIDETWPQNPILPQDPYERSKARFFAKLVDEQIMNVGFISMARADEKGREVLAEQVRELIMYLEKELVGKDYFGGKTVGFLDFVAGSLIPFCLERGWEGIGLEVITEEKFPEFKRWVRNLEKVEIVKDCVPPREEHVEHMNYMAERVRSS

SEQ ID NO: 76253 - protein, 224 aa, Arabidopsis thaliana; identical to SEQ ID NO: 27461
  peptide (1)..(224): Ceres Seq. ID no. 7107340
  misc_feature (86)..(198): Pfam Name: Glutathione S-transferase, C-terminal domain Pfam Description: Glutathione S-transferase, C-terminal domain
  misc_feature (1)..(224): Homolog of NCBI NO: 15227085 NR Description: glutathione transferase (103-1A); protein id: supported by cDNA: 6528., supported by cDNA: gi_17065199,
  misc_feature (1)..(224): Homolog of NCBI NO: 15227084 NR Description: glutathione transferase, putative; protein id: supported by cDNA: gi_11096007 [Arabidopsis thaliana]
  misc_feature (1)..(224): Homolog of NCBI NO: 15227551 NR Description: glutathione transferase, putative; protein id: supported by cDNA: 38727., supported by cDNA: gi_11095999, by cDNA: gi_16226389 [Arabidopsis thaliana]
  misc_feature (1)..(224): Homolog of NCBI NO: 15227086 NR Description: glutathione transferase, putative; protein id: supported by cDNA: gi_11096005, supported by cDNA: gi_14423533
  misc_feature (1)..(224): Homolog of NCBI NO: 14423534 NR Description: putative glutathione S-transferase [Arabidopsis
  misc_feature (1)..(224): Homolog of NCBI NO: 15227550 NR Description: glutathione transferase, putative; protein id: supported by cDNA: gi_11096001, supported by cDNA: gi_20453169
  misc_feature (1)..(223): Homolog of NCBI NO: 15227087 NR Description: glutathione transferase, putative; protein id: supported by cDNA: gi_11096003 [Arabidopsis thaliana]
  misc_feature (1)..(221): Homolog of NCBI NO: 15227082 NR Description: glutathione transferase, putative; protein id: supported by cDNA: 24361., supported by cDNA: gi_11096009, by cDNA: gi_15010755 [Arabidopsis thaliana]
  misc_feature (1)..(224): Homolog of NCBI NO: 15232628 NR Description: glutathione transferase, putative; protein id: supported by cDNA: 21546. [Arabidopsis thaliana] putative glutathione transferase [Arabidopsis thaliana]
  misc_feature (7)..(217): Homolog of NCBI NO: 7595790 NR Description: glutathione S-transferase [Euphorbia esula]

SEQ ID NO: 76254 - protein, 202 aa, Arabidopsis thaliana; identical to SEQ ID NO: 27462
  peptide (1)..(202): Ceres Seq. ID no. 7107341
  misc_feature (64)..(176): Pfam Name: Glutathione S-transferase, C-terminal domain Pfam Description: Glutathione S-transferase, C-terminal domain
  misc_feature (1)..(202): Homolog of NCBI NO: 15227085 NR Description: glutathione transferase (103-1A); protein id: supported by cDNA: 6528., supported by cDNA: gi_17065199,
  misc_feature (1)..(202): Homolog of NCBI NO: 15227084 NR Description: glutathione transferase, putative; protein id: supported by cDNA: gi_11096007 [Arabidopsis thaliana]
  misc_feature (1)..(202): Homolog of NCBI NO: 15227551 NR Description: glutathione transferase, putative; protein id: supported by cDNA: 38727., supported by cDNA: gi_11095999, by cDNA: gi_16226389 [Arabidopsis thaliana]
  misc_feature (1)..(202): Homolog of NCBI NO: 15227086 NR Description: glutathione transferase, putative; protein id: supported by cDNA: gi_11096005, supported by cDNA: gi_14423533
  misc_feature (1)..(202): Homolog of NCBI NO: 14423534 NR Description: putative glutathione S-transferase [Arabidopsis
  misc_feature (1)..(202): Homolog of NCBI NO: 15227550 NR Description: glutathione transferase, putative; protein id: supported by cDNA: gi_11096001, supported by cDNA: gi_20453169
  misc_feature (1)..(201): Homolog of NCBI NO: 15227087 NR Description: glutathione transferase, putative; protein id: supported by cDNA: gi_11096003 [Arabidopsis thaliana]
  misc_feature (1)..(199): Homolog of NCBI NO: 15227082 NR Description: glutathione transferase, putative; protein id: supported by cDNA: 24361., supported by cDNA: gi_11096009, by cDNA: gi_15010755 [Arabidopsis thaliana]
  misc_feature (1)..(202): Homolog of NCBI NO: 15232628 NR Description: glutathione transferase, putative; protein id: supported by cDNA: 21546. [Arabidopsis thaliana] putative glutathione transferase [Arabidopsis thaliana]
  misc_feature (1)..(195): Homolog of NCBI NO: 7595790 NR Description: glutathione S-transferase [Euphorbia esula]

SEQ ID NO: 76255 - DNA, 2674 bp, Arabidopsis thaliana
  misc_feature (1)..(2674): Ceres Seq. ID no. 7107346
  misc_feature: MA Experiment ID: 20000179 Result: Down-regulated in Transcription
  misc_feature: MA Experiment 20000179 PARAMETER Experiment Name: At_Germinating_Seeds_P Parameter: Age (hr) Value: 6 vs. 0
  misc_feature: MA Experiment 20000179 PARAMETER Experiment Name: At_Germinating_Seeds_P Parameter: Tissue Value: Germinating Seeds
  misc_feature: MA Experiment ID: 20000180 Result: Down-regulated in Transcription
  misc_feature: MA Experiment 20000180 PARAMETER Experiment Name: At_Germinating_Seeds_P Parameter: Age (hr) Value: 24 vs. 0
  misc_feature: MA Experiment 20000180 PARAMETER Experiment Name: At_Germinating_Seeds_P Parameter: Tissue Value: Germinating Seeds
atgagcaaatcaagtagaattaggatgaagtcgagaacacgatacttgatagcgattctacttgtaatttcgctctgttccaaggcaagcagccatgatgatgagaaaaagaagaaaggagtaacatacgacggaacttcattgatcataaatggaaaaagagagctctttttctctggttctgttcattaccctcgaagcacacctgacatgtggcccagtatcattgacaaagctagaattgggggacttaacaccatccaaacttatgttttctggaatgtccatgagcctgaacaaggcaagtatgatttcaaggggagatttgacttggtgaaattcatcaaactaatccacgagaaaggtctctatgtcactctcagactcggaccctttatccaagccgaatggaaccacggagggttgccgtactggctacgcgaggtcccagatgtttacttccgtacaaataatgaaccttttaaggaacatacagagagatatgtgaggaaaatacttgggatgatgaaggaagagaagctgttcgcttcacaaggaggtcccatcatcttgggacagatagagaatgagtacaacgcggttcagctagcctacaaggagaatggagagaagtatataaaatgggcagcaaatttggtggagtcaatgaatctgggaatcccctgggttatgtgcaaacaaaacgatgctcctggcaatctgattaatgcttgtaatggaaggcattgcggagatactttcccaggaccaaacagacacgataagccctccttatggaccgagaattggactactcagtttcgagtttttggggatcctccaacacagagaacagccgaagatattgcattctcagtcgctagatacttctctaagaacggatcccatgtcaactactacatgtaccatggcggaacaaacttcggacgcacgtctgctcatttcgttaccactcgttactatgacgatgcgccacttgacgaatttggtttggagaaagctccaaaatacggtcacctaaaacatgtgcacagagcacttagattgtgcaagaaggcacttttttggggtcaacttcgcgcccagacacttggtcccgataccgaggttaggtactacgagcagccagggacaaaagtgtgtgcggctttcttatcgaacaataacacaagagatactaatacgattaaattcaaaggtcaagattacgttttaccgtctcgttctatcagcatcttaccggattgtaaaacagtcgtttacaatactgcacagattgtagcccaacacagttggagagattttgtcaagtcagagaagacaagcaaaggtctcaaatttgagatgtttagtgaaaatattccttccttacttgacggtgattctttgattccgggggagctttattacttaactaaagacaaaacagattatgcttggtataccacaagcgtaaagattgacgaagatgactttccagaccaaaaaggtctgaagactatactgagagtagcgagtcttggtcacgcactgatcgtttacgttaacggagagtacgcagggaaagcacatggacgccatgaaatgaagagtttcgagtttgcaaaaccagtgaactttaaaaccggagataatcgcatttcaattttgggtgtactaaccggattaccagacagtggatcatacatggaacacaggtttgctggtccacgtgctatttcaatcatcggtttaaagtcaggaacgcgagatttgaccgagaacaatgaatggggacatttggccggtttggaaggtgaaaagaaagaggtgtacacagaggaaggatctaagaaggtgaaatgggagaaagatggtgaacgtaagcctcttacgtggtacaagacctactttgagacaccagagggagtgaacgcggtcgcgattaggatgaaaggaatggggaagggattgatttgggttaatggaattggcgtagggagatattggatgtctttcctttctccactgggagagccaactcaaacggagtaccatataccgagatctttcatgaagggggagaagaagaagaacatgctggtgattctcgaggaagaaccaggggtgaagttagagtctattgatttcgtgttggtgaatagagacacaatctgtagtaatgtcggggaggattacccagtatcggtgaaatcgtggaagagagaagggccaaagatagtttcgagaagcaaagatatgaggctaaaggcagtgatgaggtgtccaccggagaaacaaatggtggaagtacaatttgcaagcttcggagatccgacaggaacttgtggtaacttcacaatggggaagtgctctgcatctaagtcaaaggaggtggtcgagaaggagtgtttgggtaggaattattgttccatagtagtagcgagggagacttttggggacaaagggtgtccggagatagtgaagacattggcagtgcaagtcaagtgtgagaagaaagaaggaaaacaagatgagaagaagaagaaagaagataaagacgaagaggaagaggacgatgaagatgatgatgaagaagaagaagaagaagacaaagagaacaaagatacaaaggatatggagaacaaaaatcaagatatgtaaacaagactac

SEQ ID NO: 76256 - protein, 887 aa, Arabidopsis thaliana
  peptide (1)..(887): Ceres Seq. ID no. 7107347
  misc_feature (760)..(837): Pfam Name: Galactose binding lectin domain Pfam Description: Galactose binding lectin domain
  misc_feature (193)..(845): Homolog of NCBI NO: 7484826 NR Description: beta-galactosidase homolog M4E13.70 - Arabidopsis
  misc_feature (17)..(159): Homolog of NCBI NO: 7484826 NR Description: beta-galactosidase homolog M4E13.70 - Arabidopsis
  misc_feature (20)..(724): Homolog of NCBI NO: 10862896 NR Description: putative beta-galactosidase [Nicotiana tabacum]
  misc_feature (41)..(837): Homolog of NCBI NO: 30699255 NR Description: glycosyl hydrolase family 35 (beta-galactosidase)
  misc_feature (41)..(820): Homolog of NCBI NO: 26451843 NR Description: unknown protein [Arabidopsis thaliana]
  misc_feature (41)..(673): Homolog of NCBI NO: 15081596 NR Description: putative beta-galactosidase BG1 [Vitis vinifera]
  misc_feature (628)..(837): Homolog of NCBI NO: 15081596 NR Description: putative beta-galactosidase BG1 [Vitis vinifera]
  misc_feature (40)..(685): Homolog of NCBI NO: 30690633 NR Description: glycosyl hydrolase family 35 (beta-galactosidase)
  misc_feature (629)..(837): Homolog of NCBI NO: 30690633 NR Description: glycosyl hydrolase family 35 (beta-galactosidase)
  misc_feature (41)..(683): Homolog of NCBI NO: 30683905 NR Description: glycosyl hydrolase family 35 (beta-galactosidase)
MSKSSRIRMKSRTRYLIAILLVISLCSKASSHDDEKKKKGVTYDGTSLIINGKRELFFSGSVHYPRSTPDMWPSIIDKARIGGLNTIQTYVFWNVHEPEQGKYDFKGRFDLVKFIKLIHEKGLYVTLRLGPFIQAEWNHGGLPYWLREVPDVYFRTNNEPFKEHTERYVRKILGMMKEEKLFASQGGPIILGQIENEYNAVQLAYKENGEKYIKWAANLVESMNLGIPWVMCKQNDAPGNLINACNGRHCGDTFPGPNRHDKPSLWTENWTTQFRVFGDPPTQRTAEDIAFSVARYFSKNGSHVNYYMYHGGTNFGRTSAHFVTTRYYDDAPLDEFGLEKAPKYGHLKHVHRALRLCKKALFWGQLRAQTLGPDTEVRYYEQPGTKVCAAFLSNNNTRDTNTIKFKGQDYVLPSRSISILPDCKTVVYNTAQIVAQHSWRDFVKSEKTSKGLKFEMFSENIPSLLDGDSLIPGELYYLTKDKTDYAWYTTSVKIDEDDFPDQKGLKTILRVASLGHALIVYVNGEYAGKAHGRHEMKSFEFAKPVNFKTGDNRISILGVLTGLPDSGSYMEHRFAGPRAISIIGLKSGTRDLTENNEWGHLAGLEGEKKEVYTEEGSKKVKWEKDGERKPLTWYKTYFETPEGVNAVAIRMKGMGKGLIWVNGIGVGRYWMSFLSPLGEPTQTEYHIPRSFMKGEKKKNMLVILEEEPGVKLESIDFVLVNRDTICSNVGEDYPVSVKSWKREGPKIVSRSKDMRLKAVMRCPPEKQMVEVQFASFGDPTGTCGNFTMGKCSASKSKEVVEKECLGRNYCSIVVARETFGDKGCPEIVKTLAVQVKCEKKEGKQDEKKKKEDKDEEEEDDEDDDEEEEEEDKENKDTKDMENKNQDM

SEQ ID NO: 76257 - protein, 879 aa, Arabidopsis thaliana
  peptide (1)..(879): Ceres Seq. ID no. 7107348
  misc_feature (752)..(829): Pfam Name: Galactose binding lectin domain Pfam Description: Galactose binding lectin domain
  misc_feature (185)..(837): Homolog of NCBI NO: 7484826 NR Description: beta-galactosidase homolog M4E13.70 - Arabidopsis
  misc_feature (9)..(151): Homolog of NCBI NO: 7484826 NR Description: beta-galactosidase homolog M4E13.70 - Arabidopsis
  misc_feature (12)..(716): Homolog of NCBI NO: 10862896 NR Description: putative beta-galactosidase [Nicotiana tabacum]
  misc_feature (33)..(829): Homolog of NCBI NO: 30699255 NR Description: glycosyl hydrolase family 35 (beta-galactosidase)
  misc_feature (33)..(812): Homolog of NCBI NO: 26451843 NR Description: unknown protein [Arabidopsis thaliana]
  misc_feature (33)..(665): Homolog of NCBI NO: 15081596 NR Description: putative beta-galactosidase BG1 [Vitis vinifera]
  misc_feature (620)..(829): Homolog of NCBI NO: 15081596 NR Description: putative beta-galactosidase BG1 [Vitis vinifera]
  misc_feature (32)..(677): Homolog of NCBI NO: 30690633 NR Description: glycosyl hydrolase family 35 (beta-galactosidase)
  misc_feature (621)..(829): Homolog of NCBI NO: 30690633 NR Description: glycosyl hydrolase family 35 (beta-galactosidase)
  misc_feature (33)..(675): Homolog of NCBI NO: 30683905 NR Description: glycosyl hydrolase family 35 (beta-galactosidase)
MKSRTRYLIAILLVISLCSKASSHDDEKKKKGVTYDGTSLIINGKRELFFSGSVHYPRSTPDMWPSIIDKARIGGLNTIQTYVFWNVHEPEQGKYDFKGRFDLVKFIKLIHEKGLYVTLRLGPFIQAEWNHGGLPYWLREVPDVYFRTNNEPFKEHTERYVRKILGMMKEEKLFASQGGPIILGQIENEYNAVQLAYKENGEKYIKWAANLVESMNLGIPWVMCKQNDAPGNLINACNGRHCGDTFPGPNRHDKPSLWTENWTTQFRVFGDPPTQRTAEDIAFSVARYFSKNGSHVNYYMYHGGTNFGRTSAHFVTTRYYDDAPLDEFGLEKAPKYGHLKHVHRALRLCKKALFWGQLRAQTLGPDTEVRYYEQPGTKVCAAFLSNNNTRDTNTIKFKGQDYVLPSRSISILPDCKTVVYNTAQIVAQHSWRDFVKSEKTSKGLKFEMFSENIPSLLDGDSLIPGELYYLTKDKTDYAWYTTSVKIDEDDFPDQKGLKTILRVASLGHALIVYVNGEYAGKAHGRHEMKSFEFAKPVNFKTGDNRISILGVLTGLPDSGSYMEHRFAGPRAISIIGLKSGTRDLTENNEWGHLAGLEGEKKEVYTEEGSKKVKWEKDGERKPLTWYKTYFETPEGVNAVAIRMKGMGKGLIWVNGIGVGRYWMSFLSPLGEPTQTEYHIPRSFMKGEKKKNMLVILEEEPGVKLESIDFVLVNRDTICSNVGEDYPVSVKSWKREGPKIVSRSKDMRLKAVMRCPPEKQMVEVQFASFGDPTGTCGNFTMGKCSASKSKEVVEKECLGRNYCSIVVARETFGDKGCPEIVKTLAVQVKCEKKEGKQDEKKKKEDKDEEEEDDEDDDEEEEEEDKENKDTKDMENKNQDM

SEQ ID NO: 76258 - protein, 817 aa, Arabidopsis thaliana
  peptide (1)..(817): Ceres Seq. ID no. 7107349
  misc_feature (690)..(767): Pfam Name: Galactose binding lectin domain Pfam Description: Galactose binding lectin domain
  misc_feature (123)..(775): Homolog of NCBI NO: 7484826 NR Description: beta-galactosidase homolog M4E13.70 - Arabidopsis
  misc_feature (1)..(89): Homolog of NCBI NO: 7484826 NR Description: beta-galactosidase homolog M4E13.70 - Arabidopsis
  misc_feature (1)..(654): Homolog of NCBI NO: 10862896 NR Description: putative beta-galactosidase [Nicotiana tabacum]
  misc_feature (1)..(767): Homolog of NCBI NO: 30699255 NR Description: glycosyl hydrolase family 35 (beta-galactosidase)
  misc_feature (1)..(750): Homolog of NCBI NO: 26451843 NR Description: unknown protein [Arabidopsis thaliana]
  misc_feature (1)..(603): Homolog of NCBI NO: 15081596 NR Description: putative beta-galactosidase BG1 [Vitis vinifera]
  misc_feature (558)..(767): Homolog of NCBI NO: 15081596 NR Description: putative beta-galactosidase BG1 [Vitis vinifera]
  misc_feature (1)..(615): Homolog of NCBI NO: 30690633 NR Description: glycosyl hydrolase family 35 (beta-galactosidase)
  misc_feature (559)..(767): Homolog of NCBI NO: 30690633 NR Description: glycosyl hydrolase family 35 (beta-galactosidase)
  misc_feature (1)..(613): Homolog of NCBI NO: 30683905 NR Description: glycosyl hydrolase family 35 (beta-galactosidase)
MWPSIIDKARIGGLNTIQTYVFWNVHEPEQGKYDFKGRFDLVKFIKLIHEKGLYVTLRLGPFIQAEWNHGGLPYWLREVPDVYFRTNNEPFKEHTERYVRKILGMMKEEKLFASQGGPIILGQIENEYNAVQLAYKENGEKYIKWAANLVESMNLGIPWVMCKQNDAPGNLINACNGRHCGDTFPGPNRHDKPSLWTENWTTQFRVFGDPPTQRTAEDIAFSVARYFSKNGSHVNYYMYHGGTNFGRTSAHFVTTRYYDDAPLDEFGLEKAPKYGHLKHVHRALRLCKKALFWGQLRAQTLGPDTEVRYYEQPGTKVCAAFLSNNNTRDTNTIKFKGQDYVLPSRSISILPDCKTVVYNTAQIVAQHSWRDFVKSEKTSKGLKFEMFSENIPSLLDGDSLIPGELYYLTKDKTDYAWYTTSVKIDEDDFPDQKGLKTILRVASLGHALIVYVNGEYAGKAHGRHEMKSFEFAKPVNFKTGDNRISILGVLTGLPDSGSYMEHRFAGPRAISIIGLKSGTRDLTENNEWGHLAGLEGEKKEVYTEEGSKKVKWEKDGERKPLTWYKTYFETPEGVNAVAIRMKGMGKGLIWVNGIGVGRYWMSFLSPLGEPTQTEYHIPRSFMKGEKKKNMLVILEEEPGVKLESIDFVLVNRDTICSNVGEDYPVSVKSWKREGPKIVSRSKDMRLKAVMRCPPEKQMVEVQFASFGDPTGTCGNFTMGKCSASKSKEVVEKECLGRNYCSIVVARETFGDKGCPEIVKTLAVQVKCEKKEGKQDEKKKKEDKDEEEEDDEDDDEEEEEEDKENKDTKDMENKNQDM

SEQ ID NO: 76259 - DNA, 2658 bp, Arabidopsis thaliana
  misc_feature (1)..(2658): Ceres Seq. ID no. 7107362
  misc_feature: MA Experiment ID: 20000315 Result: Down-regulated in Transcription
  misc_feature: MA Experiment 20000315 PARAMETER Experiment Name: At_14day_Shoots-Roots_Sub_P Parameter: Age (day) Value: 14
  misc_feature: MA Experiment 20000315 PARAMETER Experiment Name: At_14day_Shoots-Roots_Sub_P Parameter: Organism Value: A. thaliana
  misc_feature: MA Experiment 20000315 PARAMETER Experiment Name: At_14day_Shoots-Roots_Sub_P Parameter: Plant Line Value: WS
  misc_feature: MA Experiment 20000315 PARAMETER Experiment Name: At_14day_Shoots-Roots_Sub_P Parameter: Tissue Value: Shoots vs. Whole Plant
  misc_feature: MA Experiment ID: 20000328 Result: Down-regulated in Transcription
  misc_feature: MA Experiment 20000328 PARAMETER Experiment Name: At_42deg_Heat_Sub_P Parameter: Age (day) Value: 14
  misc_feature: MA Experiment 20000328 PARAMETER Experiment Name: At_42deg_Heat_Sub_P Parameter: Organism Value: A. thaliana
  misc_feature: MA Experiment 20000328 PARAMETER Experiment Name: At_42deg_Heat_Sub_P Parameter: Plant Line Value: WS
  misc_feature: MA Experiment 20000328 PARAMETER Experiment Name: At_42deg_Heat_Sub_P Parameter: Temperature (deg C) Value: 42 vs. 22
  misc_feature: MA Experiment 20000328 PARAMETER Experiment Name: At_42deg_Heat_Sub_P Parameter: Timepoint (hr) Value: 6
  misc_feature: MA Experiment 20000328 PARAMETER Experiment Name: At_42deg_Heat_Sub_P Parameter: Tissue Value: Aerial
  misc_feature: MA Experiment ID: 20000355 Result: Up-regulated in Transcription
  misc_feature: MA Experiment 20000355 PARAMETER Experiment Name: At_Siliques_Sub_P Parameter: Age (day) Value: 21
  misc_feature: MA Experiment 20000355 PARAMETER Experiment Name: At_Siliques_Sub_P Parameter: Organism Value: A. thaliana
  misc_feature: MA Experiment 20000355 PARAMETER Experiment Name: At_Siliques_Sub_P Parameter: Plant Line Value: WS
  misc_feature: MA Experiment 20000355 PARAMETER Experiment Name: At_Siliques_Sub_P Parameter: Tissue Value: Less Than 5mm Siliques vs. Whole Plant
  misc_feature: MA Experiment ID: 20000440 Result: Up-regulated in Transcription
  misc_feature: MA Experiment 20000440 PARAMETER Experiment Name: At_Closed-Flower__Sub_P Parameter: Tissue Value: Closed Flower vs. Whole Plant
gccgccagtgtgagtaatttaggccagatccaattcggaccaaatcagaacccaaaattcgactcacttgtctcactcgactcgaatctccattctttgtctgaaagtttcttcctttttgtttaaccaatggcgacctttatcaatctggaggattccccaatgtttcagaaacaggtttgttccttggaggggacagctgacgagcttaaagatcgttgtcagaagctatacaaaggtgttaagaagtttatggggactttgggagaggcatctaaaggagaaagtgcttttgcagcttgtctggaagaatttgggggtggacctgatgatcctatcagtctttcaattggagggcccgttatatccaaattcataaatgcacttcgagagcttgcctcttataaggagtttctttgctcacaggtggagcatgtgctacttgagaggttgatgaactttattagtgttgatctacaagaagctaaggagtctcgccatcgatttgataaagctgctcattcgtatgatcagtcgcgcgaaaagtttgtgtctttaaagaagaatacaagaggagaaattgtggcagagttggaagaggatctggagaattcaaagtcaacatttgagaagagccgtttcaatctagtgaattcactgatgactattgaagcgaaaaagaagtatgagtttttagaatctattagcgcaattatggatgcccatctgagatatttcaaacttggatatgacttgttgaatcaactggaaccatttatccatcagatattaacatatgctcagcaatcaaaagaacagtctaagattgaacaagatcgactagcaagacgcattcaagaattcaggacccagtctgaattagacagccaacagctggtcgctaatgcagagtcgtctggtgctaacgggaaccgtgttggtgggaatatcccttacaaaaataccgaaacaagtttaacagcagacaaggaagtaattaaacaggggtatctattaaagcgttcgtcaagtttgagaactgattggaaaagaaagttttttgtccttgatagtcatggctccatgtactattacagaactaatggtaataaatcaatgggatctcatcatcactatagtggatcatctgaccataatactggagtttttggtcgatttcgggcaagacataatcgatcaggttcgctcactgagggcagcttaggctataatactattgatcttcgcacttctttgataaaactagacgcagaagacatggatcttcgtctctgtttcagaattatttctcctcaaaaaacttacacacttcaggctgaaaatggagcagataggatggactgggtaaataagatcacaaaagctatagggacgcttctcaattctcattttctgcaacagtcacctgtgcgatacttggataaagacaactccagttctgctcctgctaatgctgtcgtctccggggatcaaattcgacataatgattcaagacaaaatatcggggatgatgtctcaacaatactcagaggacttccgggaaataatgcatgtgcagagtgcaatgctcctgagcccgattgggcatcgttaaatcttggagttttgttgtgcattcaatgctctggtgttcacaggaatctcggggttcatatatccaaggtgaggtccctctcattagatgtgaaagtgtgggagccaacgatcttggacttatttagaaatttgggtaatgtatactgtaattcactgtgggagggactacttcaccttgacgatgactgcgaagacggatcagcattgtcgcatgcttcagtttcaaaaccatgtccagaagattcctttagtgtgaaggagaaatacattctaggaaagtacctggagaaagcattagtcatcaaggatgaaagtgaagcaaacctttctgctgcgagtagaatatgggaagctgttcaaagcagaaacatacgagaaatctatcgacttatagttactactggggatgtaaatatcatcaataccaagtttgatgatataactgatatcgatgcatatcaccatattgatgcagcagagaaagcagtaaagaaaagacatgatccaactgtatgtcagagaattaaagaatccaacgaaccaagaagctgtcttcaaggatgctccttgctccatgtggcttgtcacattggtgactctgtcttgcttgaattgttgttgcagtttggtgctgacctaaacataagagattatcacggaaggactccgttgcaccattgcatatcatcagggaaccacaaatttgcaaagattctactgcgaagaggagcacgtccgtcgatagaggacgatggagggctaagcgttctagaaagagcgatggaaatgggagcgataactgatgaagagctctttcttctcttagccgagtgcgcataaaccttcactgcacaccgacatgcacagcttctttagaracacctttggraagaccctaaaacgcaaaacaaggaggtggtacaagctactagattccgtaaaggcatgatgaaacagccttttgagtcgttgtttgtcaatgtacaagggatatgattttactgacctacagtttatctctactcacttttcaagtttcgg

SEQ ID NO: 76260 - protein, 775 aa, Arabidopsis thaliana; identical to SEQ ID NO: 45091
  peptide (1)..(775): Ceres Seq. ID no. 7107363
  misc_feature (467)..(603): Pfam Name: Putative GTPase activating protein for Arf Pfam Description: Putative GTPase activating protein for Arf
  misc_feature (331)..(775): Homolog of NCBI NO: 25402625 NR Description: hypothetical protein [imported] - Arabidopsis
  misc_feature (206)..(288): Homolog of NCBI NO: 25402625 NR Description: hypothetical protein [imported] - Arabidopsis
  misc_feature (159)..(480): Homolog of NCBI NO: 15240398 NR Description: GCN4-complementing protein - like; protein id:
  misc_feature (440)..(636): Homolog of NCBI NO: 15240398 NR Description: GCN4-complementing protein - like; protein id:
  misc_feature (4)..(204): Homolog of NCBI NO: 15240398 NR Description: GCN4-complementing protein - like; protein id:
  misc_feature (4)..(346): Homolog of NCBI NO: 30684352 NR Description: ARF GTPase-activating domain-containing protein
  misc_feature (466)..(773): Homolog of NCBI NO: 30684352 NR Description: ARF GTPase-activating domain-containing protein
  misc_feature (20)..(346): Homolog of NCBI NO: 11358303 NR Description: hypothetical protein T31B5.120 - Arabidopsis >gi|7529285|emb|CAB86637.1| putative protein [Arabidopsis
  misc_feature (466)..(773): Homolog of NCBI NO: 11358303 NR Description: hypothetical protein T31B5.120 - Arabidopsis >gi|7529285|emb|CAB86637.1| putative protein [Arabidopsis
  misc_feature (570)..(773): Homolog of NCBI NO: 15240398 NR Description: GCN4-complementing protein - like; protein id:

SEQ ID NO: 76261 - protein, 764 aa, Arabidopsis thaliana; identical to SEQ ID NO: 45092
  peptide (1)..(764): Ceres Seq. ID no. 7107364
  misc_feature (456)..(592): Pfam Name: Putative GTPase activating protein for Arf Pfam Description: Putative GTPase activating protein for Arf
  misc_feature (320)..(764): Homolog of NCBI NO: 25402625 NR Description: hypothetical protein [imported] - Arabidopsis
  misc_feature (195)..(277): Homolog of NCBI NO: 25402625 NR Description: hypothetical protein [imported] - Arabidopsis
  misc_feature (148)..(469): Homolog of NCBI NO: 15240398 NR Description: GCN4-complementing protein - like; protein id:
  misc_feature (429)..(625): Homolog of NCBI NO: 15240398 NR Description: GCN4-complementing protein - like; protein id:
  misc_feature (1)..(193): Homolog of NCBI NO: 15240398 NR Description: GCN4-complementing protein - like; protein id:
  misc_feature (1)..(335): Homolog of NCBI NO: 30684352 NR Description: ARF GTPase-activating domain-containing protein
  misc_feature (455)..(762): Homolog of NCBI NO: 30684352 NR Description: ARF GTPase-activating domain-containing protein
  misc_feature (9)..(335): Homolog of NCBI NO: 11358303 NR Description: hypothetical protein T31B5.120 - Arabidopsis >gi|7529285|emb|CAB86637.1| putative protein [Arabidopsis
  misc_feature (455)..(762): Homolog of NCBI NO: 11358303 NR Description: hypothetical protein T31B5.120 - Arabidopsis >gi|7529285|emb|CAB86637.1| putative protein [Arabidopsis
  misc_feature (559)..(762): Homolog of NCBI NO: 15240398 NR Description: GCN4-complementing protein - like; protein id:

SEQ ID NO: 76262 - protein, 734 aa, Arabidopsis thaliana; identical to SEQ ID NO: 45093
  peptide (1)..(734): Ceres Seq. ID no. 7107365
  misc_feature (426)..(562): Pfam Name: Putative GTPase activating protein for Arf Pfam Description: Putative GTPase activating protein for Arf
  misc_feature (290)..(734): Homolog of NCBI NO: 25402625 NR Description: hypothetical protein [imported] - Arabidopsis
  misc_feature (165)..(247): Homolog of NCBI NO: 25402625 NR Description: hypothetical protein [imported] - Arabidopsis
  misc_feature (118)..(439): Homolog of NCBI NO: 15240398 NR Description: GCN4-complementing protein - like; protein id:
  misc_feature (399)..(595): Homolog of NCBI NO: 15240398 NR Description: GCN4-complementing protein - like; protein id:
  misc_feature (1)..(163): Homolog of NCBI NO: 15240398 NR Description: GCN4-complementing protein - like; protein id:
  misc_feature (1)..(305): Homolog of NCBI NO: 30684352 NR Description: ARF GTPase-activating domain-containing protein
  misc_feature (425)..(732): Homolog of NCBI NO: 30684352 NR Description: ARF GTPase-activating domain-containing protein
  misc_feature (1)..(305): Homolog of NCBI NO: 11358303 NR Description: hypothetical protein T31B5.120 - Arabidopsis >gi|7529285|emb|CAB86637.1| putative protein [Arabidopsis
  misc_feature (425)..(732): Homolog of NCBI NO: 11358303 NR Description: hypothetical protein T31B5.120 - Arabidopsis >gi|7529285|emb|CAB86637.1| putative protein [Arabidopsis
  misc_feature (529)..(732): Homolog of NCBI NO: 15240398 NR Description: GCN4-complementing protein - like; protein id:

SEQ ID NO: 76263 - DNA, 1122 bp, Arabidopsis thaliana
  misc_feature (1)..(1122): Ceres Seq. ID no. 7107396
  misc_feature: MA Experiment ID: 108461 Result: Up-regulated in Transcription
  misc_feature: MA Experiment 108461 PARAMETER Experiment Name: At_Germinating_Seeds_cDNA_P Parameter: Age (day) Value: 1 vs. 0
  misc_feature: MA Experiment 108461 PARAMETER Experiment Name: At_Germinating_Seeds_cDNA_P Parameter: Tissue Value: Germinating Seeds
  misc_feature: MA Experiment ID: 108462 Result: Up-regulated in Transcription
  misc_feature: MA Experiment 108462 PARAMETER Experiment Name: At_Germinating_Seeds_cDNA_P Parameter: Age (day) Value: 2 vs. 0
  misc_feature: MA Experiment 108462 PARAMETER Experiment Name: At_Germinating_Seeds_cDNA_P Parameter: Tissue Value: Germinating Seeds
  misc_feature: MA Experiment ID: 108463 Result: Up-regulated in Transcription
  misc_feature: MA Experiment 108463 PARAMETER Experiment Name: At_Germinating_Seeds_cDNA_P Parameter: Age (day) Value: 3 vs. 0
  misc_feature: MA Experiment 108463 PARAMETER Experiment Name: At_Germinating_Seeds_cDNA_P Parameter: Tissue Value: Germinating Seeds
  misc_feature: MA Experiment ID: 108464 Result: Up-regulated in Transcription
  misc_feature: MA Experiment 108464 PARAMETER Experiment Name: At_Germinating_Seeds_cDNA_P Parameter: Age (day) Value: 4 vs. 0
  misc_feature: MA Experiment 108464 PARAMETER Experiment Name: At_Germinating_Seeds_cDNA_P Parameter: Tissue Value: Germinating Seeds
  misc_feature: MA Experiment ID: 108501 Result: Up-regulated in Transcription
  misc_feature: MA Experiment 108501 PARAMETER Experiment Name: At_ap2_floral_buds_cDNA_P Parameter: Plant Line Value: ap2 (Ler.)
  misc_feature: MA Experiment 108501 PARAMETER Experiment Name: At_ap2_floral_buds_cDNA_P Parameter: Tissue Value: Closed Flower
  misc_feature: MA Experiment ID: 108577 Result: Down-regulated in Transcription
  misc_feature: MA Experiment 108577 PARAMETER Experiment Name: At_42deg_Heat_cDNA_P Parameter: Temperature (deg C) Value: 42 vs. 22
  misc_feature: MA Experiment 108577 PARAMETER Experiment Name: At_42deg_Heat_cDNA_P Parameter: Timepoint (hr) Value: 6
  misc_feature: MA Experiment 108577 PARAMETER Experiment Name: At_42deg_Heat_cDNA_P Parameter: Tissue Value: Aerial
  misc_feature: MA Experiment ID: 20000072 Result: Down-regulated in Transcription
  misc_feature: MA Experiment 20000072 PARAMETER Experiment Name: At_100uM_ABA_Mutants_cDNA_P Parameter: Plant Line Value: CS8105
  misc_feature: MA Experiment 20000072 PARAMETER Experiment Name: At_100uM_ABA_Mutants_cDNA_P Parameter: Timepoint (hr) Value: 6
  misc_feature: MA Experiment 20000072 PARAMETER Experiment Name: At_100uM_ABA_Mutants_cDNA_P Parameter: Tissue Value: Aerial
  misc_feature: MA Experiment 20000072 PARAMETER Experiment Name: At_100uM_ABA_Mutants_cDNA_P Parameter: Treatment Value: 100uM ABA vs. No Treatment
  misc_feature: MA Experiment ID: 20000090 Result: Down-regulated in Transcription
  misc_feature: MA Experiment ID: 20000111 Result: Down-regulated in Transcription
  misc_feature: MA Experiment 20000111 PARAMETER Experiment Name: At_42deg_Heat_cDNA_P Parameter: Temperature (deg C) Value: 42 vs. 22
  misc_feature: MA Experiment 20000111 PARAMETER Experiment Name: At_42deg_Heat_cDNA_P Parameter: Timepoint (hr) Value: 6
  misc_feature: MA Experiment 20000111 PARAMETER Experiment Name: At_42deg_Heat_cDNA_P Parameter: Tissue Value: Aerial
  misc_feature: MA Experiment ID: 20000112 Result: Down-regulated in Transcription
  misc_feature: MA Experiment 20000112 PARAMETER Experiment Name: At_42deg_Heat_cDNA_P Parameter: Temperature (deg C) Value: 42 vs. 22
  misc_feature: MA Experiment 20000112 PARAMETER Experiment Name: At_42deg_Heat_cDNA_P Parameter: Timepoint (hr) Value: 2
  misc_feature: MA Experiment 20000112 PARAMETER Experiment Name: At_42deg_Heat_cDNA_P Parameter: Tissue Value: Aerial
  misc_feature: MA Experiment ID: 20000113 Result: Down-regulated in Transcription
  misc_feature: MA Experiment 20000113 PARAMETER Experiment Name: At_42deg_Heat_cDNA_P Parameter: Temperature (deg C) Value: 42 vs. 22
  misc_feature: MA Experiment 20000113 PARAMETER Experiment Name: At_42deg_Heat_cDNA_P Parameter: Timepoint (hr) Value: 8
  misc_feature: MA Experiment 20000113 PARAMETER Experiment Name: At_42deg_Heat_cDNA_P Parameter: Tissue Value: Aerial
  misc_feature: MA Experiment ID: 20000224 Result: Up-regulated in Transcription
  misc_feature: MA Experiment ID: 20000307 Result: Up-regulated in Transcription
  misc_feature: MA Experiment 20000307 PARAMETER Experiment Name: At_Germinating_Seeds_Sub_P Parameter: Age (hr) Value: 24 vs. 0
  misc_feature: MA Experiment 20000307 PARAMETER Experiment Name: At_Germinating_Seeds_Sub_P Parameter: Organism Value: A. thaliana
  misc_feature: MA Experiment 20000307 PARAMETER Experiment Name: At_Germinating_Seeds_Sub_P Parameter: Plant Line Value: WS
  misc_feature: MA Experiment 20000307 PARAMETER Experiment Name: At_Germinating_Seeds_Sub_P Parameter: Tissue Value: Germinating Seeds
  misc_feature: MA Experiment ID: 20000314 Result: Up-regulated in Transcription
  misc_feature: MA Experiment 20000314 PARAMETER Experiment Name: At_14day_Shoots-Roots_Sub_P Parameter: Age (day) Value: 14
  misc_feature: MA Experiment 20000314 PARAMETER Experiment Name: At_14day_Shoots-Roots_Sub_P Parameter: Organism Value: A. thaliana
  misc_feature: MA Experiment 20000314 PARAMETER Experiment Name: At_14day_Shoots-Roots_Sub_P Parameter: Plant Line Value: WS
  misc_feature: MA Experiment 20000314 PARAMETER Experiment Name: At_14day_Shoots-Roots_Sub_P Parameter: Tissue Value: Roots vs. Whole Plant
  misc_feature: MA Experiment ID: 20000328 Result: Down-regulated in Transcription
  misc_feature: MA Experiment 20000328 PARAMETER Experiment Name: At_42deg_Heat_Sub_P Parameter: Age (day) Value: 14
  misc_feature: MA Experiment 20000328 PARAMETER Experiment Name: At_42deg_Heat_Sub_P Parameter: Organism Value: A. thaliana
  misc_feature: MA Experiment 20000328 PARAMETER Experiment Name: At_42deg_Heat_Sub_P Parameter: Plant Line Value: WS
  misc_feature: MA Experiment 20000328 PARAMETER Experiment Name: At_42deg_Heat_Sub_P Parameter: Temperature (deg C) Value: 42 vs. 22
  misc_feature: MA Experiment 20000328 PARAMETER Experiment Name: At_42deg_Heat_Sub_P Parameter: Timepoint (hr) Value: 6
  misc_feature: MA Experiment 20000328 PARAMETER Experiment Name: At_42deg_Heat_Sub_P Parameter: Tissue Value: Aerial
  misc_feature: MA Experiment ID: 20000355 Result: Up-regulated in Transcription
  misc_feature: MA Experiment 20000355 PARAMETER Experiment Name: At_Siliques_Sub_P Parameter: Age (day) Value: 21
  misc_feature: MA Experiment 20000355 PARAMETER Experiment Name: At_Siliques_Sub_P Parameter: Organism Value: A. thaliana
  misc_feature: MA Experiment 20000355 PARAMETER Experiment Name: At_Siliques_Sub_P Parameter: Plant Line Value: WS
  misc_feature: MA Experiment 20000355 PARAMETER Experiment Name: At_Siliques_Sub_P Parameter: Tissue Value: Less Than 5mm Siliques vs. Whole Plant
  misc_feature: MA Experiment ID: 20000440 Result: Up-regulated in Transcription
  misc_feature: MA Experiment 20000440 PARAMETER Experiment Name: At_Closed-Flower__Sub_P Parameter: Tissue Value: Closed Flower vs. Whole Plant
ccacgcgtccgcacaaacagaggcagagatcttaagagttaaagactaatcccaacaatggcgtctctcaaagtcccaagcaatgttcctcttcccgaagatgacgccgagcaactccacaaggctttttcaggatggggtaccaacgagaagctgatcatatcaatactagctcacaggaacgcagcacaacgcagcttgatccgcagcgtttatgcagctacctacaatgaggatcttctcaaagcattagacaaagagctttctagcgactttgagagagctgtgatgttgtggactcttgatccaccagagagagatgcttatttggctaaagaatccaccaagatgttcaccaagaacaattgggttcttgttgaaatcgcttgcacaaggcctgctcttgagcttatcaaggtcaagcaagcttaccaagctcgatacaagaaatcaatcgaggaagatgtcgcgcaacacacatctggtgaccttcgtaagctcttgcttcctcttgtgagcactttcaggtatgaaggagatgatgtgaacatgatgcttgcaagatctgaagctaagatacttcacgagaaggtctcagagaaatcttacagtgacgatgacttcatcagaatcttgacaacaagaagcaaagcacagctcggtgcaacactcaaccactacaacaacgagtatggaaacgccattaacaagaacttgaaggaagagtcggacgacaatgactacatgaaactactaagagctgtaatcacatgtttgacataccctgagaagcattttgagaaggttcttcgtctatcaatcaacaaaatgggaacagacgaatggggactaacccgagtcgtgactacacgaactgaagttgacatggaacgcatcaaagaggaatatcagcgaagaaacagcattcctttggaccgtgctatcgccaaagacacttctggtgactatgaggacatgcttgttgctcttctcggacatggcgatgcttgaaactgtttcaactttcgagttcctcctttctcttactgcatggtttgttttaaataaaagagttgtgaaactggttctgcaactatttatcaatgatcgtttgagtttgtt

SEQ ID NO: 76264 - protein, 317 aa, Arabidopsis thaliana; identical to SEQ ID NO: 26096
  peptide (1)..(317): Ceres Seq. ID no. 7107397
  misc_feature (168)..(236): Pfam Name: Annexin Pfam Description: Annexin
  misc_feature (1)..(317): Homolog of NCBI NO: 15238320 NR Description: annexin; protein id: At5g65020.1, supported by supported by cDNA: gi_4959107 [Arabidopsis thaliana]
  misc_feature (1)..(317): Homolog of NCBI NO: 15238105 NR Description: annexin -like protein; protein id: At5g10230.1,
  misc_feature (1)..(317): Homolog of NCBI NO: 12667522 NR Description: calcium-binding protein annexin 7 [Arabidopsis
  misc_feature (1)..(317): Homolog of NCBI NO: 15238094 NR Description: annexin -like protein; protein id: At5g10220.1,
  misc_feature (1)..(317): Homolog of NCBI NO: 12667518 NR Description: calcium-binding protein annexin 6 [Arabidopsis
  misc_feature (1)..(317): Homolog of NCBI NO: 4580920 NR Description: vacuole-associated annexin VCaB42 [Nicotiana
  misc_feature (3)..(317): Homolog of NCBI NO: 7441511 NR Description: annexin 2 - upland cotton (fragment)
  misc_feature (8)..(316): Homolog of NCBI NO: 7441509 NR Description: annexin - alfalfa (fragment)
  misc_feature (1)..(317): Homolog of NCBI NO: 3928134 NR Description: annexin P38 [Capsicum annuum]
  misc_feature (1)..(317): Homolog of NCBI NO: 7441508 NR Description: annexin, isoform P35 - tomato

SEQ ID NO: 76265 - protein, 240 aa, Arabidopsis thaliana; identical to SEQ ID NO: 26097
  peptide (1)..(240): Ceres Seq. ID no. 7107398
  misc_feature (91)..(159): Pfam Name: Annexin Pfam Description: Annexin
  misc_feature (1)..(240): Homolog of NCBI NO: 15238320 NR Description: annexin; protein id: At5g65020.1, supported by supported by cDNA: gi_4959107 [Arabidopsis thaliana]
  misc_feature (1)..(240): Homolog of NCBI NO: 15238105 NR Description: annexin -like protein; protein id: At5g10230.1,
  misc_feature (1)..(240): Homolog of NCBI NO: 12667522 NR Description: calcium-binding protein annexin 7 [Arabidopsis
  misc_feature (1)..(240): Homolog of NCBI NO: 15238094 NR Description: annexin -like protein; protein id: At5g10220.1,
  misc_feature (1)..(240): Homolog of NCBI NO: 12667518 NR Description: calcium-binding protein annexin 6 [Arabidopsis
  misc_feature (1)..(240): Homolog of NCBI NO: 4580920 NR Description: vacuole-associated annexin VCaB42 [Nicotiana
  misc_feature (1)..(240): Homolog of NCBI NO: 7441511 NR Description: annexin 2 - upland cotton (fragment)
  misc_feature (1)..(239): Homolog of NCBI NO: 7441509 NR Description: annexin - alfalfa (fragment)
  misc_feature (1)..(240): Homolog of NCBI NO: 3928134 NR Description: annexin P38 [Capsicum annuum]
  misc_feature (1)..(240): Homolog of NCBI NO: 7441508 NR Description: annexin, isoform P35 - tomato

SEQ ID NO: 76266 - protein, 220 aa, Arabidopsis thaliana; identical to SEQ ID NO: 26098
  peptide (1)..(220): Ceres Seq. ID no. 7107399
  misc_feature (71)..(139): Pfam Name: Annexin Pfam Description: Annexin
  misc_feature (1)..(220): Homolog of NCBI NO: 15238320 NR Description: annexin; protein id: At5g65020.1, supported by supported by cDNA: gi_4959107 [Arabidopsis thaliana]
  misc_feature (1)..(220): Homolog of NCBI NO: 15238105 NR Description: annexin -like protein; protein id: At5g10230.1,
  misc_feature (1)..(220): Homolog of NCBI NO: 12667522 NR Description: calcium-binding protein annexin 7 [Arabidopsis
  misc_feature (1)..(220): Homolog of NCBI NO: 15238094 NR Description: annexin -like protein; protein id: At5g10220.1,
  misc_feature (1)..(220): Homolog of NCBI NO: 12667518 NR Description: calcium-binding protein annexin 6 [Arabidopsis
  misc_feature (1)..(220): Homolog of NCBI NO: 4580920 NR Description: vacuole-associated annexin VCaB42 [Nicotiana
  misc_feature (1)..(220): Homolog of NCBI NO: 7441511 NR Description: annexin 2 - upland cotton (fragment)
  misc_feature (1)..(219): Homolog of NCBI NO: 7441509 NR Description: annexin - alfalfa (fragment)
  misc_feature (1)..(220): Homolog of NCBI NO: 3928134 NR Description: annexin P38 [Capsicum annuum]
  misc_feature (1)..(220): Homolog of NCBI NO: 7441508 NR Description: annexin, isoform P35 - tomato

SEQ ID NO: 76267 - DNA, 2564 bp, Arabidopsis thaliana
  misc_feature (1)..(2564): Ceres Seq. ID no. 7107400
  misc_feature: MA Experiment ID: 20000171 Result: Down-regulated in Transcription
  misc_feature: MA Experiment 20000171 PARAMETER Experiment Name: At_42deg_Heat_P Parameter: Age (day) Value: 14
  misc_feature: MA Experiment 20000171 PARAMETER Experiment Name: At_42deg_Heat_P Parameter: Organism Value: A. thaliana
  misc_feature: MA Experiment 20000171 PARAMETER Experiment Name: At_42deg_Heat_P Parameter: Plant Line Value: WS
  misc_feature: MA Experiment 20000171 PARAMETER Experiment Name: At_42deg_Heat_P Parameter: Temperature (deg C) Value: 42 vs. 22
  misc_feature: MA Experiment 20000171 PARAMETER Experiment Name: At_42deg_Heat_P Parameter: Timepoint (hr) Value: 1
  misc_feature: MA Experiment 20000171 PARAMETER Experiment Name: At_42deg_Heat_P Parameter: Tissue Value: Aerial
  misc_feature: MA Experiment ID: 20000185 Result: Up-regulated in Transcription
  misc_feature: MA Experiment 20000185 PARAMETER Experiment Name: At_Roots__P Parameter: Age (day) Value: 7 vs. 21
  misc_feature: MA Experiment 20000185 PARAMETER Experiment Name: At_Roots__P Parameter: Organism Value: A. thaliana
  misc_feature: MA Experiment 20000185 PARAMETER Experiment Name: At_Roots__P Parameter: Tissue Value: Roots vs. Whole Plant
  misc_feature: MA Experiment ID: 20000227 Result: Up-regulated in Transcription
  misc_feature: MA Experiment 20000227 PARAMETER Experiment Name: At_Root-Tips-vs-Tops_P Parameter: Tissue Value: Root Tips vs. Root Tops
  misc_feature: MA Experiment ID: 20000234 Result: Up-regulated in Transcription
  misc_feature: MA Experiment 20000234 PARAMETER Experiment Name: At_Siliques_P Parameter: Age (day) Value: 21
  misc_feature: MA Experiment 20000234 PARAMETER Experiment Name: At_Siliques_P Parameter: Organism Value: A. thaliana
  misc_feature: MA Experiment 20000234 PARAMETER Experiment Name: At_Siliques_P Parameter: Plant Line Value: WS
  misc_feature: MA Experiment 20000234 PARAMETER Experiment Name: At_Siliques_P Parameter: Tissue Value: Less Than 5mm Siliques vs. Whole Plant
  misc_feature: MA Experiment ID: 20000264 Result: Up-regulated in Transcription
  misc_feature: MA Experiment 20000264 PARAMETER Experiment Name: At_Open_Flower_P Parameter: Age (day) Value: 21
  misc_feature: MA Experiment 20000264 PARAMETER Experiment Name: At_Open_Flower_P Parameter: Plant Line Value: WS
  misc_feature: MA Experiment 20000264 PARAMETER Experiment Name: At_Open_Flower_P Parameter: Tissue Value: Open Flower vs. Whole Plant
  misc_feature: MA Experiment ID: 20000265 Result: Up-regulated in Transcription
  misc_feature: MA Experiment 20000265 PARAMETER Experiment Name: At_Open_Flower_P Parameter: Age (day) Value: 21
  misc_feature: MA Experiment 20000265 PARAMETER Experiment Name: At_Open_Flower_P Parameter: Plant Line Value: WS
  misc_feature: MA Experiment 20000265 PARAMETER Experiment Name: At_Open_Flower_P Parameter: Tissue Value: Closed Flower vs. Whole Plant
  misc_feature: MA Experiment ID: 20000286 Result: Up-regulated in Transcription
  misc_feature: MA Experiment 20000286 PARAMETER Experiment Name: At_Open_Flower_P Parameter: Age (day) Value: 21
  misc_feature: MA Experiment 20000286 PARAMETER Experiment Name: At_Open_Flower_P Parameter: Plant Line Value: WS
  misc_feature: MA Experiment 20000286 PARAMETER Experiment Name: At_Open_Flower_P Parameter: Tissue Value: Half Open vs. Whole Plant
  misc_feature: MA Experiment ID: 20000437 Result: Down-regulated in Transcription
  misc_feature: MA Experiment 20000437 PARAMETER Experiment Name: At_Drought_P Parameter: Age (day) Value: 8
  misc_feature: MA Experiment 20000437 PARAMETER Experiment Name: At_Drought_P Parameter: Organism Value: A. thaliana
  misc_feature: MA Experiment 20000437 PARAMETER Experiment Name: At_Drought_P Parameter: Plant Line Value: WS
  misc_feature: MA Experiment 20000437 PARAMETER Experiment Name: At_Drought_P Parameter: Timepoint (hr) Value: 24
  misc_feature: MA Experiment 20000437 PARAMETER Experiment Name: At_Drought_P Parameter: Tissue Value: Whole Plant
  misc_feature: MA Experiment 20000437 PARAMETER Experiment Name: At_Drought_P Parameter: Treatment Value: Drought vs. No Drought
  misc_feature: MA Experiment ID: 20000495 Result: Up-regulated in Transcription
  misc_feature: MA Experiment 20000495 PARAMETER Experiment Name: At_Guard_Cells_P Parameter: Harvest Date Value: 8/2/2002
  misc_feature: MA Experiment 20000495 PARAMETER Experiment Name: At_Guard_Cells_P Parameter: Organism Value: A. thaliana
  misc_feature: MA Experiment 20000495 PARAMETER Experiment Name: At_Guard_Cells_P Parameter: Tissue Value: Guard Cells vs. Leaves
  misc_feature: MA Experiment ID: 20001451 Result: Down-regulated in Transcription
  misc_feature: MA Experiment 20001451 PARAMETER Experiment Name: At_Far-red-induction_P Parameter: Age (day) Value: 7
  misc_feature: MA Experiment 20001451 PARAMETER Experiment Name: At_Far-red-induction_P Parameter: Light Value: Far-red vs. White
  misc_feature: MA Experiment 20001451 PARAMETER Experiment Name: At_Far-red-induction_P Parameter: Organism Value: A. thaliana
  misc_feature: MA Experiment 20001451 PARAMETER Experiment Name: At_Far-red-induction_P Parameter: Plant Line Value: Columbia
  misc_feature: MA Experiment 20001451 PARAMETER Experiment Name: At_Far-red-induction_P Parameter: Timepoint (hr) Value: 24
  misc_feature: MA Experiment 20001451 PARAMETER Experiment Name: At_Far-red-induction_P Parameter: Tissue Value: Whole Plant
gacgaagatggaaaagatctgtgtcgcagtcagggtaagaccgccggcgccggaaaacggagcttcactctggaaagtcgaagataatcggatctctcttcataaatcactcgacactccaatcacaaccgcttctcacgcttttgatcatgtgttcgacgaaagttctacgaatgctagtgtctacgagcttcttactaaggatatcatacatgccgctgttgagggttttaatggtactgcatttgcttatgggcaaactagtagtgggaagacgtttacgatgacgggctctgaaactgatcctggaattattcgaagatctgttcgagatgtgtttgaaagaatacatatgatatctgatcgtgagtttctcatccgggtttcgtacatggaaatttacaacgaagaaattaatgatcttttagctgttgagaaccagagactgcaaattcatgagcatttggagcgtggagtgtttgttgctggtcttaaggaagaaattgttagtgatgctgaacagattctaaagcttatagattctggagaagttaataggcactttggcgagacaaacatgaatgttcatagtagcaggtctcacaccatattcagaatggtgattgagagcaggggaaaagataatagttcttcagatgctattcgtgtctcagtcttgaatttggtcgatttagctggatctgagcgaattgctaaaactggtgctggtggtgtacgcttgcaagaagggaagtacattaataagagcttaatgattcttggtaatgtcatcaataaattaagtgacagtacaaagctaagggcacatattccgtaccgagatagtaagctgactcgaattcttcagcctgcacttggtggtaatgcaaagacctgcattatatgcactatcgcaccagaagagcatcatattgaggaatcaaaaggaactctccaatttgcaagcagagcaaagcgcatcaccaactgtgctcaagtgaatgagatcttgactgatgccgctttattgaagcgccaaaagttggagatagaagagctacgcatgaagcttcagggatctcatgcggaagtgttggaacaagagatcttaaatttaagcaatcagatgctgaagtatgagttggaatgtgaaaggctaaaaacacaactggaagaagagaaaaggaagcagaaggagcaggaaaattgcatcaaggagcaacagatgaaaattgagaaccttaacaattttgtcactaattctgacttcaagaggaaccagtcagaggactttatcatttcaagaaagactccagatgggctatgcaatgtcaatgacactagcgatgttcctggaaccccttgctttaaatcagcttcccgttcctttgtggttgctcggtcaaataattattcaggactatctgattttagtccgatggttcattccctgggggacgtggccgatgaagatacttggatgaaactaaacaagggttttgttgcagaccttgatcaaatccaatttacacctgctgttaaatgtcaacccactcctttaagtattgcaaccacggagtgcccgcgtgaaaatcactcagaggtggaagatctcaaaagtcggattcagttgctgaccaatgagaatgacagtcttcaggtaaaatttaatgaacaagtactcctgagcaacaatctgatgcaagagatgtctgagctcaaacaagaaacgcttactgtgaaagaaattccgaataggttatctgagtcagttgctaattgcaaagatgtctacaaggatgtcatagtcactatgaagagcttaatcactgacaaggaatctccaacggcaaacctgctcctgggtacaactgaaatcacaacgagcctactggcaactctagaaacacaattctcaatgataatggatggtcagaaaacgggtagtagcatagatcatcctttatctgaccattgggaaacacttcgtgtgaatctgaagaacacaacgacgttgttgctgtcagacgcacaagcaaaagatgaatttttgaactcccacaacaagggacaagaaacagctgctttggaggagaagaaactgaagtctgagctcatcatcatcaaggaaagatacaacgagctcgagaaagagttgtgtttggataaacagcttctagaagcttcaagagaaagtcatgagaagctgataaaagaggtacagttcctgaaggaagaaagagattctttagatagaaaaatctctcaatcaactcagagattgagagtgattgcaagtgataaagagaatgctttgaaagatcttaatgtggaagtgaagaggaggaaagatatggaggaagagattaagcacatcagcattgctttcgctaccaggcacaaatcttttgtgtcttttcacagtgaaatcaagtccaaaatgcagaaactaaccactcaaaactcaaaagctccttagcaaaaacagttaagtttgttgaatttgtatgtttaatttatcaccggattcgctaatgttgattaagaaagtgaagaacctattt

SEQ ID NO: 76268 - protein, 825 aa, Arabidopsis thaliana
  peptide (1)..(825): Ceres Seq. ID no. 7107401
  misc_feature (331)..(414): Pfam Name: Myosin tail Pfam Description: Myosin tail
  misc_feature (3)..(813): Homolog of NCBI NO: 22330953 NR Description: kinesin-related protein; protein id: At3g10180.1
  misc_feature (49)..(427): Homolog of NCBI NO: 6056206 NR Description: putative kinesin-like centromere protein
  misc_feature (335)..(825): Homolog of NCBI NO: 25404863 NR Description: protein T30E16.9 [imported] - Arabidopsis >gi|8778739|gb|AAF79747.1|AC009317_6 T30E16.9 [Arabidopsis
  misc_feature (6)..(802): Homolog of NCBI NO: 40789293 NR Description: cDNA sequence BC049989 [Mus musculus]
  misc_feature (6)..(812): Homolog of NCBI NO: 4502781 NR Description: centromere protein E; Centromere autoantigen E centromere protein E (312kD); kinesin family member 10 [Homo
  misc_feature (6)..(812): Homolog of NCBI NO: 382658 NR Description: CENP-E protein
  misc_feature (5)..(769): Homolog of NCBI NO: 7512169 NR Description: kinesin-related protein - African clawed frog
  misc_feature (80)..(789): Homolog of NCBI NO: 34860597 NR Description: similar to CENTROMERIC PROTEIN E (CENP-E PROTEIN)
  misc_feature (6)..(80): Homolog of NCBI NO: 34860597 NR Description: similar to CENTROMERIC PROTEIN E (CENP-E PROTEIN)
  misc_feature (36)..(428): Homolog of NCBI NO: 40074465 NR Description: kinesin family member 11 [Dictyostelium
TKMEKICVAVRVRPPAPENGASLWKVEDNRISLHKSLDTPITTASHAFDHVFDESSTNASVYELLTKDIIHAAVEGFNGTAFAYGQTSSGKTFTMTGSETDPGIIRRSVRDVFERIHMISDREFLIRVSYMEIYNEEINDLLAVENQRLQIHEHLERGVFVAGLKEEIVSDAEQILKLIDSGEVNRHFGETNMNVHSSRSHTIFRMVIESRGKDNSSSDAIRVSVLNLVDLAGSERIAKTGAGGVRLQEGKYINKSLMILGNVINKLSDSTKLRAHIPYRDSKLTRILQPALGGNAKTCIICTIAPEEHHIEESKGTLQFASRAKRITNCAQVNEILTDAALLKRQKLEIEELRMKLQGSHAEVLEQEILNLSNQMLKYELECERLKTQLEEEKRKQKEQENCIKEQQMKIENLNNFVTNSDFKRNQSEDFIISRKTPDGLCNVNDTSDVPGTPCFKSASRSFVVARSNNYSGLSDFSPMVHSLGDVADEDTWMKLNKGFVADLDQIQFTPAVKCQPTPLSIATTECPRENHSEVEDLKSRIQLLTNENDSLQVKFNEQVLLSNNLMQEMSELKQETLTVKEIPNRLSESVANCKDVYKDVIVTMKSLITDKESPTANLLLGTTEITTSLLATLETQFSMIMDGQKTGSSIDHPLSDHWETLRVNLKNTTTLLLSDAQAKDEFLNSHNKGQETAALEEKKLKSELIIIKERYNELEKELCLDKQLLEASRESHEKLIKEVQFLKEERDSLDRKISQSTQRLRVIASDKENALKDLNVEVKRRKDMEEEIKHISIAFATRHKSFVSFHSEIKSKMQKLTTQNSKAP

SEQ ID NO: 76269 - protein, 823 aa, Arabidopsis thaliana; identical to SEQ ID NO: 44810
  peptide (1)..(823): Ceres Seq. ID no. 7107402
  misc_feature (329)..(412): Pfam Name: Myosin tail Pfam Description: Myosin tail
  misc_feature (1)..(811): Homolog of NCBI NO: 22330953 NR Description: kinesin-related protein; protein id: At3g10180.1
  misc_feature (47)..(425): Homolog of NCBI NO: 6056206 NR Description: putative kinesin-like centromere protein
  misc_feature (333)..(823): Homolog of NCBI NO: 25404863 NR Description: protein T30E16.9 [imported] - Arabidopsis >gi|8778739|gb|AAF79747.1|AC009317_6 T30E16.9 [Arabidopsis
  misc_feature (4)..(800): Homolog of NCBI NO: 40789293 NR Description: cDNA sequence BC049989 [Mus musculus]
  misc_feature (4)..(810): Homolog of NCBI NO: 4502781 NR Description: centromere protein E; Centromere autoantigen E centromere protein E (312kD); kinesin family member 10 [Homo
  misc_feature (4)..(810): Homolog of NCBI NO: 382658 NR Description: CENP-E protein
  misc_feature (3)..(767): Homolog of NCBI NO: 7512169 NR Description: kinesin-related protein - African clawed frog
  misc_feature (78)..(787): Homolog of NCBI NO: 34860597 NR Description: similar to CENTROMERIC PROTEIN E (CENP-E PROTEIN)
  misc_feature (4)..(78): Homolog of NCBI NO: 34860597 NR Description: similar to CENTROMERIC PROTEIN E (CENP-E PROTEIN)
  misc_feature (34)..(426): Homolog of NCBI NO: 40074465 NR Description: kinesin family member 11 [Dictyostelium

SEQ ID NO: 76270 - protein, 731 aa, Arabidopsis thaliana; identical to SEQ ID NO: 44811
  peptide (1)..(731): Ceres Seq. ID no. 7107403
  misc_feature (237)..(320): Pfam Name: Myosin tail Pfam Description: Myosin tail
  misc_feature (1)..(719): Homolog of NCBI NO: 22330953 NR Description: kinesin-related protein; protein id: At3g10180.1
  misc_feature (1)..(333): Homolog of NCBI NO: 6056206 NR Description: putative kinesin-like centromere protein
  misc_feature (241)..(731): Homolog of NCBI NO: 25404863 NR Description: protein T30E16.9 [imported] - Arabidopsis >gi|8778739|gb|AAF79747.1|AC009317_6 T30E16.9 [Arabidopsis
  misc_feature (1)..(708): Homolog of NCBI NO: 40789293 NR Description: cDNA sequence BC049989 [Mus musculus]
  misc_feature (1)..(718): Homolog of NCBI NO: 4502781 NR Description: centromere protein E; Centromere autoantigen E centromere protein E (312kD); kinesin family member 10 [Homo
  misc_feature (1)..(718): Homolog of NCBI NO: 382658 NR Description: CENP-E protein
  misc_feature (1)..(675): Homolog of NCBI NO: 7512169 NR Description: kinesin-related protein - African clawed frog
  misc_feature (1)..(695): Homolog of NCBI NO: 34860597 NR Description: similar to CENTROMERIC PROTEIN E (CENP-E PROTEIN)
  misc_feature (1)..(334): Homolog of NCBI NO: 40074465 NR Description: kinesin family member 11 [Dictyostelium
  misc_feature (1)..(300): Homolog of NCBI NO: 31217360 NR Description: Unknown (protein for IMAGE:30053884) [Mus

SEQ ID NO: 76271 - DNA, 1450 bp, Arabidopsis thaliana
  misc_feature (1)..(1450): Ceres Seq. ID no. 7107412
  misc_feature: MA Experiment ID: 108434 Result: Up-regulated in Transcription
  misc_feature: MA Experiment 108434 PARAMETER Experiment Name: At_Root_Tips_cDNA_P Parameter: Tissue Value: Root Tips
  misc_feature: MA Experiment ID: 108462 Result: Down-regulated in Transcription
  misc_feature: MA Experiment 108462 PARAMETER Experiment Name: At_Germinating_Seeds_cDNA_P Parameter: Age (day) Value: 2 vs. 0
  misc_feature: MA Experiment 108462 PARAMETER Experiment Name: At_Germinating_Seeds_cDNA_P Parameter: Tissue Value: Germinating Seeds
  misc_feature: MA Experiment ID: 108463 Result: Down-regulated in Transcription
  misc_feature: MA Experiment 108463 PARAMETER Experiment Name: At_Germinating_Seeds_cDNA_P Parameter: Age (day) Value: 3 vs. 0
  misc_feature: MA Experiment 108463 PARAMETER Experiment Name: At_Germinating_Seeds_cDNA_P Parameter: Tissue Value: Germinating Seeds
gaattcggcacgagctgacgtcagcatacctgctaccacttccagagttcaatcgatcttcgcctcgttgaaacgttttccctcttcgattatcaacagtgtctccactcgtatcatcaccgcctccaactaattttgccatctctctcgttgttccaatttgattctactagtgagctccgatttaatttagggttttgaaagatgtcagctttgaaaaattacggcttgatctccattgattctgccctccattttcctcgatcaaatcaattgcagagctataagaggaatgcaaaatgggtctctccaatagcagctgttgtacctaacttccatcttcctatgcgcagtctcgaggataaaaacaggacaaacacagacgacataaggtcccttagagtgatcacagccattaagacaccgtatctacctgatggaagattcgacctccaagcatacgatgacttagtcaacacgcagatagaaaacggtgctgaaggtgtgattgttggtggtacaactggtgaaggccaattgatgagctgggatgagcacataatgcttatcggccatactgtaaattgttttgggggaaggatcaaagtcattggaaacactggaagtaactcgactagggaagctattcatgccactgagcaaggattcgccatgggaatgcacggggcactgcacattaacccttactatggaaaaacatccattgaaggcatgaatgcgcattttcaaaccgttcttcatatgggaccgactattatatacaacgtgccaggtcgaacgtgccaggatatacctccccaggttatctttaaactctctcagaaccctaatatggctggggttaaggaatgcgttggtaataaccgagttgaagagtatactgagaagggaattgtcgtttggagtggaaatgatgatcagtgccatgattctagatgggatcacggtgccactggagtgatatcggttactagcaatttagttccgggtttgatgaggaagttgatgtttgaaggtagaaactcagcgttgaacgaaaagcttcttcctttaatggattggctattccaagaaccgaatcccattggtgtaaacactgctttggctcagttaggagttgcgaggccggtttttcggttaccttatgtgccattgcctctgtccaaaaggattgagttcgttaaactggtgaaggaaatcggaagggagcattttgtaggagacagagatgttcaggtacttgatgatgatgacttcatcttaatcggtcgatattagagtctcttccctgaagattggttgtgtttatactttcttcgttcagttgttagttatttagctgatgagaaactcacagatggatcaagacttctacttgttgtaatgtttggtctgttacttttggtgatgaatctaatggcttttgctt

SEQ ID NO: 76272 - protein, 364 aa, Arabidopsis thaliana
  peptide (1)..(364): Ceres Seq. ID no. 7107413
  misc_feature (63)..(340): Pfam Name: Dihydrodipicolinate synthetase family Pfam Description: Dihydrodipicolinate synthetase family
  misc_feature (1)..(364): Homolog of NCBI NO: 1076317 NR Description: dihydrodipicolinate synthase (EC 4.2.1.52)
  misc_feature (1)..(364): Homolog of NCBI NO: 15232971 NR Description: dihydrodipicolinate synthase precursor; protein At3g60880.1, supported by cDNA: 37907. [Arabidopsis thaliana] Dihydrodipicolinate synthase 1, chloroplast precursor (DHDPS 1)
  misc_feature (1)..(364): Homolog of NCBI NO: 30695296 NR Description: dihydrodipicolinate synthase precursor thaliana] >gi|17380974|gb|AAL36299.1| putative synthase precursor [Arabidopsis thaliana]
  misc_feature (1)..(364): Homolog of NCBI NO: 15225477 NR Description: putative dihydrodipicolinate synthase; protein At2g45440.1, supported by cDNA: 26817. [Arabidopsis thaliana]
  misc_feature (1)..(364): Homolog of NCBI NO: 11066382 NR Description: dihydrodipicolinate synthase 2 [Arabidopsis
  misc_feature (1)..(363): Homolog of NCBI NO: 8648949 NR Description: dihydrodipicolinate synthase [Populus balsamifera
  misc_feature (1)..(363): Homolog of NCBI NO: 1076280 NR Description: dihydrodipicolinate synthase (EC 4.2.1.52)
  misc_feature (28)..(364): Homolog of NCBI NO: 6014908 NR Description: Dihydrodipicolinate synthase, chloroplast (DHDPS) >gi|7436660|pir||T03214 dihydrodipicolinate synthase (EC
  misc_feature (38)..(364): Homolog of NCBI NO: 6014907 NR Description: Dihydrodipicolinate synthase, chloroplast
  misc_feature (39)..(364): Homolog of NCBI NO: 1084359 NR Description: dihydrodipicolinate synthase (EC 4.2.1.52)
MSALKNYGLISIDSALHFPRSNQLQSYKRNAKWVSPIAAVVPNFHLPMRSLEDKNRTNTDDIRSLRVITAIKTPYLPDGRFDLQAYDDLVNTQIENGAEGVIVGGTTGEGQLMSWDEHIMLIGHTVNCFGGRIKVIGNTGSNSTREAIHATEQGFAMGMHGALHINPYYGKTSIEGMNAHFQTVLHMGPTIIYNVPGRTCQDIPPQVIFKLSQNPNMAGVKECVGNNRVEEYTEKGIVVWSGNDDQCHDSRWDHGATGVISVTSNLVPGLMRKLMFEGRNSALNEKLLPLMDWLFQEPNPIGVNTALAQLGVARPVFRLPYVPLPLSKRIEFVKLVKEIGREHFVGDRDVQVLDDDDFILIGRY

SEQ ID NO: 76273 - protein, 317 aa, Arabidopsis thaliana
  peptide (1)..(317): Ceres Seq. ID no. 7107414
  misc_feature (16)..(293): Pfam Name: Dihydrodipicolinate synthetase family Pfam Description: Dihydrodipicolinate synthetase family
  misc_feature (1)..(317): Homolog of NCBI NO: 1076317 NR Description: dihydrodipicolinate synthase (EC 4.2.1.52)
  misc_feature (1)..(317): Homolog of NCBI NO: 15232971 NR Description: dihydrodipicolinate synthase precursor; protein At3g60880.1, supported by cDNA: 37907. [Arabidopsis thaliana] Dihydrodipicolinate synthase 1, chloroplast precursor (DHDPS 1)
  misc_feature (1)..(317): Homolog of NCBI NO: 30695296 NR Description: dihydrodipicolinate synthase precursor thaliana] >gi|17380974|gb|AAL36299.1| putative synthase precursor [Arabidopsis thaliana]
  misc_feature (1)..(317): Homolog of NCBI NO: 15225477 NR Description: putative dihydrodipicolinate synthase; protein At2g45440.1, supported by cDNA: 26817. [Arabidopsis thaliana]
  misc_feature (1)..(317): Homolog of NCBI NO: 11066382 NR Description: dihydrodipicolinate synthase 2 [Arabidopsis
  misc_feature (1)..(316): Homolog of NCBI NO: 8648949 NR Description: dihydrodipicolinate synthase [Populus balsamifera
  misc_feature (1)..(316): Homolog of NCBI NO: 1076280 NR Description: dihydrodipicolinate synthase (EC 4.2.1.52)
  misc_feature (1)..(317): Homolog of NCBI NO: 6014908 NR Description: Dihydrodipicolinate synthase, chloroplast (DHDPS) >gi|7436660|pir||T03214 dihydrodipicolinate synthase (EC
  misc_feature (1)..(317): Homolog of NCBI NO: 6014907 NR Description: Dihydrodipicolinate synthase, chloroplast
  misc_feature (1)..(317): Homolog of NCBI NO: 1084359 NR Description: dihydrodipicolinate synthase (EC 4.2.1.52)
MRSLEDKNRTNTDDIRSLRVITAIKTPYLPDGRFDLQAYDDLVNTQIENGAEGVIVGGTTGEGQLMSWDEHIMLIGHTVNCFGGRIKVIGNTGSNSTREAIHATEQGFAMGMHGALHINPYYGKTSIEGMNAHFQTVLHMGPTIIYNVPGRTCQDIPPQVIFKLSQNPNMAGVKECVGNNRVEEYTEKGIVVWSGNDDQCHDSRWDHGATGVISVTSNLVPGLMRKLMFEGRNSALNEKLLPLMDWLFQEPNPIGVNTALAQLGVARPVFRLPYVPLPLSKRIEFVKLVKEIGREHFVGDRDVQVLDDDDFILIGRY

SEQ ID NO: 76274 - protein, 252 aa, Arabidopsis thaliana
  peptide (1)..(252): Ceres Seq. ID no. 7107415
  misc_feature (1)..(228): Pfam Name: Dihydrodipicolinate synthetase family Pfam Description: Dihydrodipicolinate synthetase family
  misc_feature (1)..(252): Homolog of NCBI NO: 1076317 NR Description: dihydrodipicolinate synthase (EC 4.2.1.52)
  misc_feature (1)..(252): Homolog of NCBI NO: 15232971 NR Description: dihydrodipicolinate synthase precursor; protein At3g60880.1, supported by cDNA: 37907. [Arabidopsis thaliana] Dihydrodipicolinate synthase 1, chloroplast precursor (DHDPS 1)
  misc_feature (1)..(252): Homolog of NCBI NO: 30695296 NR Description: dihydrodipicolinate synthase precursor thaliana] >gi|17380974|gb|AAL36299.1| putative synthase precursor [Arabidopsis thaliana]
  misc_feature (1)..(252): Homolog of NCBI NO: 15225477 NR Description: putative dihydrodipicolinate synthase; protein At2g45440.1, supported by cDNA: 26817. [Arabidopsis thaliana]
  misc_feature (1)..(252): Homolog of NCBI NO: 11066382 NR Description: dihydrodipicolinate synthase 2 [Arabidopsis
  misc_feature (1)..(251): Homolog of NCBI NO: 8648949 NR Description: dihydrodipicolinate synthase [Populus balsamifera
  misc_feature (1)..(251): Homolog of NCBI NO: 1076280 NR Description: dihydrodipicolinate synthase (EC 4.2.1.52)
  misc_feature (1)..(252): Homolog of NCBI NO: 6014908 NR Description: Dihydrodipicolinate synthase, chloroplast (DHDPS) >gi|7436660|pir||T03214 dihydrodipicolinate synthase (EC
  misc_feature (1)..(252): Homolog of NCBI NO: 6014907 NR Description: Dihydrodipicolinate synthase, chloroplast
  misc_feature (1)..(252): Homolog of NCBI NO: 1084359 NR Description: dihydrodipicolinate synthase (EC 4.2.1.52)
MSWDEHIMLIGHTVNCFGGRIKVIGNTGSNSTREAIHATEQGFAMGMHGALHINPYYGKTSIEGMNAHFQTVLHMGPTIIYNVPGRTCQDIPPQVIFKLSQNPNMAGVKECVGNNRVEEYTEKGIVVWSGNDDQCHDSRWDHGATGVISVTSNLVPGLMRKLMFEGRNSALNEKLLPLMDWLFQEPNPIGVNTALAQLGVARPVFRLPYVPLPLSKRIEFVKLVKEIGREHFVGDRDVQVLDDDDFILIGRY

SEQ ID NO: 76275 - DNA, 1721 bp, Arabidopsis thaliana
  misc_feature (1)..(1721): Ceres Seq. ID no. 7107459
  misc_feature: MA Experiment ID: 108433 Result: Up-regulated in Transcription
  misc_feature: MA Experiment 108433 PARAMETER Experiment Name: At_rhl_Mutant2_cDNA_P Parameter: Age (day) Value: 7
  misc_feature: MA Experiment 108433 PARAMETER Experiment Name: At_rhl_Mutant2_cDNA_P Parameter: Organism Value: A. thaliana
  misc_feature: MA Experiment 108433 PARAMETER Experiment Name: At_rhl_Mutant2_cDNA_P Parameter: Plant Line Value: rhl Mutant vs. wt landsburg
  misc_feature: MA Experiment 108433 PARAMETER Experiment Name: At_rhl_Mutant2_cDNA_P Parameter: Tissue Value: Roots
  misc_feature: MA Experiment ID: 108434 Result: Down-regulated in Transcription
  misc_feature: MA Experiment 108434 PARAMETER Experiment Name: At_Root_Tips_cDNA_P Parameter: Tissue Value: Root Tips
  misc_feature: MA Experiment ID: 108461 Result: Up-regulated in Transcription
  misc_feature: MA Experiment 108461 PARAMETER Experiment Name: At_Germinating_Seeds_cDNA_P Parameter: Age (day) Value: 1 vs. 0
  misc_feature: MA Experiment 108461 PARAMETER Experiment Name: At_Germinating_Seeds_cDNA_P Parameter: Tissue Value: Germinating Seeds
  misc_feature: MA Experiment ID: 108463 Result: Up-regulated in Transcription
  misc_feature: MA Experiment 108463 PARAMETER Experiment Name: At_Germinating_Seeds_cDNA_P Parameter: Age (day) Value: 3 vs. 0
  misc_feature: MA Experiment 108463 PARAMETER Experiment Name: At_Germinating_Seeds_cDNA_P Parameter: Tissue Value: Germinating Seeds
  misc_feature: MA Experiment ID: 108464 Result: Up-regulated in Transcription
  misc_feature: MA Experiment 108464 PARAMETER Experiment Name: At_Germinating_Seeds_cDNA_P Parameter: Age (day) Value: 4 vs. 0
  misc_feature: MA Experiment 108464 PARAMETER Experiment Name: At_Germinating_Seeds_cDNA_P Parameter: Tissue Value: Germinating Seeds
  misc_feature: MA Experiment ID: 108569 Result: Up-regulated in Transcription
  misc_feature: MA Experiment 108569 PARAMETER Experiment Name: At_0.001%_MeJA__cDNA_P Parameter: Timepoint (hr) Value: 6
  misc_feature: MA Experiment 108569 PARAMETER Experiment Name: At_0.001%_MeJA__cDNA_P Parameter: Tissue Value: Aerial
  misc_feature: MA Experiment 108569 PARAMETER Experiment Name: At_0.001%_MeJA__cDNA_P Parameter: Treatment Value: 0.001% MeJA vs. No Treatment
  misc_feature: MA Experiment ID: 108573 Result: Up-regulated in Transcription
  misc_feature: MA Experiment 108573 PARAMETER Experiment Name: At_Drought_cDNA_P Parameter: Timepoint (hr) Value: 6
  misc_feature: MA Experiment 108573 PARAMETER Experiment Name: At_Drought_cDNA_P Parameter: Tissue Value: Aerial
  misc_feature: MA Experiment 108573 PARAMETER Experiment Name: At_Drought_cDNA_P Parameter: Treatment Value: Drought vs. No Drought
  misc_feature: MA Experiment ID: 108585 Result: Up-regulated in Transcription
  misc_feature: MA Experiment 108585 PARAMETER Experiment Name: At_5mM_NaNP_cDNA_P Parameter: Timepoint (hr) Value: 6
  misc_feature: MA Experiment 108585 PARAMETER Experiment Name: At_5mM_NaNP_cDNA_P Parameter: Tissue Value: Aerial
  misc_feature: MA Experiment 108585 PARAMETER Experiment Name: At_5mM_NaNP_cDNA_P Parameter: Treatment Value: null
  misc_feature: MA Experiment ID: 108594 Result: Down-regulated in Transcription
  misc_feature: MA Experiment 108594 PARAMETER Experiment Name: At_Ler-rhl_Root_cDNA_P Parameter: Plant Line Value: null
  misc_feature: MA Experiment ID: 108595 Result: Down-regulated in Transcription
  misc_feature: MA Experiment 108595 PARAMETER Experiment Name: At_Ler-pi_Ovule_cDNA_P Parameter: Plant Line Value: null
  misc_feature: MA Experiment ID: 20000087 Result: Down-regulated in Transcription
  misc_feature: MA Experiment 20000087 PARAMETER Experiment Name: At_100uM_ABA_Mutants_cDNA_P Parameter: Plant Line Value: WS
  misc_feature: MA Experiment 20000087 PARAMETER Experiment Name: At_100uM_ABA_Mutants_cDNA_P Parameter: Timepoint (hr) Value: 6
  misc_feature: MA Experiment 20000087 PARAMETER Experiment Name: At_100uM_ABA_Mutants_cDNA_P Parameter: Tissue Value: Aerial
  misc_feature: MA Experiment 20000087 PARAMETER Experiment Name: At_100uM_ABA_Mutants_cDNA_P Parameter: Treatment Value: 100uM ABA vs. No Treatment
  misc_feature: MA Experiment ID: 20000089 Result: Down-regulated in Transcription
  misc_feature: MA Experiment ID: 20000090 Result: Down-regulated in Transcription
  misc_feature: MA Experiment ID: 20000111 Result: Up-regulated in Transcription
  misc_feature: MA Experiment 20000111 PARAMETER Experiment Name: At_42deg_Heat_cDNA_P Parameter: Temperature (deg C) Value: 42 vs. 22
  misc_feature: MA Experiment 20000111 PARAMETER Experiment Name: At_42deg_Heat_cDNA_P Parameter: Timepoint (hr) Value: 6
  misc_feature: MA Experiment 20000111 PARAMETER Experiment Name: At_42deg_Heat_cDNA_P Parameter: Tissue Value: Aerial
  misc_feature: MA Experiment ID: 20000173 Result: Up-regulated in Transcription
  misc_feature: MA Experiment 20000173 PARAMETER Experiment Name: At_42deg_Heat_P Parameter: Age (day) Value: 14
  misc_feature: MA Experiment 20000173 PARAMETER Experiment Name: At_42deg_Heat_P Parameter: Organism Value: A. thaliana
  misc_feature: MA Experiment 20000173 PARAMETER Experiment Name: At_42deg_Heat_P Parameter: Plant Line Value: WS
  misc_feature: MA Experiment 20000173 PARAMETER Experiment Name: At_42deg_Heat_P Parameter: Temperature (deg C) Value: 42 vs. 22
  misc_feature: MA Experiment 20000173 PARAMETER Experiment Name: At_42deg_Heat_P Parameter: Timepoint (hr) Value: 6
  misc_feature: MA Experiment 20000173 PARAMETER Experiment Name: At_42deg_Heat_P Parameter: Tissue Value: Aerial
  misc_feature: MA Experiment ID: 20000436 Result: Up-regulated in Transcription
  misc_feature: MA Experiment 20000436 PARAMETER Experiment Name: At_Drought_P Parameter: Age (day) Value: 7
  misc_feature: MA Experiment 20000436 PARAMETER Experiment Name: At_Drought_P Parameter: Organism Value: A. thaliana
  misc_feature: MA Experiment 20000436 PARAMETER Experiment Name: At_Drought_P Parameter: Plant Line Value: WS
  misc_feature: MA Experiment 20000436 PARAMETER Experiment Name: At_Drought_P Parameter: Timepoint (hr) Value: 12
  misc_feature: MA Experiment 20000436 PARAMETER Experiment Name: At_Drought_P Parameter: Tissue Value: Whole Plant
  misc_feature: MA Experiment 20000436 PARAMETER Experiment Name: At_Drought_P Parameter: Treatment Value: Drought vs. No Drought
  misc_feature: MA Experiment ID: 20000455 Result: Up-regulated in Transcription
  misc_feature: MA Experiment 20000455 PARAMETER Experiment Name: At_100uM_ABA_P Parameter: Age (day) Value: 16
  misc_feature: MA Experiment 20000455 PARAMETER Experiment Name: At_100uM_ABA_P Parameter: Organism Value: A. thaliana
  misc_feature: MA Experiment 20000455 PARAMETER Experiment Name: At_100uM_ABA_P Parameter: Plant Line Value: WS
  misc_feature: MA Experiment 20000455 PARAMETER Experiment Name: At_100uM_ABA_P Parameter: Timepoint (hr) Value: 48
  misc_feature: MA Experiment 20000455 PARAMETER Experiment Name: At_100uM_ABA_P Parameter: Tissue Value: Aerial
  misc_feature: MA Experiment 20000455 PARAMETER Experiment Name: At_100uM_ABA_P Parameter: Treatment Value: 100uM ABA vs. No Treatment
  misc_feature: MA Experiment ID: 20000794 Result: Down-regulated in Transcription
  misc_feature: MA Experiment 20000794 PARAMETER Experiment Name: At_Petals_P Parameter: Age (day) Value: 23-25 days
  misc_feature: MA Experiment 20000794 PARAMETER Experiment Name: At_Petals_P Parameter: Plant Line Value: WS
  misc_feature: MA Experiment 20000794 PARAMETER Experiment Name: At_Petals_P Parameter: Tissue Value: Petals vs. Whole plant
  misc_feature: MA Experiment ID: 20001905 Result: Up-regulated in Transcription
  misc_feature: MA Experiment 20001905 PARAMETER Experiment Name: At_Drought_Reproduction_P Parameter: Age (day) Value: 40
  misc_feature: MA Experiment 20001905 PARAMETER Experiment Name: At_Drought_Reproduction_P Parameter: Organism Value: A. thaliana
  misc_feature: MA Experiment 20001905 PARAMETER Experiment Name: At_Drought_Reproduction_P Parameter: Plant Line Value: WS
  misc_feature: MA Experiment 20001905 PARAMETER Experiment Name: At_Drought_Reproduction_P Parameter: Timepoint (day) Value: 10
  misc_feature: MA Experiment 20001905 PARAMETER Experiment Name: At_Drought_Reproduction_P Parameter: Tissue Value: Rosettes
  misc_feature: MA Experiment 20001905 PARAMETER Experiment Name: At_Drought_Reproduction_P Parameter: Treatment Value: Drought vs. No Drought
cagtgtgagtaatttagaaacaatatcattgcggatacacaaactataatggacctcctcttgctggagaagtctctaatcgccgtcttcgtggcggtgattctcgccacggtgatttcaaagctccgcggcaagaaattgaagctacctccaggtcctataccaattccgatcttcggaaactggcttcaagtaggagatgacctcaaccaccgtaatctcgtcgattacgctaagaaattcggcgatctcttcctcctccgtatgggtcagcgtaacctagtcgtcgtctcttcaccggatctaaccaaggaagtgctccacacacaaggcgttgagtttggatctagaacgagaaacgtcgtgttcgacattttcaccgggaaaggtcaagatatggtgttcactgtttacggcgagcattggaggaagatgagaagaatcatgacggttcctttcttcaccaacaaagttgttcaacagaatcgtgaaggttgggagtttgaagcagctagtgttgttgaagatgttaagaagaatccagattctgctacgaaaggaatcgtgttgaggaaacgtttgcaattgatgatgtataacaatatgttccgtatcatgttcgatagaagatttgagagtgaggatagtcctcttttccttaggcttaaggctttgaatggtgagagaagtcgattagctcagagctttgagtataactatggagatttcattcctatccttagaccattcctcagaggctatttgaagatttgtcaagatgtgaaagatcgaagaatcgctcttttcaagaagtactttgttgatgagaggaagcaaattgcgagttctaagcctacaggtagtgaaggattgaaatgtgccattgatcacatccttgaagctgagcagaagggagaaatcaacgaggacaatgttctttacatcgtcgagaacatcaatgtcgccgcgattgagacaacattgtggtctatcgagtggggaattgcagagctagtgaaccatcctgaaatccagagtaagctaaggaacgaactcgacacggttcttggaccgggtgtgcaagtcaccgagcctgatcttcacaaacttccataccttcaagctgtggttaaggagactcttcgtctgagaatggcgattcctctcctcgtgcctcacatgaacctccatgatgcgaagctcgctggctacgatatcccagcagaaagcaaaatccttgttaatgcttggtggctagcaaacaaccccaacagctggaagaagcctgaagagtttagaccagagaggttctttgaagaagaatcgcacgtggaagctaacggaaatgacttcaggtatgtgccgtttggtgttggacgtagaagctgtcccgggattatattggcattacctattttggggatcaccattggtaggatggtccagaacttcgagcttcttcctcctccaggacagtctaaagtggatactagtgagaaaggtggacaattcagcttgcacatccttaaccactccataatcgttatgaaaccaaggaactgttaaactttctgcacaaaaaaaggatgaagatgactttataaatgtttgtgaaatctgttgaaatattcccttgttttgcttttgtgagatgtttttgtgtaaaatgtctttaaatggttgttctacgattgcaataataattagtggtgctcattctt

SEQ ID NO: 76276 - protein, 505 aa, Arabidopsis thaliana
  peptide (1)..(505): Ceres Seq. ID no. 7107460
  misc_feature (34)..(499): Pfam Name: Cytochrome P450 Pfam Description: Cytochrome P450
  misc_feature (1)..(505): Homolog of NCBI NO: 4096693 NR Description: cinnamate 4-hydroxylase [Arabidopsis thaliana]
  misc_feature (1)..(505): Homolog of NCBI NO: 1773287 NR Description: cinnamate-4-hydroxylase [Arabidopsis thaliana]
  misc_feature (1)..(505): Homolog of NCBI NO: 15224514 NR Description: cinnamate-4-hydroxylase; protein id: At2g30490.1, by cDNA: gi_17473765, supported by cDNA: gi_1773288, supported by gi_2780737, supported by cDNA: gi_4096692 [Arabidopsis (P450C4H)
  misc_feature (1)..(505): Homolog of NCBI NO: 2780738 NR Description: trans-cinnamate 4-hydroxylase [Arabidopsis
  misc_feature (1)..(504): Homolog of NCBI NO: 16555877 NR Description: cinnamic acid 4-hydroxylase [Lithospermum
  misc_feature (1)..(504): Homolog of NCBI NO: 16555879 NR Description: cinnamic acid 4-hydroxylase [Lithospermum
  misc_feature (1)..(503): Homolog of NCBI NO: 9965897 NR Description: cinnamate-4-hydroxylase [Gossypium arboreum]
  misc_feature (1)..(503): Homolog of NCBI NO: 1351206 NR Description: Trans-cinnamate 4-monooxygenase (Cinnamic acid 4- (CA4H) (C4H) (P450C4H) (Cytochrome P450 73)
  misc_feature (1)..(504): Homolog of NCBI NO: 12276037 NR Description: cinnamate 4-hydroxylase [Populus balsamifera
  misc_feature (1)..(504): Homolog of NCBI NO: 3915089 NR Description: Trans-cinnamate 4-monooxygenase (Cinnamic acid 4- (CA4H) (C4H) (P450C4H) (Cytochrome P450 73)
MDLLLLEKSLIAVFVAVILATVISKLRGKKLKLPPGPIPIPIFGNWLQVGDDLNHRNLVDYAKKFGDLFLLRMGQRNLVVVSSPDLTKEVLHTQGVEFGSRTRNVVFDIFTGKGQDMVFTVYGEHWRKMRRIMTVPFFTNKVVQQNREGWEFEAASVVEDVKKNPDSATKGIVLRKRLQLMMYNNMFRIMFDRRFESEDSPLFLRLKALNGERSRLAQSFEYNYGDFIPILRPFLRGYLKICQDVKDRRIALFKKYFVDERKQIASSKPTGSEGLKCAIDHILEAEQKGEINEDNVLYIVENINVAAIETTLWSIEWGIAELVNHPEIQSKLRNELDTVLGPGVQVTEPDLHKLPYLQAVVKETLRLRMAIPLLVPHMNLHDAKLAGYDIPAESKILVNAWWLANNPNSWKKPEEFRPERFFEEESHVEANGNDFRYVPFGVGRRSCPGIILALPILGITIGRMVQNFELLPPPGQSKVDTSEKGGQFSLHILNHSIIVMKPRNC

SEQ ID NO: 76277 - protein, 433 aa, Arabidopsis thaliana
  peptide (1)..(433): Ceres Seq. ID no. 7107461
  misc_feature (1)..(427): Pfam Name: Cytochrome P450 Pfam Description: Cytochrome P450
  misc_feature (1)..(433): Homolog of NCBI NO: 4096693 NR Description: cinnamate 4-hydroxylase [Arabidopsis thaliana]
  misc_feature (1)..(433): Homolog of NCBI NO: 1773287 NR Description: cinnamate-4-hydroxylase [Arabidopsis thaliana]
  misc_feature (1)..(433): Homolog of NCBI NO: 15224514 NR Description: cinnamate-4-hydroxylase; protein id: At2g30490.1, by cDNA: gi_17473765, supported by cDNA: gi_1773288, supported by gi_2780737, supported by cDNA: gi_4096692 [Arabidopsis (P450C4H)
  misc_feature (1)..(433): Homolog of NCBI NO: 2780738 NR Description: trans-cinnamate 4-hydroxylase [Arabidopsis
  misc_feature (1)..(432): Homolog of NCBI NO: 16555877 NR Description: cinnamic acid 4-hydroxylase [Lithospermum
  misc_feature (1)..(432): Homolog of NCBI NO: 16555879 NR Description: cinnamic acid 4-hydroxylase [Lithospermum
  misc_feature (1)..(431): Homolog of NCBI NO: 9965897 NR Description: cinnamate-4-hydroxylase [Gossypium arboreum]
  misc_feature (1)..(431): Homolog of NCBI NO: 1351206 NR Description: Trans-cinnamate 4-monooxygenase (Cinnamic acid 4- (CA4H) (C4H) (P450C4H) (Cytochrome P450 73)
  misc_feature (1)..(432): Homolog of NCBI NO: 12276037 NR Description: cinnamate 4-hydroxylase [Populus balsamifera
  misc_feature (1)..(432): Homolog of NCBI NO: 3915089 NR Description: Trans-cinnamate 4-monooxygenase (Cinnamic acid 4- (CA4H) (C4H) (P450C4H) (Cytochrome P450 73)
MGQRNLVVVSSPDLTKEVLHTQGVEFGSRTRNVVFDIFTGKGQDMVFTVYGEHWRKMRRIMTVPFFTNKVVQQNREGWEFEAASVVEDVKKNPDSATKGIVLRKRLQLMMYNNMFRIMFDRRFESEDSPLFLRLKALNGERSRLAQSFEYNYGDFIPILRPFLRGYLKICQDVKDRRIALFKKYFVDERKQIASSKPTGSEGLKCAIDHILEAEQKGEINEDNVLYIVENINVAAIETTLWSIEWGIAELVNHPEIQSKLRNELDTVLGPGVQVTEPDLHKLPYLQAVVKETLRLRMAIPLLVPHMNLHDAKLAGYDIPAESKILVNAWWLANNPNSWKKPEEFRPERFFEEESHVEANGNDFRYVPFGVGRRSCPGIILALPILGITIGRMVQNFELLPPPGQSKVDTSEKGGQFSLHILNHSIIVMKPRNC

SEQ ID NO: 76278 - protein, 389 aa, Arabidopsis thaliana
  peptide (1)..(389): Ceres Seq. ID no. 7107462
  misc_feature (1)..(383): Pfam Name: Cytochrome P450 Pfam Description: Cytochrome P450
  misc_feature (1)..(389): Homolog of NCBI NO: 4096693 NR Description: cinnamate 4-hydroxylase [Arabidopsis thaliana]
  misc_feature (1)..(389): Homolog of NCBI NO: 1773287 NR Description: cinnamate-4-hydroxylase [Arabidopsis thaliana]
  misc_feature (1)..(389): Homolog of NCBI NO: 15224514 NR Description: cinnamate-4-hydroxylase; protein id: At2g30490.1, by cDNA: gi_17473765, supported by cDNA: gi_1773288, supported by gi_2780737, supported by cDNA: gi_4096692 [Arabidopsis (P450C4H)
  misc_feature (1)..(389): Homolog of NCBI NO: 2780738 NR Description: trans-cinnamate 4-hydroxylase [Arabidopsis
  misc_feature (1)..(388): Homolog of NCBI NO: 16555877 NR Description: cinnamic acid 4-hydroxylase [Lithospermum
  misc_feature (1)..(388): Homolog of NCBI NO: 16555879 NR Description: cinnamic acid 4-hydroxylase [Lithospermum
  misc_feature (1)..(387): Homolog of NCBI NO: 9965897 NR Description: cinnamate-4-hydroxylase [Gossypium arboreum]
  misc_feature (1)..(387): Homolog of NCBI NO: 1351206 NR Description: Trans-cinnamate 4-monooxygenase (Cinnamic acid 4- (CA4H) (C4H) (P450C4H) (Cytochrome P450 73)
  misc_feature (1)..(388): Homolog of NCBI NO: 12276037 NR Description: cinnamate 4-hydroxylase [Populus balsamifera
  misc_feature (1)..(388): Homolog of NCBI NO: 3915089 NR Description: Trans-cinnamate 4-monooxygenase (Cinnamic acid 4- (CA4H) (C4H) (P450C4H) (Cytochrome P450 73)
MVFTVYGEHWRKMRRIMTVPFFTNKVVQQNREGWEFEAASVVEDVKKNPDSATKGIVLRKRLQLMMYNNMFRIMFDRRFESEDSPLFLRLKALNGERSRLAQSFEYNYGDFIPILRPFLRGYLKICQDVKDRRIALFKKYFVDERKQIASSKPTGSEGLKCAIDHILEAEQKGEINEDNVLYIVENINVAAIETTLWSIEWGIAELVNHPEIQSKLRNELDTVLGPGVQVTEPDLHKLPYLQAVVKETLRLRMAIPLLVPHMNLHDAKLAGYDIPAESKILVNAWWLANNPNSWKKPEEFRPERFFEEESHVEANGNDFRYVPFGVGRRSCPGIILALPILGITIGRMVQNFELLPPPGQSKVDTSEKGGQFSLHILNHSIIVMKPRNC

SEQ ID NO: 76279 - DNA, 674 bp, Arabidopsis thaliana
  misc_feature (1)..(674): Ceres Seq. ID no. 7107465
  misc_feature: MA Experiment ID: 108434 Result: Up-regulated in Transcription
  misc_feature: MA Experiment 108434 PARAMETER Experiment Name: At_Root_Tips_cDNA_P Parameter: Tissue Value: Root Tips
  misc_feature: MA Experiment ID: 108435 Result: Up-regulated in Transcription
  misc_feature: MA Experiment 108435 PARAMETER Experiment Name: At_stm_Mutants_cDNA_P Parameter: Plant Line Value: wt Landsburg vs stm
  misc_feature: MA Experiment 108435 PARAMETER Experiment Name: At_stm_Mutants_cDNA_P Parameter: Tissue Value: Shoot Apical Meristem Region
  misc_feature: MA Experiment ID: 108461 Result: Up-regulated in Transcription
  misc_feature: MA Experiment 108461 PARAMETER Experiment Name: At_Germinating_Seeds_cDNA_P Parameter: Age (day) Value: 1 vs. 0
  misc_feature: MA Experiment 108461 PARAMETER Experiment Name: At_Germinating_Seeds_cDNA_P Parameter: Tissue Value: Germinating Seeds
  misc_feature: MA Experiment ID: 108462 Result: Up-regulated in Transcription
  misc_feature: MA Experiment 108462 PARAMETER Experiment Name: At_Germinating_Seeds_cDNA_P Parameter: Age (day) Value: 2 vs. 0
  misc_feature: MA Experiment 108462 PARAMETER Experiment Name: At_Germinating_Seeds_cDNA_P Parameter: Tissue Value: Germinating Seeds
  misc_feature: MA Experiment ID: 108463 Result: Up-regulated in Transcription
  misc_feature: MA Experiment 108463 PARAMETER Experiment Name: At_Germinating_Seeds_cDNA_P Parameter: Age (day) Value: 3 vs. 0
  misc_feature: MA Experiment 108463 PARAMETER Experiment Name: At_Germinating_Seeds_cDNA_P Parameter: Tissue Value: Germinating Seeds
  misc_feature: MA Experiment ID: 108474 Result: Down-regulated in Transcription
  misc_feature: MA Experiment 108474 PARAMETER Experiment Name: At_Drought_Flowers_cDNA_P Parameter: Timepoint (hr) Value: null
  misc_feature: MA Experiment 108474 PARAMETER Experiment Name: At_Drought_Flowers_cDNA_P Parameter: Treatment Value: Drought vs. No Drought
  misc_feature: MA Experiment ID: 108501 Result: Up-regulated in Transcription
  misc_feature: MA Experiment 108501 PARAMETER Experiment Name: At_ap2_floral_buds_cDNA_P Parameter: Plant Line Value: ap2 (Ler.)
  misc_feature: MA Experiment 108501 PARAMETER Experiment Name: At_ap2_floral_buds_cDNA_P Parameter: Tissue Value: Closed Flower
  misc_feature: MA Experiment ID: 108561 Result: Down-regulated in Transcription
  misc_feature: MA Experiment 108561 PARAMETER Experiment Name: At_100uM_ABA_cDNA_P Parameter: Timepoint (hr) Value: 6
  misc_feature: MA Experiment 108561 PARAMETER Experiment Name: At_100uM_ABA_cDNA_P Parameter: Tissue Value: Aerial
  misc_feature: MA Experiment 108561 PARAMETER Experiment Name: At_100uM_ABA_cDNA_P Parameter: Treatment Value: 100uM ABA vs. No Treatment
  misc_feature: MA Experiment ID: 108572 Result: Down-regulated in Transcription
  misc_feature: MA Experiment 108572 PARAMETER Experiment Name: At_Drought_cDNA_P Parameter: Timepoint (hr) Value: 1
  misc_feature: MA Experiment 108572 PARAMETER Experiment Name: At_Drought_cDNA_P Parameter: Tissue Value: Aerial
  misc_feature: MA Experiment 108572 PARAMETER Experiment Name: At_Drought_cDNA_P Parameter: Treatment Value: Drought vs. No Drought
  misc_feature: MA Experiment ID: 108576 Result: Down-regulated in Transcription
  misc_feature: MA Experiment 108576 PARAMETER Experiment Name: At_42deg_Heat_cDNA_P Parameter: Temperature (deg C) Value: 42 vs. 22
  misc_feature: MA Experiment 108576 PARAMETER Experiment Name: At_42deg_Heat_cDNA_P Parameter: Timepoint (hr) Value: 1
  misc_feature: MA Experiment 108576 PARAMETER Experiment Name: At_42deg_Heat_cDNA_P Parameter: Tissue Value: Aerial
  misc_feature: MA Experiment ID: 108577 Result: Up-regulated in Transcription
  misc_feature: MA Experiment 108577 PARAMETER Experiment Name: At_42deg_Heat_cDNA_P Parameter: Temperature (deg C) Value: 42 vs. 22
  misc_feature: MA Experiment 108577 PARAMETER Experiment Name: At_42deg_Heat_cDNA_P Parameter: Timepoint (hr) Value: 6
  misc_feature: MA Experiment 108577 PARAMETER Experiment Name: At_42deg_Heat_cDNA_P Parameter: Tissue Value: Aerial
  misc_feature: MA Experiment ID: 108579 Result: Up-regulated in Transcription
  misc_feature: MA Experiment 108579 PARAMETER Experiment Name: At_4deg_Cold_cDNA_P Parameter: Temperature (deg C) Value: 4 vs. 22
  misc_feature: MA Experiment 108579 PARAMETER Experiment Name: At_4deg_Cold_cDNA_P Parameter: Timepoint (hr) Value: 6
  misc_feature: MA Experiment 108579 PARAMETER Experiment Name: At_4deg_Cold_cDNA_P Parameter: Tissue Value: Aerial
  misc_feature: MA Experiment ID: 108585 Result: Up-regulated in Transcription
  misc_feature: MA Experiment 108585 PARAMETER Experiment Name: At_5mM_NaNP_cDNA_P Parameter: Timepoint (hr) Value: 6
  misc_feature: MA Experiment 108585 PARAMETER Experiment Name: At_5mM_NaNP_cDNA_P Parameter: Tissue Value: Aerial
  misc_feature: MA Experiment 108585 PARAMETER Experiment Name: At_5mM_NaNP_cDNA_P Parameter: Treatment Value: null
  misc_feature: MA Experiment ID: 108595 Result: Up-regulated in Transcription
  misc_feature: MA Experiment 108595 PARAMETER Experiment Name: At_Ler-pi_Ovule_cDNA_P Parameter: Plant Line Value: null
  misc_feature: MA Experiment ID: 108605 Result: Down-regulated in Transcription
  misc_feature: MA Experiment 108605 PARAMETER Experiment Name: At_100uM_ABA_cDNA_P Parameter: Timepoint (hr) Value: 6
  misc_feature: MA Experiment 108605 PARAMETER Experiment Name: At_100uM_ABA_cDNA_P Parameter: Tissue Value: Aerial
  misc_feature: MA Experiment 108605 PARAMETER Experiment Name: At_100uM_ABA_cDNA_P Parameter: Treatment Value: 100uM ABA vs. No Treatment
  misc_feature: MA Experiment ID: 108668 Result: Up-regulated in Transcription
  misc_feature: MA Experiment 108668 PARAMETER Experiment Name: At_2mM_SA_cDNA_P Parameter: Plant Line Value: WS
  misc_feature: MA Experiment 108668 PARAMETER Experiment Name: At_2mM_SA_cDNA_P Parameter: Timepoint (hr) Value: 6
  misc_feature: MA Experiment 108668 PARAMETER Experiment Name: At_2mM_SA_cDNA_P Parameter: Treatment Value: 2mM SA vs. No Treatment
  misc_feature: MA Experiment ID: 20000069 Result: Down-regulated in Transcription
  misc_feature: MA Experiment 20000069 PARAMETER Experiment Name: At_100uM_ABA_Mutants_cDNA_P Parameter: Plant Line Value: CS23
  misc_feature: MA Experiment 20000069 PARAMETER Experiment Name: At_100uM_ABA_Mutants_cDNA_P Parameter: Timepoint (hr) Value: 6
  misc_feature: MA Experiment 20000069 PARAMETER Experiment Name: At_100uM_ABA_Mutants_cDNA_P Parameter: Tissue Value: Aerial
  misc_feature: MA Experiment 20000069 PARAMETER Experiment Name: At_100uM_ABA_Mutants_cDNA_P Parameter: Treatment Value: 100uM ABA vs. No Treatment
  misc_feature: MA Experiment ID: 20000070 Result: Down-regulated in Transcription
  misc_feature: MA Experiment 20000070 PARAMETER Experiment Name: At_100uM_ABA_Mutants_cDNA_P Parameter: Plant Line Value: CS24
  misc_feature: MA Experiment 20000070 PARAMETER Experiment Name: At_100uM_ABA_Mutants_cDNA_P Parameter: Timepoint (hr) Value: 6
  misc_feature: MA Experiment 20000070 PARAMETER Experiment Name: At_100uM_ABA_Mutants_cDNA_P Parameter: Tissue Value: Aerial
  misc_feature: MA Experiment 20000070 PARAMETER Experiment Name: At_100uM_ABA_Mutants_cDNA_P Parameter: Treatment Value: 100uM ABA vs. No Treatment
  misc_feature: MA Experiment ID: 20000071 Result: Down-regulated in Transcription
  misc_feature: MA Experiment 20000071 PARAMETER Experiment Name: At_100uM_ABA_Mutants_cDNA_P Parameter: Plant Line Value: CS8104
  misc_feature: MA Experiment 20000071 PARAMETER Experiment Name: At_100uM_ABA_Mutants_cDNA_P Parameter: Timepoint (hr) Value: 6
  misc_feature: MA Experiment 20000071 PARAMETER Experiment Name: At_100uM_ABA_Mutants_cDNA_P Parameter: Tissue Value: Aerial
  misc_feature: MA Experiment 20000071 PARAMETER Experiment Name: At_100uM_ABA_Mutants_cDNA_P Parameter: Treatment Value: 100uM ABA vs. No Treatment
  misc_feature: MA Experiment ID: 20000072 Result: Down-regulated in Transcription
  misc_feature: MA Experiment 20000072 PARAMETER Experiment Name: At_100uM_ABA_Mutants_cDNA_P Parameter: Plant Line Value: CS8105
  misc_feature: MA Experiment 20000072 PARAMETER Experiment Name: At_100uM_ABA_Mutants_cDNA_P Parameter: Timepoint (hr) Value: 6
  misc_feature: MA Experiment 20000072 PARAMETER Experiment Name: At_100uM_ABA_Mutants_cDNA_P Parameter: Tissue Value: Aerial
  misc_feature: MA Experiment 20000072 PARAMETER Experiment Name: At_100uM_ABA_Mutants_cDNA_P Parameter: Treatment Value: 100uM ABA vs. No Treatment
  misc_feature: MA Experiment ID: 20000087 Result: Down-regulated in Transcription
  misc_feature: MA Experiment 20000087 PARAMETER Experiment Name: At_100uM_ABA_Mutants_cDNA_P Parameter: Plant Line Value: WS
  misc_feature: MA Experiment 20000087 PARAMETER Experiment Name: At_100uM_ABA_Mutants_cDNA_P Parameter: Timepoint (hr) Value: 6
  misc_feature: MA Experiment 20000087 PARAMETER Experiment Name: At_100uM_ABA_Mutants_cDNA_P Parameter: Tissue Value: Aerial
  misc_feature: MA Experiment 20000087 PARAMETER Experiment Name: At_100uM_ABA_Mutants_cDNA_P Parameter: Treatment Value: 100uM ABA vs. No Treatment
  misc_feature: MA Experiment ID: 20000088 Result: Down-regulated in Transcription
  misc_feature: MA Experiment 20000088 PARAMETER Experiment Name: At_100uM_ABA_Mutants_cDNA_P Parameter: Plant Line Value: Landsberg
  misc_feature: MA Experiment 20000088 PARAMETER Experiment Name: At_100uM_ABA_Mutants_cDNA_P Parameter: Timepoint (hr) Value: 6
  misc_feature: MA Experiment 20000088 PARAMETER Experiment Name: At_100uM_ABA_Mutants_cDNA_P Parameter: Tissue Value: Aerial
  misc_feature: MA Experiment 20000088 PARAMETER Experiment Name: At_100uM_ABA_Mutants_cDNA_P Parameter: Treatment Value: 100uM ABA vs. No Treatment
  misc_feature: MA Experiment ID: 20000111 Result: Up-regulated in Transcription
  misc_feature: MA Experiment 20000111 PARAMETER Experiment Name: At_42deg_Heat_cDNA_P Parameter: Temperature (deg C) Value: 42 vs. 22
  misc_feature: MA Experiment 20000111 PARAMETER Experiment Name: At_42deg_Heat_cDNA_P Parameter: Timepoint (hr) Value: 6
  misc_feature: MA Experiment 20000111 PARAMETER Experiment Name: At_42deg_Heat_cDNA_P Parameter: Tissue Value: Aerial
  misc_feature: MA Experiment ID: 20000112 Result: Up-regulated in Transcription
  misc_feature: MA Experiment 20000112 PARAMETER Experiment Name: At_42deg_Heat_cDNA_P Parameter: Temperature (deg C) Value: 42 vs. 22
  misc_feature: MA Experiment 20000112 PARAMETER Experiment Name: At_42deg_Heat_cDNA_P Parameter: Timepoint (hr) Value: 2
  misc_feature: MA Experiment 20000112 PARAMETER Experiment Name: At_42deg_Heat_cDNA_P Parameter: Tissue Value: Aerial
  misc_feature: MA Experiment ID: 20000117 Result: Down-regulated in Transcription
  misc_feature: MA Experiment 20000117 PARAMETER Experiment Name: At_100uM_ABA_Mutants_cDNA_P Parameter: Plant Line Value: Columbia
  misc_feature: MA Experiment 20000117 PARAMETER Experiment Name: At_100uM_ABA_Mutants_cDNA_P Parameter: Timepoint (hr) Value: 6
  misc_feature: MA Experiment 20000117 PARAMETER Experiment Name: At_100uM_ABA_Mutants_cDNA_P Parameter: Tissue Value: Aerial
  misc_feature: MA Experiment 20000117 PARAMETER Experiment Name: At_100uM_ABA_Mutants_cDNA_P Parameter: Treatment Value: 100uM ABA vs. No Treatment
  misc_feature: MA Experiment ID: 20000144 Result: Up-regulated in Transcription
  misc_feature: MA Experiment 20000144 PARAMETER Experiment Name: At_42deg_Heat_cDNA_P Parameter: Temperature (deg C) Value: 42 vs. 22
  misc_feature: MA Experiment 20000144 PARAMETER Experiment Name: At_42deg_Heat_cDNA_P Parameter: Timepoint (hr) Value: 1
  misc_feature: MA Experiment 20000144 PARAMETER Experiment Name: At_42deg_Heat_cDNA_P Parameter: Tissue Value: Aerial
  misc_feature: MA Experiment ID: 20000169 Result: Down-regulated in Transcription
  misc_feature: MA Experiment 20000169 PARAMETER Experiment Name: At_100uM_ABA_P Parameter: Age (day) Value: 14
  misc_feature: MA Experiment 20000169 PARAMETER Experiment Name: At_100uM_ABA_P Parameter: Organism Value: A. thaliana
  misc_feature: MA Experiment 20000169 PARAMETER Experiment Name: At_100uM_ABA_P Parameter: Plant Line Value: WS
  misc_feature: MA Experiment 20000169 PARAMETER Experiment Name: At_100uM_ABA_P Parameter: Timepoint (hr) Value: 6
  misc_feature: MA Experiment 20000169 PARAMETER Experiment Name: At_100uM_ABA_P Parameter: Tissue Value: Aerial
  misc_feature: MA Experiment 20000169 PARAMETER Experiment Name: At_100uM_ABA_P Parameter: Treatment Value: 100uM ABA vs. No Treatment
  misc_feature: MA Experiment ID: 20000171 Result: Up-regulated in Transcription
  misc_feature: MA Experiment 20000171 PARAMETER Experiment Name: At_42deg_Heat_P Parameter: Age (day) Value: 14
  misc_feature: MA Experiment 20000171 PARAMETER Experiment Name: At_42deg_Heat_P Parameter: Organism Value: A. thaliana
  misc_feature: MA Experiment 20000171 PARAMETER Experiment Name: At_42deg_Heat_P Parameter: Plant Line Value: WS
  misc_feature: MA Experiment 20000171 PARAMETER Experiment Name: At_42deg_Heat_P Parameter: Temperature (deg C) Value: 42 vs. 22
  misc_feature: MA Experiment 20000171 PARAMETER Experiment Name: At_42deg_Heat_P Parameter: Timepoint (hr) Value: 1
  misc_feature: MA Experiment 20000171 PARAMETER Experiment Name: At_42deg_Heat_P Parameter: Tissue Value: Aerial
  misc_feature: MA Experiment ID: 20000173 Result: Up-regulated in Transcription
  misc_feature: MA Experiment 20000173 PARAMETER Experiment Name: At_42deg_Heat_P Parameter: Age (day) Value: 14
  misc_feature: MA Experiment 20000173 PARAMETER Experiment Name: At_42deg_Heat_P Parameter: Organism Value: A. thaliana
  misc_feature: MA Experiment 20000173 PARAMETER Experiment Name: At_42deg_Heat_P Parameter: Plant Line Value: WS
  misc_feature: MA Experiment 20000173 PARAMETER Experiment Name: At_42deg_Heat_P Parameter: Temperature (deg C) Value: 42 vs. 22
  misc_feature: MA Experiment 20000173 PARAMETER Experiment Name: At_42deg_Heat_P Parameter: Timepoint (hr) Value: 6
  misc_feature: MA Experiment 20000173 PARAMETER Experiment Name: At_42deg_Heat_P Parameter: Tissue Value: Aerial
  misc_feature: MA Experiment ID: 20000179 Result: Up-regulated in Transcription
  misc_feature: MA Experiment 20000179 PARAMETER Experiment Name: At_Germinating_Seeds_P Parameter: Age (hr) Value: 6 vs. 0
  misc_feature: MA Experiment 20000179 PARAMETER Experiment Name: At_Germinating_Seeds_P Parameter: Tissue Value: Germinating Seeds
  misc_feature: MA Experiment ID: 20000180 Result: Up-regulated in Transcription
  misc_feature: MA Experiment 20000180 PARAMETER Experiment Name: At_Germinating_Seeds_P Parameter: Age (hr) Value: 24 vs. 0
  misc_feature: MA Experiment 20000180 PARAMETER Experiment Name: At_Germinating_Seeds_P Parameter: Tissue Value: Germinating Seeds
  misc_feature: MA Experiment ID: 20000182 Result: Up-regulated in Transcription
  misc_feature: MA Experiment 20000182 PARAMETER Experiment Name: At_2mM_SA_P Parameter: Age (day) Value: 14
  misc_feature: MA Experiment 20000182 PARAMETER Experiment Name: At_2mM_SA_P Parameter: Organism Value: A. thaliana
  misc_feature: MA Experiment 20000182 PARAMETER Experiment Name: At_2mM_SA_P Parameter: Plant Line Value: WS
  misc_feature: MA Experiment 20000182 PARAMETER Experiment Name: At_2mM_SA_P Parameter: Timepoint (hr) Value: 6
  misc_feature: MA Experiment 20000182 PARAMETER Experiment Name: At_2mM_SA_P Parameter: Tissue Value: Aerial
  misc_feature: MA Experiment 20000182 PARAMETER Experiment Name: At_2mM_SA_P Parameter: Treatment Value: 2mM SA vs. No Treatment
  misc_feature: MA Experiment ID: 20000185 Result: Up-regulated in Transcription
  misc_feature: MA Experiment 20000185 PARAMETER Experiment Name: At_Roots__P Parameter: Age (day) Value: 7 vs. 21
  misc_feature: MA Experiment 20000185 PARAMETER Experiment Name: At_Roots__P Parameter: Organism Value: A. thaliana
  misc_feature: MA Experiment 20000185 PARAMETER Experiment Name: At_Roots__P Parameter: Tissue Value: Roots vs. Whole Plant
  misc_feature: MA Experiment ID: 20000213 Result: Up-regulated in Transcription
  misc_feature: MA Experiment 20000213 PARAMETER Experiment Name: At_4deg_Cold_P Parameter: Timepoint (hr) Value: 2
  misc_feature: MA Experiment ID: 20000234 Result: Up-regulated in Transcription
  misc_feature: MA Experiment 20000234 PARAMETER Experiment Name: At_Siliques_P Parameter: Age (day) Value: 21
  misc_feature: MA Experiment 20000234 PARAMETER Experiment Name: At_Siliques_P Parameter: Organism Value: A. thaliana
  misc_feature: MA Experiment 20000234 PARAMETER Experiment Name: At_Siliques_P Parameter: Plant Line Value: WS
  misc_feature: MA Experiment 20000234 PARAMETER Experiment Name: At_Siliques_P Parameter: Tissue Value: Less Than 5mm Siliques vs. Whole Plant
  misc_feature: MA Experiment ID: 20000235 Result: Up-regulated in Transcription
  misc_feature: MA Experiment 20000235 PARAMETER Experiment Name: At_Siliques_P Parameter: Age (day) Value: 21
  misc_feature: MA Experiment 20000235 PARAMETER Experiment Name: At_Siliques_P Parameter: Organism Value: A. thaliana
  misc_feature: MA Experiment 20000235 PARAMETER Experiment Name: At_Siliques_P Parameter: Plant Line Value: WS
  misc_feature: MA Experiment 20000235 PARAMETER Experiment Name: At_Siliques_P Parameter: Tissue Value: 5-10mm Siliques vs. Whole Plant
  misc_feature: MA Experiment ID: 20000264 Result: Up-regulated in Transcription
  misc_feature: MA Experiment 20000264 PARAMETER Experiment Name: At_Open_Flower_P Parameter: Age (day) Value: 21
  misc_feature: MA Experiment 20000264 PARAMETER Experiment Name: At_Open_Flower_P Parameter: Plant Line Value: WS
  misc_feature: MA Experiment 20000264 PARAMETER Experiment Name: At_Open_Flower_P Parameter: Tissue Value: Open Flower vs. Whole Plant
  misc_feature: MA Experiment ID: 20000265 Result: Up-regulated in Transcription
  misc_feature: MA Experiment 20000265 PARAMETER Experiment Name: At_Open_Flower_P Parameter: Age (day) Value: 21
  misc_feature: MA Experiment 20000265 PARAMETER Experiment Name: At_Open_Flower_P Parameter: Plant Line Value: WS
  misc_feature: MA Experiment 20000265 PARAMETER Experiment Name: At_Open_Flower_P Parameter: Tissue Value: Closed Flower vs. Whole Plant
  misc_feature: MA Experiment ID: 20000267 Result: Up-regulated in Transcription
  misc_feature: MA Experiment 20000267 PARAMETER Experiment Name: At_Drought_P Parameter: Age (day) Value: 7
  misc_feature: MA Experiment 20000267 PARAMETER Experiment Name: At_Drought_P Parameter: Organism Value: A. thaliana
  misc_feature: MA Experiment 20000267 PARAMETER Experiment Name: At_Drought_P Parameter: Plant Line Value: WS
  misc_feature: MA Experiment 20000267 PARAMETER Experiment Name: At_Drought_P Parameter: Timepoint (hr) Value: 6
  misc_feature: MA Experiment 20000267 PARAMETER Experiment Name: At_Drought_P Parameter: Tissue Value: Whole Plant
  misc_feature: MA Experiment 20000267 PARAMETER Experiment Name: At_Drought_P Parameter: Treatment Value: Drought vs. No Drought
  misc_feature: MA Experiment ID: 20000268 Result: Up-regulated in Transcription
  misc_feature: MA Experiment 20000268 PARAMETER Experiment Name: At_100mM_NaCl__P Parameter: Age (day) Value: 14
  misc_feature: MA Experiment 20000268 PARAMETER Experiment Name: At_100mM_NaCl__P Parameter: Organism Value: A. thaliana
  misc_feature: MA Experiment 20000268 PARAMETER Experiment Name: At_100mM_NaCl__P Parameter: Plant Line Value: WS
  misc_feature: MA Experiment 20000268 PARAMETER Experiment Name: At_100mM_NaCl__P Parameter: Timepoint (hr) Value: 6
  misc_feature: MA Experiment 20000268 PARAMETER Experiment Name: At_100mM_NaCl__P Parameter: Tissue Value: Whole Plant
  misc_feature: MA Experiment 20000268 PARAMETER Experiment Name: At_100mM_NaCl__P Parameter: Treatment Value: 100mM NaCl vs. No Treatment
  misc_feature: MA Experiment ID: 20000286 Result: Up-regulated in Transcription
  misc_feature: MA Experiment 20000286 PARAMETER Experiment Name: At_Open_Flower_P Parameter: Age (day) Value: 21
  misc_feature: MA Experiment 20000286 PARAMETER Experiment Name: At_Open_Flower_P Parameter: Plant Line Value: WS
  misc_feature: MA Experiment 20000286 PARAMETER Experiment Name: At_Open_Flower_P Parameter: Tissue Value: Half Open vs. Whole Plant
  misc_feature: MA Experiment ID: 20000439 Result: Up-regulated in Transcription
  misc_feature: MA Experiment 20000439 PARAMETER Experiment Name: At_Roots__P Parameter: Age (day) Value: 14 vs. 21
  misc_feature: MA Experiment 20000439 PARAMETER Experiment Name: At_Roots__P Parameter: Organism Value: A. thaliana
  misc_feature: MA Experiment 20000439 PARAMETER Experiment Name: At_Roots__P Parameter: Tissue Value: Roots vs. Whole Plant
  misc_feature: MA Experiment ID: 20000456 Result: Up-regulated in Transcription
  misc_feature: MA Experiment 20000456 PARAMETER Experiment Name: At_100uM_BA_P Parameter: Age (day) Value: 14
  misc_feature: MA Experiment 20000456 PARAMETER Experiment Name: At_100uM_BA_P Parameter: Organism Value: A. thaliana
  misc_feature: MA Experiment 20000456 PARAMETER Experiment Name: At_100uM_BA_P Parameter: Plant Line Value: WS
  misc_feature: MA Experiment 20000456 PARAMETER Experiment Name: At_100uM_BA_P Parameter: Timepoint (hr) Value: 6
  misc_feature: MA Experiment 20000456 PARAMETER Experiment Name: At_100uM_BA_P Parameter: Tissue Value: Aerial
  misc_feature: MA Experiment 20000456 PARAMETER Experiment Name: At_100uM_BA_P Parameter: Treatment Value: 100uM BA vs. No Treatment
  misc_feature: MA Experiment ID: 20000495 Result: Down-regulated in Transcription
  misc_feature: MA Experiment 20000495 PARAMETER Experiment Name: At_Guard_Cells_P Parameter: Harvest Date Value: 8/2/2002
  misc_feature: MA Experiment 20000495 PARAMETER Experiment Name: At_Guard_Cells_P Parameter: Organism Value: A. thaliana
  misc_feature: MA Experiment 20000495 PARAMETER Experiment Name: At_Guard_Cells_P Parameter: Tissue Value: Guard Cells vs. Leaves
  misc_feature: MA Experiment ID: 20000527 Result: Up-regulated in Transcription
  misc_feature: MA Experiment 20000527 PARAMETER Experiment Name: At_10percent_PEG_P Parameter: Age (day) Value: 20
  misc_feature: MA Experiment 20000527 PARAMETER Experiment Name: At_10percent_PEG_P Parameter: Organism Value: A. thaliana
  misc_feature: MA Experiment 20000527 PARAMETER Experiment Name: At_10percent_PEG_P Parameter: Plant Line Value: WS
  misc_feature: MA Experiment 20000527 PARAMETER Experiment Name: At_10percent_PEG_P Parameter: Timepoint (day) Value: 20
  misc_feature: MA Experiment 20000527 PARAMETER Experiment Name: At_10percent_PEG_P Parameter: Tissue Value: Whole Plant
  misc_feature: MA Experiment 20000527 PARAMETER Experiment Name: At_10percent_PEG_P Parameter: Treatment Value: 10percent PEG vs. No Treatment
  misc_feature: MA Experiment ID: 20000709 Result: Up-regulated in Transcription
  misc_feature: MA Experiment 20000709 PARAMETER Experiment Name: At_15mM_NH4NO3_L-to-H_P Parameter: Age (hr) Value: 14
  misc_feature: MA Experiment 20000709 PARAMETER Experiment Name: At_15mM_NH4NO3_L-to-H_P Parameter: Organism Value: A. thaliana
  misc_feature: MA Experiment 20000709 PARAMETER Experiment Name: At_15mM_NH4NO3_L-to-H_P Parameter: Plant Line Value: WS
  misc_feature: MA Experiment 20000709 PARAMETER Experiment Name: At_15mM_NH4NO3_L-to-H_P Parameter: Timepoint (hr) Value: 4
  misc_feature: MA Experiment 20000709 PARAMETER Experiment Name: At_15mM_NH4NO3_L-to-H_P Parameter: Tissue Value: Aerial
  misc_feature: MA Experiment 20000709 PARAMETER Experiment Name: At_15mM_NH4NO3_L-to-H_P Parameter: Treatment Value: 15mM NH4NO3 vs. 30mM Mannitol
  misc_feature: MA Experiment ID: 20000794 Result: Up-regulated in Transcription
  misc_feature: MA Experiment 20000794 PARAMETER Experiment Name: At_Petals_P Parameter: Age (day) Value: 23-25 days
  misc_feature: MA Experiment 20000794 PARAMETER Experiment Name: At_Petals_P Parameter: Plant Line Value: WS
  misc_feature: MA Experiment 20000794 PARAMETER Experiment Name: At_Petals_P Parameter: Tissue Value: Petals vs. Whole plant
  misc_feature: MA Experiment ID: 20001248 Result: Down-regulated in Transcription
  misc_feature: MA Experiment 20001248 PARAMETER Experiment Name: At_Far-red-induction_P Parameter: Age (day) Value: 7
  misc_feature: MA Experiment 20001248 PARAMETER Experiment Name: At_Far-red-induction_P Parameter: Light Value: Far-red vs. White
  misc_feature: MA Experiment 20001248 PARAMETER Experiment Name: At_Far-red-induction_P Parameter: Organism Value: A. thaliana
  misc_feature: MA Experiment 20001248 PARAMETER Experiment Name: At_Far-red-induction_P Parameter: Plant Line Value: Columbia
  misc_feature: MA Experiment 20001248 PARAMETER Experiment Name: At_Far-red-induction_P Parameter: Timepoint (hr) Value: 4
  misc_feature: MA Experiment 20001248 PARAMETER Experiment Name: At_Far-red-induction_P Parameter: Tissue Value: Whole Plant
  misc_feature: MA Experiment ID: 20001451 Result: Up-regulated in Transcription
  misc_feature: MA Experiment 20001451 PARAMETER Experiment Name: At_Far-red-induction_P Parameter: Age (day) Value: 7
  misc_feature: MA Experiment 20001451 PARAMETER Experiment Name: At_Far-red-induction_P Parameter: Light Value: Far-red vs. White
  misc_feature: MA Experiment 20001451 PARAMETER Experiment Name: At_Far-red-induction_P Parameter: Organism Value: A. thaliana
  misc_feature: MA Experiment 20001451 PARAMETER Experiment Name: At_Far-red-induction_P Parameter: Plant Line Value: Columbia
  misc_feature: MA Experiment 20001451 PARAMETER Experiment Name: At_Far-red-induction_P Parameter: Timepoint (hr) Value: 24
  misc_feature: MA Experiment 20001451 PARAMETER Experiment Name: At_Far-red-induction_P Parameter: Tissue Value: Whole Plant
  misc_feature: MA Experiment ID: 20001557 Result: Up-regulated in Transcription
  misc_feature: MA Experiment 20001557 PARAMETER Experiment Name: At_Drought_Soil_Dry_P Parameter: Age (day) Value: 27
  misc_feature: MA Experiment 20001557 PARAMETER Experiment Name: At_Drought_Soil_Dry_P Parameter: Organism Value: A. thaliana
  misc_feature: MA Experiment 20001557 PARAMETER Experiment Name: At_Drought_Soil_Dry_P Parameter: Plant Line Value: WS
  misc_feature: MA Experiment 20001557 PARAMETER Experiment Name: At_Drought_Soil_Dry_P Parameter: Post Timepoint (hr) Value: 3
  misc_feature: MA Experiment 20001557 PARAMETER Experiment Name: At_Drought_Soil_Dry_P Parameter: Post-Treatment Value: Re-Water vs. No Drought
  misc_feature: MA Experiment 20001557 PARAMETER Experiment Name: At_Drought_Soil_Dry_P Parameter: Timepoint (day) Value: 13
  misc_feature: MA Experiment 20001557 PARAMETER Experiment Name: At_Drought_Soil_Dry_P Parameter: Treatment Value: Drought vs. No Drought
  misc_feature: MA Experiment ID: 20001560 Result: Up-regulated in Transcription
  misc_feature: MA Experiment 20001560 PARAMETER Experiment Name: At_Drought_Soil_Dry_P Parameter: Age (day) Value: 28
  misc_feature: MA Experiment 20001560 PARAMETER Experiment Name: At_Drought_Soil_Dry_P Parameter: Organism Value: A. thaliana
  misc_feature: MA Experiment 20001560 PARAMETER Experiment Name: At_Drought_Soil_Dry_P Parameter: Plant Line Value: WS
  misc_feature: MA Experiment 20001560 PARAMETER Experiment Name: At_Drought_Soil_Dry_P Parameter: Post Timepoint (hr) Value: None
  misc_feature: MA Experiment 20001560 PARAMETER Experiment Name: At_Drought_Soil_Dry_P Parameter: Post-Treatment Value: None
  misc_feature: MA Experiment 20001560 PARAMETER Experiment Name: At_Drought_Soil_Dry_P Parameter: Timepoint (day) Value: 14
  misc_feature: MA Experiment 20001560 PARAMETER Experiment Name: At_Drought_Soil_Dry_P Parameter: Treatment Value: Drought vs. No Drought
  misc_feature: MA Experiment ID: 20001755 Result: Down-regulated in Transcription
  misc_feature: MA Experiment 20001755 PARAMETER Experiment Name: At_50mM_NH4NO3_L-to-H_P Parameter: Timepoint (hr) Value: 2
  misc_feature: MA Experiment 20001755 PARAMETER Experiment Name: At_50mM_NH4NO3_L-to-H_P Parameter: Tissue Value: Leaf
  misc_feature: MA Experiment 20001755 PARAMETER Experiment Name: At_50mM_NH4NO3_L-to-H_P Parameter: Treatment Value: 50mM NH4NO3 vs 100mM Mannitol
  misc_feature: MA Experiment ID: 20001756 Result: Up-regulated in Transcription
  misc_feature: MA Experiment 20001756 PARAMETER Experiment Name: At_50mM_NH4NO3_L-to-H_P Parameter: Timepoint (hr) Value: 4
  misc_feature: MA Experiment 20001756 PARAMETER Experiment Name: At_50mM_NH4NO3_L-to-H_P Parameter: Tissue Value: Leaf
  misc_feature: MA Experiment 20001756 PARAMETER Experiment Name: At_50mM_NH4NO3_L-to-H_P Parameter: Treatment Value: 50mM NH4NO3 vs 100mM Mannitol
  misc_feature: MA Experiment ID: 20001757 Result: Down-regulated in Transcription
  misc_feature: MA Experiment 20001757 PARAMETER Experiment Name: At_50mM_NH4NO3_L-to-H_P Parameter: Timepoint (hr) Value: 6
  misc_feature: MA Experiment 20001757 PARAMETER Experiment Name: At_50mM_NH4NO3_L-to-H_P Parameter: Tissue Value: Leaf
  misc_feature: MA Experiment 20001757 PARAMETER Experiment Name: At_50mM_NH4NO3_L-to-H_P Parameter: Treatment Value: 50mM NH4NO3 vs 100mM Mannitol
  misc_feature: MA Experiment ID: 20001760 Result: Up-regulated in Transcription
  misc_feature: MA Experiment 20001760 PARAMETER Experiment Name: At_50mM_NH4NO3_L-to-H_P Parameter: Timepoint (hr) Value: 2
  misc_feature: MA Experiment 20001760 PARAMETER Experiment Name: At_50mM_NH4NO3_L-to-H_P Parameter: Tissue Value: Siliques
  misc_feature: MA Experiment 20001760 PARAMETER Experiment Name: At_50mM_NH4NO3_L-to-H_P Parameter: Treatment Value: 50mM NH4NO3 vs 100mM Mannitol
  misc_feature: MA Experiment ID: 20001771 Result: Up-regulated in Transcription
  misc_feature: MA Experiment 20001771 PARAMETER Experiment Name: At_Far-red-enriched-adult_P Parameter: Age (day) Value: 28
  misc_feature: MA Experiment 20001771 PARAMETER Experiment Name: At_Far-red-enriched-adult_P Parameter: Light Value: Far-red enriched vs. White
  misc_feature: MA Experiment 20001771 PARAMETER Experiment Name: At_Far-red-enriched-adult_P Parameter: Organism Value: A. thaliana
  misc_feature: MA Experiment 20001771 PARAMETER Experiment Name: At_Far-red-enriched-adult_P Parameter: Plant Line Value: Columbia
  misc_feature: MA Experiment 20001771 PARAMETER Experiment Name: At_Far-red-enriched-adult_P Parameter: Timepoint (hr) Value: 16
  misc_feature: MA Experiment 20001771 PARAMETER Experiment Name: At_Far-red-enriched-adult_P Parameter: Tissue Value: Aerial
  misc_feature: MA Experiment ID: 20001904 Result: Up-regulated in Transcription
  misc_feature: MA Experiment 20001904 PARAMETER Experiment Name: At_Drought_Reproduction_P Parameter: Age (day) Value: 37
  misc_feature: MA Experiment 20001904 PARAMETER Experiment Name: At_Drought_Reproduction_P Parameter: Organism Value: A. thaliana
  misc_feature: MA Experiment 20001904 PARAMETER Experiment Name: At_Drought_Reproduction_P Parameter: Plant Line Value: WS
  misc_feature: MA Experiment 20001904 PARAMETER Experiment Name: At_Drought_Reproduction_P Parameter: Timepoint (day) Value: 7
  misc_feature: MA Experiment 20001904 PARAMETER Experiment Name: At_Drought_Reproduction_P Parameter: Tissue Value: Rosettes
  misc_feature: MA Experiment 20001904 PARAMETER Experiment Name: At_Drought_Reproduction_P Parameter: Treatment Value: Drought vs. No Drought
  misc_feature: MA Experiment ID: 20001906 Result: Up-regulated in Transcription
  misc_feature: MA Experiment 20001906 PARAMETER Experiment Name: At_Drought_Reproduction_P Parameter: Age (day) Value: 35
  misc_feature: MA Experiment 20001906 PARAMETER Experiment Name: At_Drought_Reproduction_P Parameter: Organism Value: A. thaliana
  misc_feature: MA Experiment 20001906 PARAMETER Experiment Name: At_Drought_Reproduction_P Parameter: Plant Line Value: WS
  misc_feature: MA Experiment 20001906 PARAMETER Experiment Name: At_Drought_Reproduction_P Parameter: Timepoint (day) Value: 5
  misc_feature: MA Experiment 20001906 PARAMETER Experiment Name: At_Drought_Reproduction_P Parameter: Tissue Value: Siliques
  misc_feature: MA Experiment 20001906 PARAMETER Experiment Name: At_Drought_Reproduction_P Parameter: Treatment Value: Drought vs. No Drought
  misc_feature: MA Experiment ID: 20001908 Result: Up-regulated in Transcription
  misc_feature: MA Experiment 20001908 PARAMETER Experiment Name: At_Drought_Reproduction_P Parameter: Age (day) Value: 40
  misc_feature: MA Experiment 20001908 PARAMETER Experiment Name: At_Drought_Reproduction_P Parameter: Organism Value: A. thaliana
  misc_feature: MA Experiment 20001908 PARAMETER Experiment Name: At_Drought_Reproduction_P Parameter: Plant Line Value: WS
  misc_feature: MA Experiment 20001908 PARAMETER Experiment Name: At_Drought_Reproduction_P Parameter: Timepoint (day) Value: 10
  misc_feature: MA Experiment 20001908 PARAMETER Experiment Name: At_Drought_Reproduction_P Parameter: Tissue Value: Siliques
  misc_feature: MA Experiment 20001908 PARAMETER Experiment Name: At_Drought_Reproduction_P Parameter: Treatment Value: Drought vs. No Drought
  misc_feature: Pfam Name: Chloroa_b-bind Pfam Description: Chlorophyll A-B binding protein
agtgtgagtaatttaggcgtcgtttaacatgcagtcagtgttcgctgctccttccggtgtattgactacacgcaacatcagaaacacaaaccaactcttcttcaagaggattgctccggtaggagtcagatgcatggctcagggcgatcctatcaaggaagatccttctgtgccctcgacctcgacttcggccactccaccacaaatgccacagtctcctcctccaccagttagcaagcctaaggtgagtacgaagtttggagatttgctagcgtttagcggtccagcacccgagaggatcaacgggagactagcaatggttggattcgtggcggccatcgccatggagttatcaaagggagaaaacgtgtttgctcagatctctgacggtggtgtcgggtggtttctaggaacaacagcgttgttgacgttggcatcgatggttccgttgttcaagggaataagggcagaggcaaagtcaaaagggttcatgacttcagacgccgagctatggaacggtcggtttgcgatgctcggtctcgttgcgttggccttcaccgagtacgtcactggtgggactctagtctaaagctaaagctttttgtttgctagtttaaggacaaatttggagaatgattatgtaacgcatagattgatttaatactatgagtttt

SEQ ID NO: 76280 - protein, 186 aa, Arabidopsis thaliana
  peptide (1)..(186): Ceres Seq. ID no. 7107466
  misc_feature: Pfam Name: Chloroa_b-bind Pfam Description: Chlorophyll A-B binding protein
  misc_feature (1)..(186): Homolog of NCBI NO: 18414282 NR Description: Expressed protein; protein id: At4g14690.1, by cDNA: 95834., supported by cDNA: gi_17104736 [Arabidopsis >gi|13878007|gb|AAK44081.1|AF370266_1 unknown protein
  misc_feature (1)..(185): Homolog of NCBI NO: 7488128 NR Description: probable light induced protein - Arabidopsis >gi|2244825|emb|CAB10248.1| light induced protein like thaliana] >gi|7268175|emb|CAB78511.1| light induced protein like
  misc_feature (1)..(186): Homolog of NCBI NO: 21618071 NR Description: light-induced protein-like protein [Arabidopsis
  misc_feature (1)..(186): Homolog of NCBI NO: 25315849 NR Description: early light-inducable protein [imported] -
  misc_feature (1)..(186): Homolog of NCBI NO: 15228866 NR Description: early light-induced protein; protein id: supported by cDNA: 14490., supported by cDNA: gi_15982904, by cDNA: gi_18700134, supported by cDNA: gi_1872543, supported by
  misc_feature (1)..(186): Homolog of NCBI NO: 38123375 NR Description: ELIP [Brassica rapa subsp. pekinensis]
  misc_feature (43)..(186): Homolog of NCBI NO: 16930757 NR Description: early light-induced protein-like protein [Retama
MQSVFAAPSGVLTTRNIRNTNQLFFKRIAPVGVRCMAQGDPIKEDPSVPSTSTSATPPQMPQSPPPPVSKPKVSTKFGDLLAFSGPAPERINGRLAMVGFVAAIAMELSKGENVFAQISDGGVGWFLGTTALLTLASMVPLFKGIRAEAKSKGFMTSDAELWNGRFAMLGLVALAFTEYVTGGTLV

SEQ ID NO: 76281 - protein, 151 aa, Arabidopsis thaliana
  peptide (1)..(151): Ceres Seq. ID no. 7107467
  misc_feature: Pfam Name: Chloroa_b-bind Pfam Description: Chlorophyll A-B binding protein
  misc_feature (1)..(151): Homolog of NCBI NO: 18414282 NR Description: Expressed protein; protein id: At4g14690.1, by cDNA: 95834., supported by cDNA: gi_17104736 [Arabidopsis >gi|13878007|gb|AAK44081.1|AF370266_1 unknown protein
  misc_feature (1)..(150): Homolog of NCBI NO: 7488128 NR Description: probable light induced protein - Arabidopsis >gi|2244825|emb|CAB10248.1| light induced protein like thaliana] >gi|7268175|emb|CAB78511.1| light induced protein like
  misc_feature (1)..(151): Homolog of NCBI NO: 21618071 NR Description: light-induced protein-like protein [Arabidopsis
  misc_feature (1)..(151): Homolog of NCBI NO: 25315849 NR Description: early light-inducable protein [imported] -
  misc_feature (1)..(151): Homolog of NCBI NO: 15228866 NR Description: early light-induced protein; protein id: supported by cDNA: 14490., supported by cDNA: gi_15982904, by cDNA: gi_18700134, supported by cDNA: gi_1872543, supported by
  misc_feature (1)..(151): Homolog of NCBI NO: 38123375 NR Description: ELIP [Brassica rapa subsp. pekinensis]
  misc_feature (8)..(151): Homolog of NCBI NO: 16930757 NR Description: early light-induced protein-like protein [Retama
MAQGDPIKEDPSVPSTSTSATPPQMPQSPPPPVSKPKVSTKFGDLLAFSGPAPERINGRLAMVGFVAAIAMELSKGENVFAQISDGGVGWFLGTTALLTLASMVPLFKGIRAEAKSKGFMTSDAELWNGRFAMLGLVALAFTEYVTGGTLV

SEQ ID NO: 76282 - protein, 127 aa, Arabidopsis thaliana
  peptide (1)..(127): Ceres Seq. ID no. 7107468
  misc_feature: Pfam Name: Chloroa_b-bind Pfam Description: Chlorophyll A-B binding protein
  misc_feature (1)..(127): Homolog of NCBI NO: 18414282 NR Description: Expressed protein; protein id: At4g14690.1, by cDNA: 95834., supported by cDNA: gi_17104736 [Arabidopsis >gi|13878007|gb|AAK44081.1|AF370266_1 unknown protein
  misc_feature (1)..(126): Homolog of NCBI NO: 7488128 NR Description: probable light induced protein - Arabidopsis >gi|2244825|emb|CAB10248.1| light induced protein like thaliana] >gi|7268175|emb|CAB78511.1| light induced protein like
  misc_feature (1)..(127): Homolog of NCBI NO: 21618071 NR Description: light-induced protein-like protein [Arabidopsis
  misc_feature (1)..(127): Homolog of NCBI NO: 25315849 NR Description: early light-inducable protein [imported] -
  misc_feature (1)..(127): Homolog of NCBI NO: 15228866 NR Description: early light-induced protein; protein id: supported by cDNA: 14490., supported by cDNA: gi_15982904, by cDNA: gi_18700134, supported by cDNA: gi_1872543, supported by
  misc_feature (1)..(127): Homolog of NCBI NO: 38123375 NR Description: ELIP [Brassica rapa subsp. pekinensis]
  misc_feature (1)..(127): Homolog of NCBI NO: 16930757 NR Description: early light-induced protein-like protein [Retama
MPQSPPPPVSKPKVSTKFGDLLAFSGPAPERINGRLAMVGFVAAIAMELSKGENVFAQISDGGVGWFLGTTALLTLASMVPLFKGIRAEAKSKGFMTSDAELWNGRFAMLGLVALAFTEYVTGGTLV

SEQ ID NO: 76283 - DNA, 1593 bp, Arabidopsis thaliana
  misc_feature (1)..(1593): Ceres Seq. ID no. 7107469
  misc_feature: MA Experiment ID: 108488 Result: Down-regulated in Transcription
  misc_feature: MA Experiment ID: 108561 Result: Up-regulated in Transcription
  misc_feature: MA Experiment 108561 PARAMETER Experiment Name: At_100uM_ABA_cDNA_P Parameter: Timepoint (hr) Value: 6
  misc_feature: MA Experiment 108561 PARAMETER Experiment Name: At_100uM_ABA_cDNA_P Parameter: Tissue Value: Aerial
  misc_feature: MA Experiment 108561 PARAMETER Experiment Name: At_100uM_ABA_cDNA_P Parameter: Treatment Value: 100uM ABA vs. No Treatment
  misc_feature: MA Experiment ID: 108573 Result: Up-regulated in Transcription
  misc_feature: MA Experiment 108573 PARAMETER Experiment Name: At_Drought_cDNA_P Parameter: Timepoint (hr) Value: 6
  misc_feature: MA Experiment 108573 PARAMETER Experiment Name: At_Drought_cDNA_P Parameter: Tissue Value: Aerial
  misc_feature: MA Experiment 108573 PARAMETER Experiment Name: At_Drought_cDNA_P Parameter: Treatment Value: Drought vs. No Drought
  misc_feature: MA Experiment ID: 108574 Result: Down-regulated in Transcription
  misc_feature: MA Experiment 108574 PARAMETER Experiment Name: At_Wounding__cDNA_P Parameter: Timepoint (hr) Value: 1
  misc_feature: MA Experiment 108574 PARAMETER Experiment Name: At_Wounding__cDNA_P Parameter: Tissue Value: Aerial
  misc_feature: MA Experiment 108574 PARAMETER Experiment Name: At_Wounding__cDNA_P Parameter: Treatment Value: Wounding vs. No Wounding
  misc_feature: MA Experiment ID: 108579 Result: Down-regulated in Transcription
  misc_feature: MA Experiment 108579 PARAMETER Experiment Name: At_4deg_Cold_cDNA_P Parameter: Temperature (deg C) Value: 4 vs. 22
  misc_feature: MA Experiment 108579 PARAMETER Experiment Name: At_4deg_Cold_cDNA_P Parameter: Timepoint (hr) Value: 6
  misc_feature: MA Experiment 108579 PARAMETER Experiment Name: At_4deg_Cold_cDNA_P Parameter: Tissue Value: Aerial
  misc_feature: MA Experiment ID: 108595 Result: Down-regulated in Transcription
  misc_feature: MA Experiment 108595 PARAMETER Experiment Name: At_Ler-pi_Ovule_cDNA_P Parameter: Plant Line Value: null
  misc_feature: MA Experiment ID: 20000069 Result: Up-regulated in Transcription
  misc_feature: MA Experiment 20000069 PARAMETER Experiment Name: At_100uM_ABA_Mutants_cDNA_P Parameter: Plant Line Value: CS23
  misc_feature: MA Experiment 20000069 PARAMETER Experiment Name: At_100uM_ABA_Mutants_cDNA_P Parameter: Timepoint (hr) Value: 6
  misc_feature: MA Experiment 20000069 PARAMETER Experiment Name: At_100uM_ABA_Mutants_cDNA_P Parameter: Tissue Value: Aerial
  misc_feature: MA Experiment 20000069 PARAMETER Experiment Name: At_100uM_ABA_Mutants_cDNA_P Parameter: Treatment Value: 100uM ABA vs. No Treatment
  misc_feature: MA Experiment ID: 20000071 Result: Up-regulated in Transcription
  misc_feature: MA Experiment 20000071 PARAMETER Experiment Name: At_100uM_ABA_Mutants_cDNA_P Parameter: Plant Line Value: CS8104
  misc_feature: MA Experiment 20000071 PARAMETER Experiment Name: At_100uM_ABA_Mutants_cDNA_P Parameter: Timepoint (hr) Value: 6
  misc_feature: MA Experiment 20000071 PARAMETER Experiment Name: At_100uM_ABA_Mutants_cDNA_P Parameter: Tissue Value: Aerial
  misc_feature: MA Experiment 20000071 PARAMETER Experiment Name: At_100uM_ABA_Mutants_cDNA_P Parameter: Treatment Value: 100uM ABA vs. No Treatment
  misc_feature: MA Experiment ID: 20000179 Result: Up-regulated in Transcription
  misc_feature: MA Experiment 20000179 PARAMETER Experiment Name: At_Germinating_Seeds_P Parameter: Age (hr) Value: 6 vs. 0
  misc_feature: MA Experiment 20000179 PARAMETER Experiment Name: At_Germinating_Seeds_P Parameter: Tissue Value: Germinating Seeds
  misc_feature: MA Experiment ID: 20000180 Result: Up-regulated in Transcription
  misc_feature: MA Experiment 20000180 PARAMETER Experiment Name: At_Germinating_Seeds_P Parameter: Age (hr) Value: 24 vs. 0
  misc_feature: MA Experiment 20000180 PARAMETER Experiment Name: At_Germinating_Seeds_P Parameter: Tissue Value: Germinating Seeds
  misc_feature: MA Experiment ID: 20000213 Result: Down-regulated in Transcription
  misc_feature: MA Experiment 20000213 PARAMETER Experiment Name: At_4deg_Cold_P Parameter: Timepoint (hr) Value: 2
  misc_feature: MA Experiment ID: 20000234 Result: Down-regulated in Transcription
  misc_feature: MA Experiment 20000234 PARAMETER Experiment Name: At_Siliques_P Parameter: Age (day) Value: 21
  misc_feature: MA Experiment 20000234 PARAMETER Experiment Name: At_Siliques_P Parameter: Organism Value: A. thaliana
  misc_feature: MA Experiment 20000234 PARAMETER Experiment Name: At_Siliques_P Parameter: Plant Line Value: WS
  misc_feature: MA Experiment 20000234 PARAMETER Experiment Name: At_Siliques_P Parameter: Tissue Value: Less Than 5mm Siliques vs. Whole Plant
  misc_feature: MA Experiment ID: 20000265 Result: Down-regulated in Transcription
  misc_feature: MA Experiment 20000265 PARAMETER Experiment Name: At_Open_Flower_P Parameter: Age (day) Value: 21
  misc_feature: MA Experiment 20000265 PARAMETER Experiment Name: At_Open_Flower_P Parameter: Plant Line Value: WS
  misc_feature: MA Experiment 20000265 PARAMETER Experiment Name: At_Open_Flower_P Parameter: Tissue Value: Closed Flower vs. Whole Plant
  misc_feature: MA Experiment ID: 20000286 Result: Down-regulated in Transcription
  misc_feature: MA Experiment 20000286 PARAMETER Experiment Name: At_Open_Flower_P Parameter: Age (day) Value: 21
  misc_feature: MA Experiment 20000286 PARAMETER Experiment Name: At_Open_Flower_P Parameter: Plant Line Value: WS
  misc_feature: MA Experiment 20000286 PARAMETER Experiment Name: At_Open_Flower_P Parameter: Tissue Value: Half Open vs. Whole Plant
  misc_feature: MA Experiment ID: 20000438 Result: Down-regulated in Transcription
  misc_feature: MA Experiment 20000438 PARAMETER Experiment Name: At_Shoots__P Parameter: Age (day) Value: 14
  misc_feature: MA Experiment 20000438 PARAMETER Experiment Name: At_Shoots__P Parameter: Tissue Value: Shoots vs. Whole Plant
  misc_feature: MA Experiment ID: 20000794 Result: Up-regulated in Transcription
  misc_feature: MA Experiment 20000794 PARAMETER Experiment Name: At_Petals_P Parameter: Age (day) Value: 23-25 days
  misc_feature: MA Experiment 20000794 PARAMETER Experiment Name: At_Petals_P Parameter: Plant Line Value: WS
  misc_feature: MA Experiment 20000794 PARAMETER Experiment Name: At_Petals_P Parameter: Tissue Value: Petals vs. Whole plant
  misc_feature: MA Experiment ID: 20001247 Result: Up-regulated in Transcription
  misc_feature: MA Experiment 20001247 PARAMETER Experiment Name: At_Far-red-induction_P Parameter: Age (day) Value: 7
  misc_feature: MA Experiment 20001247 PARAMETER Experiment Name: At_Far-red-induction_P Parameter: Light Value: Far-red vs. White
  misc_feature: MA Experiment 20001247 PARAMETER Experiment Name: At_Far-red-induction_P Parameter: Organism Value: A. thaliana
  misc_feature: MA Experiment 20001247 PARAMETER Experiment Name: At_Far-red-induction_P Parameter: Plant Line Value: Columbia
  misc_feature: MA Experiment 20001247 PARAMETER Experiment Name: At_Far-red-induction_P Parameter: Timepoint (hr) Value: 1
  misc_feature: MA Experiment 20001247 PARAMETER Experiment Name: At_Far-red-induction_P Parameter: Tissue Value: Whole Plant
  misc_feature: MA Experiment ID: 20001248 Result: Up-regulated in Transcription
  misc_feature: MA Experiment 20001248 PARAMETER Experiment Name: At_Far-red-induction_P Parameter: Age (day) Value: 7
  misc_feature: MA Experiment 20001248 PARAMETER Experiment Name: At_Far-red-induction_P Parameter: Light Value: Far-red vs. White
  misc_feature: MA Experiment 20001248 PARAMETER Experiment Name: At_Far-red-induction_P Parameter: Organism Value: A. thaliana
  misc_feature: MA Experiment 20001248 PARAMETER Experiment Name: At_Far-red-induction_P Parameter: Plant Line Value: Columbia
  misc_feature: MA Experiment 20001248 PARAMETER Experiment Name: At_Far-red-induction_P Parameter: Timepoint (hr) Value: 4
  misc_feature: MA Experiment 20001248 PARAMETER Experiment Name: At_Far-red-induction_P Parameter: Tissue Value: Whole Plant
  misc_feature: MA Experiment ID: 20001450 Result: Up-regulated in Transcription
  misc_feature: MA Experiment 20001450 PARAMETER Experiment Name: At_Far-red-induction_P Parameter: Age (day) Value: 7
  misc_feature: MA Experiment 20001450 PARAMETER Experiment Name: At_Far-red-induction_P Parameter: Light Value: Far-red vs. White
  misc_feature: MA Experiment 20001450 PARAMETER Experiment Name: At_Far-red-induction_P Parameter: Organism Value: A. thaliana
  misc_feature: MA Experiment 20001450 PARAMETER Experiment Name: At_Far-red-induction_P Parameter: Plant Line Value: Columbia
  misc_feature: MA Experiment 20001450 PARAMETER Experiment Name: At_Far-red-induction_P Parameter: Timepoint (hr) Value: 8
  misc_feature: MA Experiment 20001450 PARAMETER Experiment Name: At_Far-red-induction_P Parameter: Tissue Value: Whole Plant
  misc_feature: MA Experiment ID: 20001451 Result: Up-regulated in Transcription
  misc_feature: MA Experiment 20001451 PARAMETER Experiment Name: At_Far-red-induction_P Parameter: Age (day) Value: 7
  misc_feature: MA Experiment 20001451 PARAMETER Experiment Name: At_Far-red-induction_P Parameter: Light Value: Far-red vs. White
  misc_feature: MA Experiment 20001451 PARAMETER Experiment Name: At_Far-red-induction_P Parameter: Organism Value: A. thaliana
  misc_feature: MA Experiment 20001451 PARAMETER Experiment Name: At_Far-red-induction_P Parameter: Plant Line Value: Columbia
  misc_feature: MA Experiment 20001451 PARAMETER Experiment Name: At_Far-red-induction_P Parameter: Timepoint (hr) Value: 24
  misc_feature: MA Experiment 20001451 PARAMETER Experiment Name: At_Far-red-induction_P Parameter: Tissue Value: Whole Plant
  misc_feature: MA Experiment ID: 20001558 Result: Down-regulated in Transcription
  misc_feature: MA Experiment 20001558 PARAMETER Experiment Name: At_Drought_Soil_Dry_P Parameter: Age (day) Value: 27
  misc_feature: MA Experiment 20001558 PARAMETER Experiment Name: At_Drought_Soil_Dry_P Parameter: Organism Value: A. thaliana
  misc_feature: MA Experiment 20001558 PARAMETER Experiment Name: At_Drought_Soil_Dry_P Parameter: Plant Line Value: WS
  misc_feature: MA Experiment 20001558 PARAMETER Experiment Name: At_Drought_Soil_Dry_P Parameter: Post Timepoint (hr) Value: 6
  misc_feature: MA Experiment 20001558 PARAMETER Experiment Name: At_Drought_Soil_Dry_P Parameter: Post-Treatment Value: Re-Water vs. No Drought
  misc_feature: MA Experiment 20001558 PARAMETER Experiment Name: At_Drought_Soil_Dry_P Parameter: Timepoint (day) Value: 13
  misc_feature: MA Experiment 20001558 PARAMETER Experiment Name: At_Drought_Soil_Dry_P Parameter: Treatment Value: Drought vs. No Drought
  misc_feature: MA Experiment ID: 20001560 Result: Down-regulated in Transcription
  misc_feature: MA Experiment 20001560 PARAMETER Experiment Name: At_Drought_Soil_Dry_P Parameter: Age (day) Value: 28
  misc_feature: MA Experiment 20001560 PARAMETER Experiment Name: At_Drought_Soil_Dry_P Parameter: Organism Value: A. thaliana
  misc_feature: MA Experiment 20001560 PARAMETER Experiment Name: At_Drought_Soil_Dry_P Parameter: Plant Line Value: WS
  misc_feature: MA Experiment 20001560 PARAMETER Experiment Name: At_Drought_Soil_Dry_P Parameter: Post Timepoint (hr) Value: None
  misc_feature: MA Experiment 20001560 PARAMETER Experiment Name: At_Drought_Soil_Dry_P Parameter: Post-Treatment Value: None
  misc_feature: MA Experiment 20001560 PARAMETER Experiment Name: At_Drought_Soil_Dry_P Parameter: Timepoint (day) Value: 14
  misc_feature: MA Experiment 20001560 PARAMETER Experiment Name: At_Drought_Soil_Dry_P Parameter: Treatment Value: Drought vs. No Drought
gacccacgcgtccgcaatttctccgtcactatcataaccatggcggtgctttcatctgcagatcgagctagtaatgagaagaaggtgaagagttcatactttgatttgccacctatggaaatgtctgtagcatttcctcaagcaactccagcctctacatttccaccttgtacttcagactattatcatttcaatgatctactgactccggaagaacaagctatccggaagaaagtgagggaatgcatggagaaagaagttgctccaataatgacagagtactgggagaaagcagaatttccattccatatcactccaaagcttggggctatgggtgttgctggtggctcgatcaagggttatggatgtcctggtctctccatcaccgccaatgcaattgccacagcagaaatagctagagttgatgcaagttgttcgactttcattttggtgcattcttctttgggcatgctcactattgcactctgtggatcagaagcacagaaggagaagtatttgccttctttggctcaattgaatactgtggcttgttgggctttgacagagcccgacaatggaagcgatgcaagtggtctaggaacgactgcaacaaaggttgaaggaggttggaaaattaatggacaaaagcgttggattggaaacagcacctttgcagatctgttgatcatctttgcgaggaatacaacaactaaccaaatcaacggattcatagtcaagaaagatgcgcctggcctaaaggctactaagatcccaaataaaataggtttacgtatggttcaaaatggagatattctactacagaatgtctttgttccagatgaggatcggttacctggggtaaattcttttcaggacaccagcaaggttctggctgtctcacgtgtaatggtggcctggcaaccaatcggcatatcaatgggaatctacgatatgtgccacaggtatctgaaggagaggaaacagtttggagcaccgttggctgctttccagttaaaccaacagaagcttgtgcagatgctgggtaacgttcaagcgatgtttctaatgggttggcgtctctgcaagctgtatgagacgggtcagatgactccaggtcaagccagtttaggaaaggcatggatttcatcaaaagcgagagaaactgcttcgctaggtcgggaattacttggtgggaatggaattctagcagattttctggtagcaaaggctttctgtgaccttgaacccatttatacatacgaagggacttatgatataaacaccttagtaacagggagggaagtaacgggtattgcgagtttcaaaccggctacacgtagccgtctctaagttaaaaggttgtccattgtttgttgttgtctgttggttagtattgatattgtgatgtggggtttacatctacaaatgtgccaaataatctgacccaaaaagatttagggtccaatgggggaataatatcgttgttgcaaaacataatccagttattgcttcttgcaatatggattcgtcttgtggcttgtactgggggaaataccatttgttaaccttttattaattcaaattgccaatgtc

SEQ ID NO: 76284 - protein, 449 aa, Arabidopsis thaliana
  peptide (1)..(449): Ceres Seq. ID no. 7107470
  misc_feature (186)..(284): Pfam Name: Acyl-CoA dehydrogenase, middle domain Pfam Description: Acyl-CoA dehydrogenase, middle domain
  misc_feature (14)..(449): Homolog of NCBI NO: 15231059 NR Description: acyl-coA dehydrogenase; protein id: At3g51840.1, by cDNA: 3844., supported by cDNA: gi_1657620, supported by cDNA:
  misc_feature (36)..(448): Homolog of NCBI NO: 34896018 NR Description: ESTs AU056822(S20908),C26441(C12328), correspond to a region of the predicted gene.~Similar to
  misc_feature (72)..(441): Homolog of NCBI NO: 31195739 NR Description: ENSANGP00000000259 [Anopheles gambiae]
  misc_feature (41)..(441): Homolog of NCBI NO: 29827888 NR Description: putative glutaryl-CoA dehydrogenase [Streptomyces
  misc_feature (56)..(448): Homolog of NCBI NO: 28829336 NR Description: similar to Arabidopsis thaliana (Mouse-ear
  misc_feature (59)..(441): Homolog of NCBI NO: 29827260 NR Description: putative glutaryl-CoA dehydrogenase [Streptomyces
  misc_feature (46)..(446): Homolog of NCBI NO: 25027279 NR Description: putative glutaryl-CoA dehydrogenase precursor
  misc_feature (59)..(448): Homolog of NCBI NO: 25026880 NR Description: putative acyl-CoA dehydrogenase [Corynebacterium
  misc_feature (55)..(441): Homolog of NCBI NO: 15805578 NR Description: glutaryl-CoA dehydrogenase, putative [Deinococcus
  misc_feature (60)..(446): Homolog of NCBI NO: 11498596 NR Description: glutaryl-CoA dehydrogenase (gcdH) [Archaeoglobus
DPRVRNFSVTIITMAVLSSADRASNEKKVKSSYFDLPPMEMSVAFPQATPASTFPPCTSDYYHFNDLLTPEEQAIRKKVRECMEKEVAPIMTEYWEKAEFPFHITPKLGAMGVAGGSIKGYGCPGLSITANAIATAEIARVDASCSTFILVHSSLGMLTIALCGSEAQKEKYLPSLAQLNTVACWALTEPDNGSDASGLGTTATKVEGGWKINGQKRWIGNSTFADLLIIFARNTTTNQINGFIVKKDAPGLKATKIPNKIGLRMVQNGDILLQNVFVPDEDRLPGVNSFQDTSKVLAVSRVMVAWQPIGISMGIYDMCHRYLKERKQFGAPLAAFQLNQQKLVQMLGNVQAMFLMGWRLCKLYETGQMTPGQASLGKAWISSKARETASLGRELLGGNGILADFLVAKAFCDLEPIYTYEGTYDINTLVTGREVTGIASFKPATRSRL

SEQ ID NO: 76285 - protein, 436 aa, Arabidopsis thaliana; identical to SEQ ID NO: 26763
  peptide (1)..(436): Ceres Seq. ID no. 7107471
  misc_feature (173)..(271): Pfam Name: Acyl-CoA dehydrogenase, middle domain Pfam Description: Acyl-CoA dehydrogenase, middle domain
  misc_feature (1)..(436): Homolog of NCBI NO: 15231059 NR Description: acyl-coA dehydrogenase; protein id: At3g51840.1, by cDNA: 3844., supported by cDNA: gi_1657620, supported by cDNA:
  misc_feature (23)..(435): Homolog of NCBI NO: 34896018 NR Description: ESTs AU056822(S20908),C26441(C12328), correspond to a region of the predicted gene.~Similar to
  misc_feature (59)..(428): Homolog of NCBI NO: 31195739 NR Description: ENSANGP00000000259 [Anopheles gambiae]
  misc_feature (28)..(428): Homolog of NCBI NO: 29827888 NR Description: putative glutaryl-CoA dehydrogenase [Streptomyces
  misc_feature (43)..(435): Homolog of NCBI NO: 28829336 NR Description: similar to Arabidopsis thaliana (Mouse-ear
  misc_feature (46)..(428): Homolog of NCBI NO: 29827260 NR Description: putative glutaryl-CoA dehydrogenase [Streptomyces
  misc_feature (33)..(433): Homolog of NCBI NO: 25027279 NR Description: putative glutaryl-CoA dehydrogenase precursor
  misc_feature (46)..(435): Homolog of NCBI NO: 25026880 NR Description: putative acyl-CoA dehydrogenase [Corynebacterium
  misc_feature (42)..(428): Homolog of NCBI NO: 15805578 NR Description: glutaryl-CoA dehydrogenase, putative [Deinococcus
  misc_feature (47)..(433): Homolog of NCBI NO: 11498596 NR Description: glutaryl-CoA dehydrogenase (gcdH) [Archaeoglobus

SEQ ID NO: 76286 - protein, 411 aa, Arabidopsis thaliana; identical to SEQ ID NO: 26764
  peptide (1)..(411): Ceres Seq. ID no. 7107472
  misc_feature (148)..(246): Pfam Name: Acyl-CoA dehydrogenase, middle domain Pfam Description: Acyl-CoA dehydrogenase, middle domain
  misc_feature (1)..(411): Homolog of NCBI NO: 15231059 NR Description: acyl-coA dehydrogenase; protein id: At3g51840.1, by cDNA: 3844., supported by cDNA: gi_1657620, supported by cDNA:
  misc_feature (1)..(410): Homolog of NCBI NO: 34896018 NR Description: ESTs AU056822(S20908),C26441(C12328), correspond to a region of the predicted gene.~Similar to
  misc_feature (34)..(403): Homolog of NCBI NO: 31195739 NR Description: ENSANGP00000000259 [Anopheles gambiae]
  misc_feature (3)..(403): Homolog of NCBI NO: 29827888 NR Description: putative glutaryl-CoA dehydrogenase [Streptomyces
  misc_feature (18)..(410): Homolog of NCBI NO: 28829336 NR Description: similar to Arabidopsis thaliana (Mouse-ear
  misc_feature (21)..(403): Homolog of NCBI NO: 29827260 NR Description: putative glutaryl-CoA dehydrogenase [Streptomyces
  misc_feature (8)..(408): Homolog of NCBI NO: 25027279 NR Description: putative glutaryl-CoA dehydrogenase precursor
  misc_feature (21)..(410): Homolog of NCBI NO: 25026880 NR Description: putative acyl-CoA dehydrogenase [Corynebacterium
  misc_feature (17)..(403): Homolog of NCBI NO: 15805578 NR Description: glutaryl-CoA dehydrogenase, putative [Deinococcus
  misc_feature (22)..(408): Homolog of NCBI NO: 11498596 NR Description: glutaryl-CoA dehydrogenase (gcdH) [Archaeoglobus

SEQ ID NO: 76287 - DNA, 1438 bp, Arabidopsis thaliana
  misc_feature (1)..(1438): Ceres Seq. ID no. 7107490
  misc_feature: MA Experiment ID: 20000315 Result: Up-regulated in Transcription
  misc_feature: MA Experiment 20000315 PARAMETER Experiment Name: At_14day_Shoots-Roots_Sub_P Parameter: Age (day) Value: 14
  misc_feature: MA Experiment 20000315 PARAMETER Experiment Name: At_14day_Shoots-Roots_Sub_P Parameter: Organism Value: A. thaliana
  misc_feature: MA Experiment 20000315 PARAMETER Experiment Name: At_14day_Shoots-Roots_Sub_P Parameter: Plant Line Value: WS
  misc_feature: MA Experiment 20000315 PARAMETER Experiment Name: At_14day_Shoots-Roots_Sub_P Parameter: Tissue Value: Shoots vs. Whole Plant
  misc_feature: MA Experiment ID: 20000328 Result: Up-regulated in Transcription
  misc_feature: MA Experiment 20000328 PARAMETER Experiment Name: At_42deg_Heat_Sub_P Parameter: Age (day) Value: 14
  misc_feature: MA Experiment 20000328 PARAMETER Experiment Name: At_42deg_Heat_Sub_P Parameter: Organism Value: A. thaliana
  misc_feature: MA Experiment 20000328 PARAMETER Experiment Name: At_42deg_Heat_Sub_P Parameter: Plant Line Value: WS
  misc_feature: MA Experiment 20000328 PARAMETER Experiment Name: At_42deg_Heat_Sub_P Parameter: Temperature (deg C) Value: 42 vs. 22
  misc_feature: MA Experiment 20000328 PARAMETER Experiment Name: At_42deg_Heat_Sub_P Parameter: Timepoint (hr) Value: 6
  misc_feature: MA Experiment 20000328 PARAMETER Experiment Name: At_42deg_Heat_Sub_P Parameter: Tissue Value: Aerial
  misc_feature: MA Experiment ID: 20000329 Result: Up-regulated in Transcription
  misc_feature: MA Experiment 20000329 PARAMETER Experiment Name: At_4deg_Cold_Sub_P Parameter: Age (day) Value: 14
  misc_feature: MA Experiment 20000329 PARAMETER Experiment Name: At_4deg_Cold_Sub_P Parameter: Organism Value: A. thaliana
  misc_feature: MA Experiment 20000329 PARAMETER Experiment Name: At_4deg_Cold_Sub_P Parameter: Plant Line Value: WS
  misc_feature: MA Experiment 20000329 PARAMETER Experiment Name: At_4deg_Cold_Sub_P Parameter: Temperature (deg C) Value: 4 vs. 22
  misc_feature: MA Experiment 20000329 PARAMETER Experiment Name: At_4deg_Cold_Sub_P Parameter: Timepoint (hr) Value: 6
  misc_feature: MA Experiment 20000329 PARAMETER Experiment Name: At_4deg_Cold_Sub_P Parameter: Tissue Value: Aerial
  misc_feature: MA Experiment ID: 20000355 Result: Down-regulated in Transcription
  misc_feature: MA Experiment 20000355 PARAMETER Experiment Name: At_Siliques_Sub_P Parameter: Age (day) Value: 21
  misc_feature: MA Experiment 20000355 PARAMETER Experiment Name: At_Siliques_Sub_P Parameter: Organism Value: A. thaliana
  misc_feature: MA Experiment 20000355 PARAMETER Experiment Name: At_Siliques_Sub_P Parameter: Plant Line Value: WS
  misc_feature: MA Experiment 20000355 PARAMETER Experiment Name: At_Siliques_Sub_P Parameter: Tissue Value: Less Than 5mm Siliques vs. Whole Plant
  misc_feature: MA Experiment ID: 20000440 Result: Down-regulated in Transcription
  misc_feature: MA Experiment 20000440 PARAMETER Experiment Name: At_Closed-Flower__Sub_P Parameter: Tissue Value: Closed Flower vs. Whole Plant
gaattccggaggtttcaggcaccattttctccttccgccgccgccatggaatcacttccccagccgcaaaaccaatcatctccggcaacgactccggcgaagatcctccttgggaaatacgaactcggtcgtcgtctcggtagcggaagcttcgcgaaagtccatttagctcgatcaatcgaatccgacgagctcgtcgccgttaaaatcatcgagaagaagaaaacaatcgaatccggtatggaaccaagaataatcagagagatcgatgcgatgcgtcgtcttcgtcatcatccaaacatactcaagatccatgaagttatggcaaccaaatctaagatctatctcgtaatggaactcgcttccggtggtgaacttttctcaaaagtcctccgtcgtggacgtcttcctgaatcaacggcgcgtcgttactttcaacaactcgcctccgctcttcgtttctctcaccaagacggtgtcgctcaccgtgatgtgaaacctcagaatctactcttagatgagcaaggtaacctcaaggtctctgactttggtttatcagctttaccggagcatctacaaaacggattgcttcacacggcgtgtggtactccggcttatacagctccggaggttatttcacggaggggatacgacggagcaaaagctgatgcgtggtcttgtggtgtgattttgtttgttttattggttggcgatgttccatttgatgattcgaatatcgctgcgatgtatcggaagattcatcggagagattatcggtttccgagctggatttcgaaacaagctaaatcgataatctatcagatgttagatccgaatccagtaacgaggatgagtattgaaacagtgatgaaaacgaattggttcaagaagtctctagagacttctgagtttcatcgtaacgtctttgattcggaagtagagatgaaatcgagtgttaattcgattactgcttttgatttgatctcgttatcgtcgggattagatctttctggattgtttgaggctaagaagaagaaggagaggagattcacggcgaaggtttcgggtgttgaagtggaggagaaggcgaagatgattggggagaagttaggttatgtagtgaagaagaagatgatgaagaaggaaggagaagtgaaggttgttggattagggagaggaagaactgtgattgtggtggaagcagtggagttaacggtggatgttgtggtggttgaagtgaaagttgttgaaggtgaagaagatgattcacggtggtctgatttgattactgagcttgaagatatagttctttcatggcacaatgacatcatgtaaatagattgtgactttgtggattttagtctcttttttgttttgtttctgttcagttttgtataatccatgaagaaatcaaaatctcccgcttcattgtcttttt

SEQ ID NO: 76288 - protein, 444 aa, Arabidopsis thaliana
  peptide (1)..(444): Ceres Seq. ID no. 7107491
  misc_feature (40)..(295): Pfam Name: Protein kinase domain Pfam Description: Protein kinase domain
  misc_feature (16)..(444): Homolog of NCBI NO: 15228920 NR Description: SNF1 related protein kinase (ATSRPK1); protein At3g23000.1, supported by cDNA: gi_13249112, supported by cDNA: supported by cDNA: gi_15451211, supported by cDNA: gi_5478790,
  misc_feature (16)..(444): Homolog of NCBI NO: 9798601 NR Description: serine/threonine protein kinase [Arabidopsis
  misc_feature (16)..(444): Homolog of NCBI NO: 15451212 NR Description: SNF1 related protein kinase [Arabidopsis thaliana]
  misc_feature (16)..(441): Homolog of NCBI NO: 15233500 NR Description: SNF1 like protein kinase; protein id: supported by cDNA: gi_13249502 [Arabidopsis thaliana]
  misc_feature (22)..(323): Homolog of NCBI NO: 15218854 NR Description: protein kinase PK4, putative; protein id: supported by cDNA: gi_14334387 [Arabidopsis thaliana]
  misc_feature (320)..(444): Homolog of NCBI NO: 15218854 NR Description: protein kinase PK4, putative; protein id: supported by cDNA: gi_14334387 [Arabidopsis thaliana]
  misc_feature (11)..(313): Homolog of NCBI NO: 5821067 NR Description: OsPK4 [Oryza sativa]
  misc_feature (321)..(422): Homolog of NCBI NO: 5821067 NR Description: OsPK4 [Oryza sativa]
  misc_feature (35)..(440): Homolog of NCBI NO: 15241066 NR Description: serine/threonine protein kinase ATPK10; protein At5g01810.1, supported by cDNA: gi_13249133, supported by cDNA: supported by cDNA: gi_1777311 [Arabidopsis thaliana]
  misc_feature (35)..(440): Homolog of NCBI NO: 1777312 NR Description: novel serine/threonine protein kinase
EFRRFQAPFSPSAAAMESLPQPQNQSSPATTPAKILLGKYELGRRLGSGSFAKVHLARSIESDELVAVKIIEKKKTIESGMEPRIIREIDAMRRLRHHPNILKIHEVMATKSKIYLVMELASGGELFSKVLRRGRLPESTARRYFQQLASALRFSHQDGVAHRDVKPQNLLLDEQGNLKVSDFGLSALPEHLQNGLLHTACGTPAYTAPEVISRRGYDGAKADAWSCGVILFVLLVGDVPFDDSNIAAMYRKIHRRDYRFPSWISKQAKSIIYQMLDPNPVTRMSIETVMKTNWFKKSLETSEFHRNVFDSEVEMKSSVNSITAFDLISLSSGLDLSGLFEAKKKKERRFTAKVSGVEVEEKAKMIGEKLGYVVKKKMMKKEGEVKVVGLGRGRTVIVVEAVELTVDVVVVEVKVVEGEEDDSRWSDLITELEDIVLSWHNDIM

SEQ ID NO: 76289 - protein, 429 aa, Arabidopsis thaliana
  peptide (1)..(429): Ceres Seq. ID no. 7107492
  misc_feature (25)..(280): Pfam Name: Protein kinase domain Pfam Description: Protein kinase domain
  misc_feature (1)..(429): Homolog of NCBI NO: 15228920 NR Description: SNF1 related protein kinase (ATSRPK1); protein At3g23000.1, supported by cDNA: gi_13249112, supported by cDNA: supported by cDNA: gi_15451211, supported by cDNA: gi_5478790,
  misc_feature (1)..(429): Homolog of NCBI NO: 9798601 NR Description: serine/threonine protein kinase [Arabidopsis
  misc_feature (1)..(429): Homolog of NCBI NO: 15451212 NR Description: SNF1 related protein kinase [Arabidopsis thaliana]
  misc_feature (1)..(426): Homolog of NCBI NO: 15233500 NR Description: SNF1 like protein kinase; protein id: supported by cDNA: gi_13249502 [Arabidopsis thaliana]
  misc_feature (7)..(308): Homolog of NCBI NO: 15218854 NR Description: protein kinase PK4, putative; protein id: supported by cDNA: gi_14334387 [Arabidopsis thaliana]
  misc_feature (305)..(429): Homolog of NCBI NO: 15218854 NR Description: protein kinase PK4, putative; protein id: supported by cDNA: gi_14334387 [Arabidopsis thaliana]
  misc_feature (1)..(298): Homolog of NCBI NO: 5821067 NR Description: OsPK4 [Oryza sativa]
  misc_feature (306)..(407): Homolog of NCBI NO: 5821067 NR Description: OsPK4 [Oryza sativa]
  misc_feature (20)..(425): Homolog of NCBI NO: 15241066 NR Description: serine/threonine protein kinase ATPK10; protein At5g01810.1, supported by cDNA: gi_13249133, supported by cDNA: supported by cDNA: gi_1777311 [Arabidopsis thaliana]
  misc_feature (20)..(425): Homolog of NCBI NO: 1777312 NR Description: novel serine/threonine protein kinase
MESLPQPQNQSSPATTPAKILLGKYELGRRLGSGSFAKVHLARSIESDELVAVKIIEKKKTIESGMEPRIIREIDAMRRLRHHPNILKIHEVMATKSKIYLVMELASGGELFSKVLRRGRLPESTARRYFQQLASALRFSHQDGVAHRDVKPQNLLLDEQGNLKVSDFGLSALPEHLQNGLLHTACGTPAYTAPEVISRRGYDGAKADAWSCGVILFVLLVGDVPFDDSNIAAMYRKIHRRDYRFPSWISKQAKSIIYQMLDPNPVTRMSIETVMKTNWFKKSLETSEFHRNVFDSEVEMKSSVNSITAFDLISLSSGLDLSGLFEAKKKKERRFTAKVSGVEVEEKAKMIGEKLGYVVKKKMMKKEGEVKVVGLGRGRTVIVVEAVELTVDVVVVEVKVVEGEEDDSRWSDLITELEDIVLSWHNDIM

SEQ ID NO: 76290 - protein, 364 aa, Arabidopsis thaliana
  peptide (1)..(364): Ceres Seq. ID no. 7107493
  misc_feature (1)..(215): Pfam Name: Protein kinase domain Pfam Description: Protein kinase domain
  misc_feature (1)..(364): Homolog of NCBI NO: 15228920 NR Description: SNF1 related protein kinase (ATSRPK1); protein At3g23000.1, supported by cDNA: gi_13249112, supported by cDNA: supported by cDNA: gi_15451211, supported by cDNA: gi_5478790,
  misc_feature (1)..(364): Homolog of NCBI NO: 9798601 NR Description: serine/threonine protein kinase [Arabidopsis
  misc_feature (1)..(364): Homolog of NCBI NO: 15451212 NR Description: SNF1 related protein kinase [Arabidopsis thaliana]
  misc_feature (1)..(361): Homolog of NCBI NO: 15233500 NR Description: SNF1 like protein kinase; protein id: supported by cDNA: gi_13249502 [Arabidopsis thaliana]
  misc_feature (1)..(243): Homolog of NCBI NO: 15218854 NR Description: protein kinase PK4, putative; protein id: supported by cDNA: gi_14334387 [Arabidopsis thaliana]
  misc_feature (240)..(364): Homolog of NCBI NO: 15218854 NR Description: protein kinase PK4, putative; protein id: supported by cDNA: gi_14334387 [Arabidopsis thaliana]
  misc_feature (1)..(233): Homolog of NCBI NO: 5821067 NR Description: OsPK4 [Oryza sativa]
  misc_feature (241)..(342): Homolog of NCBI NO: 5821067 NR Description: OsPK4 [Oryza sativa]
  misc_feature (1)..(360): Homolog of NCBI NO: 15241066 NR Description: serine/threonine protein kinase ATPK10; protein At5g01810.1, supported by cDNA: gi_13249133, supported by cDNA: supported by cDNA: gi_1777311 [Arabidopsis thaliana]
  misc_feature (1)..(360): Homolog of NCBI NO: 1777312 NR Description: novel serine/threonine protein kinase
MEPRIIREIDAMRRLRHHPNILKIHEVMATKSKIYLVMELASGGELFSKVLRRGRLPESTARRYFQQLASALRFSHQDGVAHRDVKPQNLLLDEQGNLKVSDFGLSALPEHLQNGLLHTACGTPAYTAPEVISRRGYDGAKADAWSCGVILFVLLVGDVPFDDSNIAAMYRKIHRRDYRFPSWISKQAKSIIYQMLDPNPVTRMSIETVMKTNWFKKSLETSEFHRNVFDSEVEMKSSVNSITAFDLISLSSGLDLSGLFEAKKKKERRFTAKVSGVEVEEKAKMIGEKLGYVVKKKMMKKEGEVKVVGLGRGRTVIVVEAVELTVDVVVVEVKVVEGEEDDSRWSDLITELEDIVLSWHNDIM

SEQ ID NO: 76291 - DNA, 1274 bp, Arabidopsis thaliana
  misc_feature (1)..(1274): Ceres Seq. ID no. 7107496
  misc_feature: MA Experiment ID: 20000069 Result: Down-regulated in Transcription
  misc_feature: MA Experiment 20000069 PARAMETER Experiment Name: At_100uM_ABA_Mutants_cDNA_P Parameter: Plant Line Value: CS23
  misc_feature: MA Experiment 20000069 PARAMETER Experiment Name: At_100uM_ABA_Mutants_cDNA_P Parameter: Timepoint (hr) Value: 6
  misc_feature: MA Experiment 20000069 PARAMETER Experiment Name: At_100uM_ABA_Mutants_cDNA_P Parameter: Tissue Value: Aerial
  misc_feature: MA Experiment 20000069 PARAMETER Experiment Name: At_100uM_ABA_Mutants_cDNA_P Parameter: Treatment Value: 100uM ABA vs. No Treatment
  misc_feature: MA Experiment ID: 20000072 Result: Down-regulated in Transcription
  misc_feature: MA Experiment 20000072 PARAMETER Experiment Name: At_100uM_ABA_Mutants_cDNA_P Parameter: Plant Line Value: CS8105
  misc_feature: MA Experiment 20000072 PARAMETER Experiment Name: At_100uM_ABA_Mutants_cDNA_P Parameter: Timepoint (hr) Value: 6
  misc_feature: MA Experiment 20000072 PARAMETER Experiment Name: At_100uM_ABA_Mutants_cDNA_P Parameter: Tissue Value: Aerial
  misc_feature: MA Experiment 20000072 PARAMETER Experiment Name: At_100uM_ABA_Mutants_cDNA_P Parameter: Treatment Value: 100uM ABA vs. No Treatment
  misc_feature: MA Experiment ID: 20000111 Result: Up-regulated in Transcription
  misc_feature: MA Experiment 20000111 PARAMETER Experiment Name: At_42deg_Heat_cDNA_P Parameter: Temperature (deg C) Value: 42 vs. 22
  misc_feature: MA Experiment 20000111 PARAMETER Experiment Name: At_42deg_Heat_cDNA_P Parameter: Timepoint (hr) Value: 6
  misc_feature: MA Experiment 20000111 PARAMETER Experiment Name: At_42deg_Heat_cDNA_P Parameter: Tissue Value: Aerial
  misc_feature: MA Experiment ID: 20000113 Result: Up-regulated in Transcription
  misc_feature: MA Experiment 20000113 PARAMETER Experiment Name: At_42deg_Heat_cDNA_P Parameter: Temperature (deg C) Value: 42 vs. 22
  misc_feature: MA Experiment 20000113 PARAMETER Experiment Name: At_42deg_Heat_cDNA_P Parameter: Timepoint (hr) Value: 8
  misc_feature: MA Experiment 20000113 PARAMETER Experiment Name: At_42deg_Heat_cDNA_P Parameter: Tissue Value: Aerial
  misc_feature: MA Experiment ID: 20000171 Result: Up-regulated in Transcription
  misc_feature: MA Experiment 20000171 PARAMETER Experiment Name: At_42deg_Heat_P Parameter: Age (day) Value: 14
  misc_feature: MA Experiment 20000171 PARAMETER Experiment Name: At_42deg_Heat_P Parameter: Organism Value: A. thaliana
  misc_feature: MA Experiment 20000171 PARAMETER Experiment Name: At_42deg_Heat_P Parameter: Plant Line Value: WS
  misc_feature: MA Experiment 20000171 PARAMETER Experiment Name: At_42deg_Heat_P Parameter: Temperature (deg C) Value: 42 vs. 22
  misc_feature: MA Experiment 20000171 PARAMETER Experiment Name: At_42deg_Heat_P Parameter: Timepoint (hr) Value: 1
  misc_feature: MA Experiment 20000171 PARAMETER Experiment Name: At_42deg_Heat_P Parameter: Tissue Value: Aerial
  misc_feature: MA Experiment ID: 20000173 Result: Up-regulated in Transcription
  misc_feature: MA Experiment 20000173 PARAMETER Experiment Name: At_42deg_Heat_P Parameter: Age (day) Value: 14
  misc_feature: MA Experiment 20000173 PARAMETER Experiment Name: At_42deg_Heat_P Parameter: Organism Value: A. thaliana
  misc_feature: MA Experiment 20000173 PARAMETER Experiment Name: At_42deg_Heat_P Parameter: Plant Line Value: WS
  misc_feature: MA Experiment 20000173 PARAMETER Experiment Name: At_42deg_Heat_P Parameter: Temperature (deg C) Value: 42 vs. 22
  misc_feature: MA Experiment 20000173 PARAMETER Experiment Name: At_42deg_Heat_P Parameter: Timepoint (hr) Value: 6
  misc_feature: MA Experiment 20000173 PARAMETER Experiment Name: At_42deg_Heat_P Parameter: Tissue Value: Aerial
  misc_feature: MA Experiment ID: 20000437 Result: Up-regulated in Transcription
  misc_feature: MA Experiment 20000437 PARAMETER Experiment Name: At_Drought_P Parameter: Age (day) Value: 8
  misc_feature: MA Experiment 20000437 PARAMETER Experiment Name: At_Drought_P Parameter: Organism Value: A. thaliana
  misc_feature: MA Experiment 20000437 PARAMETER Experiment Name: At_Drought_P Parameter: Plant Line Value: WS
  misc_feature: MA Experiment 20000437 PARAMETER Experiment Name: At_Drought_P Parameter: Timepoint (hr) Value: 24
  misc_feature: MA Experiment 20000437 PARAMETER Experiment Name: At_Drought_P Parameter: Tissue Value: Whole Plant
  misc_feature: MA Experiment 20000437 PARAMETER Experiment Name: At_Drought_P Parameter: Treatment Value: Drought vs. No Drought
  misc_feature: MA Experiment ID: 20001554 Result: Up-regulated in Transcription
  misc_feature: MA Experiment 20001554 PARAMETER Experiment Name: At_Drought_Soil_Dry_P Parameter: Age (day) Value: 21
  misc_feature: MA Experiment 20001554 PARAMETER Experiment Name: At_Drought_Soil_Dry_P Parameter: Organism Value: A. thaliana
  misc_feature: MA Experiment 20001554 PARAMETER Experiment Name: At_Drought_Soil_Dry_P Parameter: Plant Line Value: WS
  misc_feature: MA Experiment 20001554 PARAMETER Experiment Name: At_Drought_Soil_Dry_P Parameter: Post Timepoint (hr) Value: None
  misc_feature: MA Experiment 20001554 PARAMETER Experiment Name: At_Drought_Soil_Dry_P Parameter: Post-Treatment Value: None
  misc_feature: MA Experiment 20001554 PARAMETER Experiment Name: At_Drought_Soil_Dry_P Parameter: Timepoint (day) Value: 7
  misc_feature: MA Experiment 20001554 PARAMETER Experiment Name: At_Drought_Soil_Dry_P Parameter: Treatment Value: Drought vs. No Drought
  misc_feature: MA Experiment ID: 20001555 Result: Up-regulated in Transcription
  misc_feature: MA Experiment 20001555 PARAMETER Experiment Name: At_Drought_Soil_Dry_P Parameter: Age (day) Value: 24
  misc_feature: MA Experiment 20001555 PARAMETER Experiment Name: At_Drought_Soil_Dry_P Parameter: Organism Value: A. thaliana
  misc_feature: MA Experiment 20001555 PARAMETER Experiment Name: At_Drought_Soil_Dry_P Parameter: Plant Line Value: WS
  misc_feature: MA Experiment 20001555 PARAMETER Experiment Name: At_Drought_Soil_Dry_P Parameter: Post Timepoint (hr) Value: None
  misc_feature: MA Experiment 20001555 PARAMETER Experiment Name: At_Drought_Soil_Dry_P Parameter: Post-Treatment Value: None
  misc_feature: MA Experiment 20001555 PARAMETER Experiment Name: At_Drought_Soil_Dry_P Parameter: Timepoint (day) Value: 10
  misc_feature: MA Experiment 20001555 PARAMETER Experiment Name: At_Drought_Soil_Dry_P Parameter: Treatment Value: Drought vs. No Drought
tcaaaatcaaaaaaattctatcaaacaaggaaatatatcaatggcggtattgtctaaaccggtagcaataccaaaatccgggttctctctaatcccggttatagatatgtctgacccagaatccaaacatgccctcgtgaaagcatgcgaagacttcggcttcttcaaggtgatcaaccatggcgtttccgcagagctagtctctgttttagaacacgagaccgtcgatttcttctcgttgcccaagtcagagaaaacccaagtcgcaggttatcccttcggatacgggaacagtaagattggtcggaatggtgacgtgggttgggttgagtacttgttgatgaacgctaatcatgattccggttcgggtccactatttccaagtcttctcaaaagcccgggaactttcagaaacgcattggaagagtacacaacatcagtgagaaaaatgacattcgatgttttggagaagatcacagatgggctagggatcaaaccgaggaacacacttagcaagcttgtgtctgaccaaaacacggactcgatattgagacttaatcactatccaccatgtcctcttagcaataagaaaaccaatggtggtaagaatgtgattggttttggtgaacacacagatcctcaaatcatctctgtcttaagatctaacaacacttctggtctccaaattaatctaaatgatggctcatggatctctgtccctcccgatcacacttccttcttcttcaacgttggtgactctctccaggtgatgacaaatgggaggttcaagagcgtgaggcatagggttttagctaactgtaaaaaatctagggtttctatgatttacttcgctggaccttcattgactcagagaatcgctccgttgacatgtttgatagacaatgaggacgagaggttgtacgaggagtttacttggtctgaatacaaaaactctacctacaactctagattgtctgataataggcttcaacaattcgaaaggaagactataaaaaatctcctaaattgattgatatatctatttaatctataagtgtgtgctacatacagacaatgcatctgtatattttgaagttaatgttatttgttaatccaataactgtaaaaacatgcaagagtgtgtttgtttgtttcgtaatatcaacatcgctcccatcttttatggataaaaaaaaaaaaaaaaaaaacactgttttgatgtaagctacattttactttatgtgtacatcttattgtgttaaataaattatttc

SEQ ID NO: 76292 - protein, 342 aa, Arabidopsis thaliana
  peptide (1)..(342): Ceres Seq. ID no. 7107497
  misc_feature (179)..(286): Pfam Name: 2OG-Fe(II) oxygenase superfamily Pfam Description: 2OG-Fe(II) oxygenase superfamily
  misc_feature (14)..(342): Homolog of NCBI NO: 15218350 NR Description: gibberellin 2- oxidase; protein id: At1g78440.1, by cDNA: 156482., supported by cDNA: gi_13430551 [Arabidopsis
  misc_feature (14)..(342): Homolog of NCBI NO: 21553670 NR Description: gibberellin 2- oxidase [Arabidopsis thaliana]
QNQKNSIKQGNISMAVLSKPVAIPKSGFSLIPVIDMSDPESKHALVKACEDFGFFKVINHGVSAELVSVLEHETVDFFSLPKSEKTQVAGYPFGYGNSKIGRNGDVGWVEYLLMNANHDSGSGPLFPSLLKSPGTFRNALEEYTTSVRKMTFDVLEKITDGLGIKPRNTLSKLVSDQNTDSILRLNHYPPCPLSNKKTNGGKNVIGFGEHTDPQIISVLRSNNTSGLQINLNDGSWISVPPDHTSFFFNVGDSLQVMTNGRFKSVRHRVLANCKKSRVSMIYFAGPSLTQRIAPLTCLIDNEDERLYEEFTWSEYKNSTYNSRLSDNRLQQFERKTIKNLLN

SEQ ID NO: 76293 - protein, 329 aa, Arabidopsis thaliana; identical to SEQ ID NO: 43184
  peptide (1)..(329): Ceres Seq. ID no. 7107498
  misc_feature (166)..(273): Pfam Name: 2OG-Fe(II) oxygenase superfamily Pfam Description: 2OG-Fe(II) oxygenase superfamily
  misc_feature (1)..(329): Homolog of NCBI NO: 15218350 NR Description: gibberellin 2- oxidase; protein id: At1g78440.1, by cDNA: 156482., supported by cDNA: gi_13430551 [Arabidopsis
  misc_feature (1)..(329): Homolog of NCBI NO: 21553670 NR Description: gibberellin 2- oxidase [Arabidopsis thaliana]

SEQ ID NO: 76294 - protein, 307 aa, Arabidopsis thaliana; identical to SEQ ID NO: 43185
  peptide (1)..(307): Ceres Seq. ID no. 7107499
  misc_feature (144)..(251): Pfam Name: 2OG-Fe(II) oxygenase superfamily Pfam Description: 2OG-Fe(II) oxygenase superfamily
  misc_feature (1)..(307): Homolog of NCBI NO: 15218350 NR Description: gibberellin 2- oxidase; protein id: At1g78440.1, by cDNA: 156482., supported by cDNA: gi_13430551 [Arabidopsis
  misc_feature (1)..(307): Homolog of NCBI NO: 21553670 NR Description: gibberellin 2- oxidase [Arabidopsis thaliana]

SEQ ID NO: 76295 - DNA, 943 bp, Arabidopsis thaliana
  misc_feature (1)..(943): Ceres Seq. ID no. 7107512
  misc_feature: MA Experiment ID: 108434 Result: Down-regulated in Transcription
  misc_feature: MA Experiment 108434 PARAMETER Experiment Name: At_Root_Tips_cDNA_P Parameter: Tissue Value: Root Tips
  misc_feature: MA Experiment ID: 108435 Result: Down-regulated in Transcription
  misc_feature: MA Experiment 108435 PARAMETER Experiment Name: At_stm_Mutants_cDNA_P Parameter: Plant Line Value: wt Landsburg vs stm
  misc_feature: MA Experiment 108435 PARAMETER Experiment Name: At_stm_Mutants_cDNA_P Parameter: Tissue Value: Shoot Apical Meristem Region
  misc_feature: MA Experiment ID: 108461 Result: Up-regulated in Transcription
  misc_feature: MA Experiment 108461 PARAMETER Experiment Name: At_Germinating_Seeds_cDNA_P Parameter: Age (day) Value: 1 vs. 0
  misc_feature: MA Experiment 108461 PARAMETER Experiment Name: At_Germinating_Seeds_cDNA_P Parameter: Tissue Value: Germinating Seeds
  misc_feature: MA Experiment ID: 108462 Result: Up-regulated in Transcription
  misc_feature: MA Experiment 108462 PARAMETER Experiment Name: At_Germinating_Seeds_cDNA_P Parameter: Age (day) Value: 2 vs. 0
  misc_feature: MA Experiment 108462 PARAMETER Experiment Name: At_Germinating_Seeds_cDNA_P Parameter: Tissue Value: Germinating Seeds
  misc_feature: MA Experiment ID: 108463 Result: Up-regulated in Transcription
  misc_feature: MA Experiment 108463 PARAMETER Experiment Name: At_Germinating_Seeds_cDNA_P Parameter: Age (day) Value: 3 vs. 0
  misc_feature: MA Experiment 108463 PARAMETER Experiment Name: At_Germinating_Seeds_cDNA_P Parameter: Tissue Value: Germinating Seeds
  misc_feature: MA Experiment ID: 108464 Result: Up-regulated in Transcription
  misc_feature: MA Experiment 108464 PARAMETER Experiment Name: At_Germinating_Seeds_cDNA_P Parameter: Age (day) Value: 4 vs. 0
  misc_feature: MA Experiment 108464 PARAMETER Experiment Name: At_Germinating_Seeds_cDNA_P Parameter: Tissue Value: Germinating Seeds
  misc_feature: MA Experiment ID: 108488 Result: Up-regulated in Transcription
  misc_feature: MA Experiment ID: 108489 Result: Down-regulated in Transcription
  misc_feature: MA Experiment ID: 108595 Result: Down-regulated in Transcription
  misc_feature: MA Experiment 108595 PARAMETER Experiment Name: At_Ler-pi_Ovule_cDNA_P Parameter: Plant Line Value: null
  misc_feature: MA Experiment ID: 20000072 Result: Down-regulated in Transcription
  misc_feature: MA Experiment 20000072 PARAMETER Experiment Name: At_100uM_ABA_Mutants_cDNA_P Parameter: Plant Line Value: CS8105
  misc_feature: MA Experiment 20000072 PARAMETER Experiment Name: At_100uM_ABA_Mutants_cDNA_P Parameter: Timepoint (hr) Value: 6
  misc_feature: MA Experiment 20000072 PARAMETER Experiment Name: At_100uM_ABA_Mutants_cDNA_P Parameter: Tissue Value: Aerial
  misc_feature: MA Experiment 20000072 PARAMETER Experiment Name: At_100uM_ABA_Mutants_cDNA_P Parameter: Treatment Value: 100uM ABA vs. No Treatment
  misc_feature: MA Experiment ID: 20000086 Result: Down-regulated in Transcription
  misc_feature: MA Experiment 20000086 PARAMETER Experiment Name: At_100uM_ABA_Mutants_cDNA_P Parameter: Plant Line Value: CS22
  misc_feature: MA Experiment 20000086 PARAMETER Experiment Name: At_100uM_ABA_Mutants_cDNA_P Parameter: Timepoint (hr) Value: 6
  misc_feature: MA Experiment 20000086 PARAMETER Experiment Name: At_100uM_ABA_Mutants_cDNA_P Parameter: Tissue Value: Aerial
  misc_feature: MA Experiment 20000086 PARAMETER Experiment Name: At_100uM_ABA_Mutants_cDNA_P Parameter: Treatment Value: 100uM ABA vs. No Treatment
  misc_feature: MA Experiment ID: 20000087 Result: Down-regulated in Transcription
  misc_feature: MA Experiment 20000087 PARAMETER Experiment Name: At_100uM_ABA_Mutants_cDNA_P Parameter: Plant Line Value: WS
  misc_feature: MA Experiment 20000087 PARAMETER Experiment Name: At_100uM_ABA_Mutants_cDNA_P Parameter: Timepoint (hr) Value: 6
  misc_feature: MA Experiment 20000087 PARAMETER Experiment Name: At_100uM_ABA_Mutants_cDNA_P Parameter: Tissue Value: Aerial
  misc_feature: MA Experiment 20000087 PARAMETER Experiment Name: At_100uM_ABA_Mutants_cDNA_P Parameter: Treatment Value: 100uM ABA vs. No Treatment
  misc_feature: MA Experiment ID: 20000088 Result: Down-regulated in Transcription
  misc_feature: MA Experiment 20000088 PARAMETER Experiment Name: At_100uM_ABA_Mutants_cDNA_P Parameter: Plant Line Value: Landsberg
  misc_feature: MA Experiment 20000088 PARAMETER Experiment Name: At_100uM_ABA_Mutants_cDNA_P Parameter: Timepoint (hr) Value: 6
  misc_feature: MA Experiment 20000088 PARAMETER Experiment Name: At_100uM_ABA_Mutants_cDNA_P Parameter: Tissue Value: Aerial
  misc_feature: MA Experiment 20000088 PARAMETER Experiment Name: At_100uM_ABA_Mutants_cDNA_P Parameter: Treatment Value: 100uM ABA vs. No Treatment
  misc_feature: MA Experiment ID: 20000090 Result: Down-regulated in Transcription
gaccacgcgtccggagacacaaccaacactcatttctccacatcttgagagaaaaaacagagcaagtatattagagatctcatggcgatggcggtctccggagctgtcctcagtgggattggttcttcgttcctcaccggaggcaagagaggtgccaccgcattggcaagcggcgtaggcactggagctcagagagttggcaggaaaactcttattgtcgctgctgcggctgctcagcctaagaaatcttggatccctgccgttaaaggtggtggcaacttccttgaccctgaatggctcgatggctcgctaccaggagatttcgggttcgacccattgggtttggggaaagacccggcttttctgaaatggtacagagaggctgagctgatccatggccgatgggcgatggcagcggttcttgggatcttcgtcggccaggcctggagcggtgtggcatggtttgaagctggagcccagccagacgcgatcgctcccttctcgttcgggtcgcttcttggaacccaattgcttctcatgggttgggtggagagcaaacgatgggtcgatttcttcaacccggattctcaatcggttgagtgggcaacgccatggtcgaagaccgccgagaatttcgcgaactataccggcgatcagggataccccggtgggagattcttcgatccgttgggtctcgccgggaaaaaccgcgacggtgtttatgagccggactttgagaagctggagaggctgaaattggcagagattaagcactcgaggctcgcaatggttgccatgttgatcttttactttgaggccgggcaggggaaaacgcctctcggtgctcttggtttgtgagaaaacggcatgatgtttttgattctgtagatacaatttctcttccaaaaacctaatgtttctcttcttcaatgtgacatttggg

SEQ ID NO: 76296 - protein, 258 aa, Arabidopsis thaliana
  peptide (1)..(258): Ceres Seq. ID no. 7107513
  misc_feature (68)..(247): Pfam Name: Chlorophyll A-B binding protein Pfam Description: Chlorophyll A-B binding protein
  misc_feature (1)..(258): Homolog of NCBI NO: 25299024 NR Description: chlorophyll a/b-binding protein Lhcb6 [imported] Arabidopsis thaliana >gi|4741960|gb|AAD28777.1|AF134130_1 Lhcb6
  misc_feature (1)..(258): Homolog of NCBI NO: 15218330 NR Description: chlorophyll binding protein, putative; protein At1g15820.1, supported by cDNA: gi_12083257, supported by cDNA: supported by cDNA: gi_20148630, supported by cDNA: gi_4741959
  misc_feature (1)..(258): Homolog of NCBI NO: 8954298 NR Description: chlorophyll a/b-binding protein CP24 precursor
  misc_feature (1)..(258): Homolog of NCBI NO: 543939 NR Description: Chlorophyll A-B binding protein CP24, chloroplast
  misc_feature (1)..(258): Homolog of NCBI NO: 115834 NR Description: Chlorophyll A-B binding protein CP24 10B,
  misc_feature (6)..(258): Homolog of NCBI NO: 115833 NR Description: Chlorophyll A-B binding protein CP24 10A,
  misc_feature (1)..(258): Homolog of NCBI NO: 21740892 NR Description: OSJNBa0036B21.6 [Oryza sativa (japonica
  misc_feature (32)..(258): Homolog of NCBI NO: 7443235 NR Description: chlorophyll a/b-binding apoprotein CP24 precursor
  misc_feature (6)..(245): Homolog of NCBI NO: 115766 NR Description: Chlorophyll A-B binding protein, chloroplast
  misc_feature (39)..(256): Homolog of NCBI NO: 5902596 NR Description: light harvesting complex a protein [Volvox
MAMAVSGAVLSGIGSSFLTGGKRGATALASGVGTGAQRVGRKTLIVAAAAAQPKKSWIPAVKGGGNFLDPEWLDGSLPGDFGFDPLGLGKDPAFLKWYREAELIHGRWAMAAVLGIFVGQAWSGVAWFEAGAQPDAIAPFSFGSLLGTQLLLMGWVESKRWVDFFNPDSQSVEWATPWSKTAENFANYTGDQGYPGGRFFDPLGLAGKNRDGVYEPDFEKLERLKLAEIKHSRLAMVAMLIFYFEAGQGKTPLGALGL

SEQ ID NO: 76297 - protein, 256 aa, Arabidopsis thaliana
  peptide (1)..(256): Ceres Seq. ID no. 7107514
  misc_feature (66)..(245): Pfam Name: Chlorophyll A-B binding protein Pfam Description: Chlorophyll A-B binding protein
  misc_feature (1)..(256): Homolog of NCBI NO: 25299024 NR Description: chlorophyll a/b-binding protein Lhcb6 [imported] Arabidopsis thaliana >gi|4741960|gb|AAD28777.1|AF134130_1 Lhcb6
  misc_feature (1)..(256): Homolog of NCBI NO: 15218330 NR Description: chlorophyll binding protein, putative; protein At1g15820.1, supported by cDNA: gi_12083257, supported by cDNA: supported by cDNA: gi_20148630, supported by cDNA: gi_4741959
  misc_feature (1)..(256): Homolog of NCBI NO: 8954298 NR Description: chlorophyll a/b-binding protein CP24 precursor
  misc_feature (1)..(256): Homolog of NCBI NO: 543939 NR Description: Chlorophyll A-B binding protein CP24, chloroplast
  misc_feature (1)..(256): Homolog of NCBI NO: 115834 NR Description: Chlorophyll A-B binding protein CP24 10B,
  misc_feature (4)..(256): Homolog of NCBI NO: 115833 NR Description: Chlorophyll A-B binding protein CP24 10A,
  misc_feature (1)..(256): Homolog of NCBI NO: 21740892 NR Description: OSJNBa0036B21.6 [Oryza sativa (japonica
  misc_feature (30)..(256): Homolog of NCBI NO: 7443235 NR Description: chlorophyll a/b-binding apoprotein CP24 precursor
  misc_feature (4)..(243): Homolog of NCBI NO: 115766 NR Description: Chlorophyll A-B binding protein, chloroplast
  misc_feature (37)..(254): Homolog of NCBI NO: 5902596 NR Description: light harvesting complex a protein [Volvox
MAVSGAVLSGIGSSFLTGGKRGATALASGVGTGAQRVGRKTLIVAAAAAQPKKSWIPAVKGGGNFLDPEWLDGSLPGDFGFDPLGLGKDPAFLKWYREAELIHGRWAMAAVLGIFVGQAWSGVAWFEAGAQPDAIAPFSFGSLLGTQLLLMGWVESKRWVDFFNPDSQSVEWATPWSKTAENFANYTGDQGYPGGRFFDPLGLAGKNRDGVYEPDFEKLERLKLAEIKHSRLAMVAMLIFYFEAGQGKTPLGALGL

SEQ ID NO: 76298 - protein, 149 aa, Arabidopsis thaliana; identical to SEQ ID NO: 40174
  peptide (1)..(149): Ceres Seq. ID no. 7107515
  misc_feature (1)..(138): Pfam Name: Chlorophyll A-B binding protein Pfam Description: Chlorophyll A-B binding protein
  misc_feature (1)..(149): Homolog of NCBI NO: 25299024 NR Description: chlorophyll a/b-binding protein Lhcb6 [imported] Arabidopsis thaliana >gi|4741960|gb|AAD28777.1|AF134130_1 Lhcb6
  misc_feature (1)..(149): Homolog of NCBI NO: 15218330 NR Description: chlorophyll binding protein, putative; protein At1g15820.1, supported by cDNA: gi_12083257, supported by cDNA: supported by cDNA: gi_20148630, supported by cDNA: gi_4741959
  misc_feature (1)..(149): Homolog of NCBI NO: 8954298 NR Description: chlorophyll a/b-binding protein CP24 precursor
  misc_feature (1)..(149): Homolog of NCBI NO: 543939 NR Description: Chlorophyll A-B binding protein CP24, chloroplast
  misc_feature (1)..(149): Homolog of NCBI NO: 115834 NR Description: Chlorophyll A-B binding protein CP24 10B,
  misc_feature (1)..(149): Homolog of NCBI NO: 115833 NR Description: Chlorophyll A-B binding protein CP24 10A,
  misc_feature (1)..(149): Homolog of NCBI NO: 21740892 NR Description: OSJNBa0036B21.6 [Oryza sativa (japonica
  misc_feature (1)..(149): Homolog of NCBI NO: 7443235 NR Description: chlorophyll a/b-binding apoprotein CP24 precursor
  misc_feature (1)..(136): Homolog of NCBI NO: 115766 NR Description: Chlorophyll A-B binding protein, chloroplast
  misc_feature (1)..(147): Homolog of NCBI NO: 5902596 NR Description: light harvesting complex a protein [Volvox

SEQ ID NO: 76299 - DNA, 1024 bp, Arabidopsis thaliana
  misc_feature (1)..(1024): Ceres Seq. ID no. 7107516
  misc_feature: MA Experiment ID: 108435 Result: Down-regulated in Transcription
  misc_feature: MA Experiment 108435 PARAMETER Experiment Name: At_stm_Mutants_cDNA_P Parameter: Plant Line Value: wt Landsburg vs stm
  misc_feature: MA Experiment 108435 PARAMETER Experiment Name: At_stm_Mutants_cDNA_P Parameter: Tissue Value: Shoot Apical Meristem Region
  misc_feature: MA Experiment ID: 108461 Result: Up-regulated in Transcription
  misc_feature: MA Experiment 108461 PARAMETER Experiment Name: At_Germinating_Seeds_cDNA_P Parameter: Age (day) Value: 1 vs. 0
  misc_feature: MA Experiment 108461 PARAMETER Experiment Name: At_Germinating_Seeds_cDNA_P Parameter: Tissue Value: Germinating Seeds
  misc_feature: MA Experiment ID: 108462 Result: Up-regulated in Transcription
  misc_feature: MA Experiment 108462 PARAMETER Experiment Name: At_Germinating_Seeds_cDNA_P Parameter: Age (day) Value: 2 vs. 0
  misc_feature: MA Experiment 108462 PARAMETER Experiment Name: At_Germinating_Seeds_cDNA_P Parameter: Tissue Value: Germinating Seeds
  misc_feature: MA Experiment ID: 108463 Result: Up-regulated in Transcription
  misc_feature: MA Experiment 108463 PARAMETER Experiment Name: At_Germinating_Seeds_cDNA_P Parameter: Age (day) Value: 3 vs. 0
  misc_feature: MA Experiment 108463 PARAMETER Experiment Name: At_Germinating_Seeds_cDNA_P Parameter: Tissue Value: Germinating Seeds
  misc_feature: MA Experiment ID: 108464 Result: Up-regulated in Transcription
  misc_feature: MA Experiment 108464 PARAMETER Experiment Name: At_Germinating_Seeds_cDNA_P Parameter: Age (day) Value: 4 vs. 0
  misc_feature: MA Experiment 108464 PARAMETER Experiment Name: At_Germinating_Seeds_cDNA_P Parameter: Tissue Value: Germinating Seeds
  misc_feature: MA Experiment ID: 108488 Result: Up-regulated in Transcription
  misc_feature: MA Experiment ID: 108489 Result: Down-regulated in Transcription
  misc_feature: MA Experiment ID: 108573 Result: Up-regulated in Transcription
  misc_feature: MA Experiment 108573 PARAMETER Experiment Name: At_Drought_cDNA_P Parameter: Timepoint (hr) Value: 6
  misc_feature: MA Experiment 108573 PARAMETER Experiment Name: At_Drought_cDNA_P Parameter: Tissue Value: Aerial
  misc_feature: MA Experiment 108573 PARAMETER Experiment Name: At_Drought_cDNA_P Parameter: Treatment Value: Drought vs. No Drought
  misc_feature: MA Experiment ID: 20000072 Result: Down-regulated in Transcription
  misc_feature: MA Experiment 20000072 PARAMETER Experiment Name: At_100uM_ABA_Mutants_cDNA_P Parameter: Plant Line Value: CS8105
  misc_feature: MA Experiment 20000072 PARAMETER Experiment Name: At_100uM_ABA_Mutants_cDNA_P Parameter: Timepoint (hr) Value: 6
  misc_feature: MA Experiment 20000072 PARAMETER Experiment Name: At_100uM_ABA_Mutants_cDNA_P Parameter: Tissue Value: Aerial
  misc_feature: MA Experiment 20000072 PARAMETER Experiment Name: At_100uM_ABA_Mutants_cDNA_P Parameter: Treatment Value: 100uM ABA vs. No Treatment
  misc_feature: MA Experiment ID: 20000086 Result: Down-regulated in Transcription
  misc_feature: MA Experiment 20000086 PARAMETER Experiment Name: At_100uM_ABA_Mutants_cDNA_P Parameter: Plant Line Value: CS22
  misc_feature: MA Experiment 20000086 PARAMETER Experiment Name: At_100uM_ABA_Mutants_cDNA_P Parameter: Timepoint (hr) Value: 6
  misc_feature: MA Experiment 20000086 PARAMETER Experiment Name: At_100uM_ABA_Mutants_cDNA_P Parameter: Tissue Value: Aerial
  misc_feature: MA Experiment 20000086 PARAMETER Experiment Name: At_100uM_ABA_Mutants_cDNA_P Parameter: Treatment Value: 100uM ABA vs. No Treatment
  misc_feature: MA Experiment ID: 20000087 Result: Down-regulated in Transcription
  misc_feature: MA Experiment 20000087 PARAMETER Experiment Name: At_100uM_ABA_Mutants_cDNA_P Parameter: Plant Line Value: WS
  misc_feature: MA Experiment 20000087 PARAMETER Experiment Name: At_100uM_ABA_Mutants_cDNA_P Parameter: Timepoint (hr) Value: 6
  misc_feature: MA Experiment 20000087 PARAMETER Experiment Name: At_100uM_ABA_Mutants_cDNA_P Parameter: Tissue Value: Aerial
  misc_feature: MA Experiment 20000087 PARAMETER Experiment Name: At_100uM_ABA_Mutants_cDNA_P Parameter: Treatment Value: 100uM ABA vs. No Treatment
  misc_feature: MA Experiment ID: 20000089 Result: Down-regulated in Transcription
  misc_feature: MA Experiment ID: 20000307 Result: Up-regulated in Transcription
  misc_feature: MA Experiment 20000307 PARAMETER Experiment Name: At_Germinating_Seeds_Sub_P Parameter: Age (hr) Value: 24 vs. 0
  misc_feature: MA Experiment 20000307 PARAMETER Experiment Name: At_Germinating_Seeds_Sub_P Parameter: Organism Value: A. thaliana
  misc_feature: MA Experiment 20000307 PARAMETER Experiment Name: At_Germinating_Seeds_Sub_P Parameter: Plant Line Value: WS
  misc_feature: MA Experiment 20000307 PARAMETER Experiment Name: At_Germinating_Seeds_Sub_P Parameter: Tissue Value: Germinating Seeds
  misc_feature: MA Experiment ID: 20000314 Result: Down-regulated in Transcription
  misc_feature: MA Experiment 20000314 PARAMETER Experiment Name: At_14day_Shoots-Roots_Sub_P Parameter: Age (day) Value: 14
  misc_feature: MA Experiment 20000314 PARAMETER Experiment Name: At_14day_Shoots-Roots_Sub_P Parameter: Organism Value: A. thaliana
  misc_feature: MA Experiment 20000314 PARAMETER Experiment Name: At_14day_Shoots-Roots_Sub_P Parameter: Plant Line Value: WS
  misc_feature: MA Experiment 20000314 PARAMETER Experiment Name: At_14day_Shoots-Roots_Sub_P Parameter: Tissue Value: Roots vs. Whole Plant
  misc_feature: MA Experiment ID: 20000327 Result: Up-regulated in Transcription
  misc_feature: MA Experiment 20000327 PARAMETER Experiment Name: At_42deg_Heat_Sub_P Parameter: Age (day) Value: 14
  misc_feature: MA Experiment 20000327 PARAMETER Experiment Name: At_42deg_Heat_Sub_P Parameter: Organism Value: A. thaliana
  misc_feature: MA Experiment 20000327 PARAMETER Experiment Name: At_42deg_Heat_Sub_P Parameter: Plant Line Value: WS
  misc_feature: MA Experiment 20000327 PARAMETER Experiment Name: At_42deg_Heat_Sub_P Parameter: Temperature (deg C) Value: 42 vs. 22
  misc_feature: MA Experiment 20000327 PARAMETER Experiment Name: At_42deg_Heat_Sub_P Parameter: Timepoint (hr) Value: 1
  misc_feature: MA Experiment 20000327 PARAMETER Experiment Name: At_42deg_Heat_Sub_P Parameter: Tissue Value: Aerial
  misc_feature: MA Experiment ID: 20000328 Result: Up-regulated in Transcription
  misc_feature: MA Experiment 20000328 PARAMETER Experiment Name: At_42deg_Heat_Sub_P Parameter: Age (day) Value: 14
  misc_feature: MA Experiment 20000328 PARAMETER Experiment Name: At_42deg_Heat_Sub_P Parameter: Organism Value: A. thaliana
  misc_feature: MA Experiment 20000328 PARAMETER Experiment Name: At_42deg_Heat_Sub_P Parameter: Plant Line Value: WS
  misc_feature: MA Experiment 20000328 PARAMETER Experiment Name: At_42deg_Heat_Sub_P Parameter: Temperature (deg C) Value: 42 vs. 22
  misc_feature: MA Experiment 20000328 PARAMETER Experiment Name: At_42deg_Heat_Sub_P Parameter: Timepoint (hr) Value: 6
  misc_feature: MA Experiment 20000328 PARAMETER Experiment Name: At_42deg_Heat_Sub_P Parameter: Tissue Value: Aerial
  misc_feature: MA Experiment ID: 20000355 Result: Down-regulated in Transcription
  misc_feature: MA Experiment 20000355 PARAMETER Experiment Name: At_Siliques_Sub_P Parameter: Age (day) Value: 21
  misc_feature: MA Experiment 20000355 PARAMETER Experiment Name: At_Siliques_Sub_P Parameter: Organism Value: A. thaliana
  misc_feature: MA Experiment 20000355 PARAMETER Experiment Name: At_Siliques_Sub_P Parameter: Plant Line Value: WS
  misc_feature: MA Experiment 20000355 PARAMETER Experiment Name: At_Siliques_Sub_P Parameter: Tissue Value: Less Than 5mm Siliques vs. Whole Plant
  misc_feature: MA Experiment ID: 20000440 Result: Down-regulated in Transcription
  misc_feature: MA Experiment 20000440 PARAMETER Experiment Name: At_Closed-Flower__Sub_P Parameter: Tissue Value: Closed Flower vs. Whole Plant
gacccacgcgtccgcgcgacagaactaactaacgacgccgggagatggccgccacttcaaccgccgctgctgcttcttcaatcatgggtacccgggtggtttccgacattagctccaattcaagccggttcacagcccggttcggattcggaaccaagaaagcatctcccaaaaaggctaagacggttatctcagaccggcctctatggttcccaggcgcaaaatcacccgaatatctcgacggttcacttgtcggggactacgggttcgatccttttggtttaggcaaaccggcggagtatctccaattcgatttggattccttggaccagaacttagccaagaacttatacggagaagtgatcgggactcgtaccgaggcggtggaccccaaatcgacgccgtttcagccatatagtgaagtcttcgggctacaaagattcagagaatgtgagctgattcacggtcggtgggcaatgctcgccactcttggcgctatcaccgtcgaatggctcaccggtgttacttggcaagacgccggcaaggtagagctagtggatggatcatcttacttaggacagccattgccgttctctatctcgacattgatatggatcgaagtgttagtgatcggctacattgagttccaacgaaacgctgaactggactcggagaagcgtttgtatccaggaggcaagttctttgacccgttaggactagcgtctgacccggtgaagaaggctcagcttcagctagctgagatcaaacatgctcgtttagccatggttggattcttgggttttgcggttcaggcggctgcaaccggtaaaggaccgctcaacaactgggcgactcaccttagtgacccacttcacaccaccattatcgataccttctcttcctcctgatgtggtggcttttagcttctactggtgtcatgtaatgatgtggtggcttttagcttctactggtgtcatgtaatgatgtaacgtcgttattttaaagaaaatttggcaccttttgt

SEQ ID NO: 76300 - protein, 287 aa, Arabidopsis thaliana; identical to SEQ ID NO: 34996
  peptide (1)..(287): Ceres Seq. ID no. 7107517
  misc_feature (60)..(258): Pfam Name: Chlorophyll A-B binding protein Pfam Description: Chlorophyll A-B binding protein
  misc_feature (1)..(287): Homolog of NCBI NO: 15231990 NR Description: putative chlorophyll a/b-binding protein; protein At3g08940.1, supported by cDNA: gi_17473744, supported by cDNA:
  misc_feature (1)..(287): Homolog of NCBI NO: 15241005 NR Description: light-harvesting chlorophyll a/b binding protein; id: At5g01530.1, supported by cDNA: gi_13877546, supported by gi_15081738, supported by cDNA: gi_15081814, supported by cDNA:
  misc_feature (1)..(287): Homolog of NCBI NO: 20260162 NR Description: chlorophyll a/b-binding protein CP29 [Arabidopsis
  misc_feature (1)..(287): Homolog of NCBI NO: 13877547 NR Description: chlorophyll a/b-binding protein CP29 [Arabidopsis
  misc_feature (1)..(287): Homolog of NCBI NO: 15081739 NR Description: AT5g01530/F7A7_50 [Arabidopsis thaliana]
  misc_feature (3)..(287): Homolog of NCBI NO: 4689382 NR Description: chlorophyll a/b binding protein CP29 [Vigna
  misc_feature (3)..(287): Homolog of NCBI NO: 445116 NR Description: light-harvesting complex IIa protein;
  misc_feature (3)..(287): Homolog of NCBI NO: 7443230 NR Description: probable chlorophyll a/b-binding protein - rice
  misc_feature (3)..(287): Homolog of NCBI NO: 7443231 NR Description: chlorophyll a/b-binding protein CP29 precursor -
  misc_feature (1)..(183): Homolog of NCBI NO: 30680697 NR Description: chlorophyll a/b-binding protein -related

SEQ ID NO: 76301 - protein, 274 aa, Arabidopsis thaliana; identical to SEQ ID NO: 34997
  peptide (1)..(274): Ceres Seq. ID no. 7107518
  misc_feature (47)..(245): Pfam Name: Chlorophyll A-B binding protein Pfam Description: Chlorophyll A-B binding protein
  misc_feature (1)..(274): Homolog of NCBI NO: 15231990 NR Description: putative chlorophyll a/b-binding protein; protein At3g08940.1, supported by cDNA: gi_17473744, supported by cDNA:
  misc_feature (1)..(274): Homolog of NCBI NO: 15241005 NR Description: light-harvesting chlorophyll a/b binding protein; id: At5g01530.1, supported by cDNA: gi_13877546, supported by gi_15081738, supported by cDNA: gi_15081814, supported by cDNA:
  misc_feature (1)..(274): Homolog of NCBI NO: 20260162 NR Description: chlorophyll a/b-binding protein CP29 [Arabidopsis
  misc_feature (1)..(274): Homolog of NCBI NO: 13877547 NR Description: chlorophyll a/b-binding protein CP29 [Arabidopsis
  misc_feature (1)..(274): Homolog of NCBI NO: 15081739 NR Description: AT5g01530/F7A7_50 [Arabidopsis thaliana]
  misc_feature (1)..(274): Homolog of NCBI NO: 4689382 NR Description: chlorophyll a/b binding protein CP29 [Vigna
  misc_feature (1)..(274): Homolog of NCBI NO: 445116 NR Description: light-harvesting complex IIa protein;
  misc_feature (1)..(274): Homolog of NCBI NO: 7443230 NR Description: probable chlorophyll a/b-binding protein - rice
  misc_feature (1)..(274): Homolog of NCBI NO: 7443231 NR Description: chlorophyll a/b-binding protein CP29 precursor -
  misc_feature (1)..(170): Homolog of NCBI NO: 30680697 NR Description: chlorophyll a/b-binding protein -related

SEQ ID NO: 76302 - protein, 143 aa, Arabidopsis thaliana; identical to SEQ ID NO: 34998
  peptide (1)..(143): Ceres Seq. ID no. 7107519
  misc_feature (1)..(114): Pfam Name: Chlorophyll A-B binding protein Pfam Description: Chlorophyll A-B binding protein
  misc_feature (1)..(143): Homolog of NCBI NO: 15231990 NR Description: putative chlorophyll a/b-binding protein; protein At3g08940.1, supported by cDNA: gi_17473744, supported by cDNA:
  misc_feature (1)..(143): Homolog of NCBI NO: 15241005 NR Description: light-harvesting chlorophyll a/b binding protein; id: At5g01530.1, supported by cDNA: gi_13877546, supported by gi_15081738, supported by cDNA: gi_15081814, supported by cDNA:
  misc_feature (1)..(143): Homolog of NCBI NO: 20260162 NR Description: chlorophyll a/b-binding protein CP29 [Arabidopsis
  misc_feature (1)..(143): Homolog of NCBI NO: 13877547 NR Description: chlorophyll a/b-binding protein CP29 [Arabidopsis
  misc_feature (1)..(143): Homolog of NCBI NO: 15081739 NR Description: AT5g01530/F7A7_50 [Arabidopsis thaliana]
  misc_feature (1)..(143): Homolog of NCBI NO: 4689382 NR Description: chlorophyll a/b binding protein CP29 [Vigna
  misc_feature (1)..(143): Homolog of NCBI NO: 445116 NR Description: light-harvesting complex IIa protein;
  misc_feature (1)..(143): Homolog of NCBI NO: 7443230 NR Description: probable chlorophyll a/b-binding protein - rice
  misc_feature (1)..(143): Homolog of NCBI NO: 7443231 NR Description: chlorophyll a/b-binding protein CP29 precursor -
  misc_feature (1)..(39): Homolog of NCBI NO: 30680697 NR Description: chlorophyll a/b-binding protein -related

SEQ ID NO: 76303 - DNA, 921 bp, Arabidopsis thaliana
  misc_feature (1)..(921): Ceres Seq. ID no. 7107520
  misc_feature: MA Experiment ID: 108434 Result: Down-regulated in Transcription
  misc_feature: MA Experiment 108434 PARAMETER Experiment Name: At_Root_Tips_cDNA_P Parameter: Tissue Value: Root Tips
  misc_feature: MA Experiment ID: 108435 Result: Down-regulated in Transcription
  misc_feature: MA Experiment 108435 PARAMETER Experiment Name: At_stm_Mutants_cDNA_P Parameter: Plant Line Value: wt Landsburg vs stm
  misc_feature: MA Experiment 108435 PARAMETER Experiment Name: At_stm_Mutants_cDNA_P Parameter: Tissue Value: Shoot Apical Meristem Region
  misc_feature: MA Experiment ID: 108461 Result: Up-regulated in Transcription
  misc_feature: MA Experiment 108461 PARAMETER Experiment Name: At_Germinating_Seeds_cDNA_P Parameter: Age (day) Value: 1 vs. 0
  misc_feature: MA Experiment 108461 PARAMETER Experiment Name: At_Germinating_Seeds_cDNA_P Parameter: Tissue Value: Germinating Seeds
  misc_feature: MA Experiment ID: 108462 Result: Up-regulated in Transcription
  misc_feature: MA Experiment 108462 PARAMETER Experiment Name: At_Germinating_Seeds_cDNA_P Parameter: Age (day) Value: 2 vs. 0
  misc_feature: MA Experiment 108462 PARAMETER Experiment Name: At_Germinating_Seeds_cDNA_P Parameter: Tissue Value: Germinating Seeds
  misc_feature: MA Experiment ID: 108464 Result: Up-regulated in Transcription
  misc_feature: MA Experiment 108464 PARAMETER Experiment Name: At_Germinating_Seeds_cDNA_P Parameter: Age (day) Value: 4 vs. 0
  misc_feature: MA Experiment 108464 PARAMETER Experiment Name: At_Germinating_Seeds_cDNA_P Parameter: Tissue Value: Germinating Seeds
  misc_feature: MA Experiment ID: 108488 Result: Up-regulated in Transcription
  misc_feature: MA Experiment ID: 108595 Result: Down-regulated in Transcription
  misc_feature: MA Experiment 108595 PARAMETER Experiment Name: At_Ler-pi_Ovule_cDNA_P Parameter: Plant Line Value: null
  misc_feature: MA Experiment ID: 20000087 Result: Down-regulated in Transcription
  misc_feature: MA Experiment 20000087 PARAMETER Experiment Name: At_100uM_ABA_Mutants_cDNA_P Parameter: Plant Line Value: WS
  misc_feature: MA Experiment 20000087 PARAMETER Experiment Name: At_100uM_ABA_Mutants_cDNA_P Parameter: Timepoint (hr) Value: 6
  misc_feature: MA Experiment 20000087 PARAMETER Experiment Name: At_100uM_ABA_Mutants_cDNA_P Parameter: Tissue Value: Aerial
  misc_feature: MA Experiment 20000087 PARAMETER Experiment Name: At_100uM_ABA_Mutants_cDNA_P Parameter: Treatment Value: 100uM ABA vs. No Treatment
  misc_feature: MA Experiment ID: 20000179 Result: Up-regulated in Transcription
  misc_feature: MA Experiment 20000179 PARAMETER Experiment Name: At_Germinating_Seeds_P Parameter: Age (hr) Value: 6 vs. 0
  misc_feature: MA Experiment 20000179 PARAMETER Experiment Name: At_Germinating_Seeds_P Parameter: Tissue Value: Germinating Seeds
  misc_feature: MA Experiment ID: 20000180 Result: Up-regulated in Transcription
  misc_feature: MA Experiment 20000180 PARAMETER Experiment Name: At_Germinating_Seeds_P Parameter: Age (hr) Value: 24 vs. 0
  misc_feature: MA Experiment 20000180 PARAMETER Experiment Name: At_Germinating_Seeds_P Parameter: Tissue Value: Germinating Seeds
  misc_feature: MA Experiment ID: 20000185 Result: Down-regulated in Transcription
  misc_feature: MA Experiment 20000185 PARAMETER Experiment Name: At_Roots__P Parameter: Age (day) Value: 7 vs. 21
  misc_feature: MA Experiment 20000185 PARAMETER Experiment Name: At_Roots__P Parameter: Organism Value: A. thaliana
  misc_feature: MA Experiment 20000185 PARAMETER Experiment Name: At_Roots__P Parameter: Tissue Value: Roots vs. Whole Plant
  misc_feature: MA Experiment ID: 20000227 Result: Down-regulated in Transcription
  misc_feature: MA Experiment 20000227 PARAMETER Experiment Name: At_Root-Tips-vs-Tops_P Parameter: Tissue Value: Root Tips vs. Root Tops
  misc_feature: MA Experiment ID: 20000438 Result: Up-regulated in Transcription
  misc_feature: MA Experiment 20000438 PARAMETER Experiment Name: At_Shoots__P Parameter: Age (day) Value: 14
  misc_feature: MA Experiment 20000438 PARAMETER Experiment Name: At_Shoots__P Parameter: Tissue Value: Shoots vs. Whole Plant
  misc_feature: MA Experiment ID: 20000439 Result: Down-regulated in Transcription
  misc_feature: MA Experiment 20000439 PARAMETER Experiment Name: At_Roots__P Parameter: Age (day) Value: 14 vs. 21
  misc_feature: MA Experiment 20000439 PARAMETER Experiment Name: At_Roots__P Parameter: Organism Value: A. thaliana
  misc_feature: MA Experiment 20000439 PARAMETER Experiment Name: At_Roots__P Parameter: Tissue Value: Roots vs. Whole Plant
  misc_feature: MA Experiment ID: 20000441 Result: Up-regulated in Transcription
  misc_feature: MA Experiment 20000441 PARAMETER Experiment Name: At_1uM_BR-BRZ__P Parameter: Tissue Value: Shoot Apices
  misc_feature: MA Experiment 20000441 PARAMETER Experiment Name: At_1uM_BR-BRZ__P Parameter: Treatment Value: 1uM BR vs. No Treatment
  misc_feature: MA Experiment ID: 20000443 Result: Up-regulated in Transcription
  misc_feature: MA Experiment 20000443 PARAMETER Experiment Name: At_1uM_BR-BRZ__P Parameter: Tissue Value: Shoot Apices
  misc_feature: MA Experiment 20000443 PARAMETER Experiment Name: At_1uM_BR-BRZ__P Parameter: Treatment Value: 1uM BRZ vs. No Treatment
  misc_feature: MA Experiment ID: 20000794 Result: Down-regulated in Transcription
  misc_feature: MA Experiment 20000794 PARAMETER Experiment Name: At_Petals_P Parameter: Age (day) Value: 23-25 days
  misc_feature: MA Experiment 20000794 PARAMETER Experiment Name: At_Petals_P Parameter: Plant Line Value: WS
  misc_feature: MA Experiment 20000794 PARAMETER Experiment Name: At_Petals_P Parameter: Tissue Value: Petals vs. Whole plant
  misc_feature: MA Experiment ID: 20001555 Result: Down-regulated in Transcription
  misc_feature: MA Experiment 20001555 PARAMETER Experiment Name: At_Drought_Soil_Dry_P Parameter: Age (day) Value: 24
  misc_feature: MA Experiment 20001555 PARAMETER Experiment Name: At_Drought_Soil_Dry_P Parameter: Organism Value: A. thaliana
  misc_feature: MA Experiment 20001555 PARAMETER Experiment Name: At_Drought_Soil_Dry_P Parameter: Plant Line Value: WS
  misc_feature: MA Experiment 20001555 PARAMETER Experiment Name: At_Drought_Soil_Dry_P Parameter: Post Timepoint (hr) Value: None
  misc_feature: MA Experiment 20001555 PARAMETER Experiment Name: At_Drought_Soil_Dry_P Parameter: Post-Treatment Value: None
  misc_feature: MA Experiment 20001555 PARAMETER Experiment Name: At_Drought_Soil_Dry_P Parameter: Timepoint (day) Value: 10
  misc_feature: MA Experiment 20001555 PARAMETER Experiment Name: At_Drought_Soil_Dry_P Parameter: Treatment Value: Drought vs. No Drought
  misc_feature: MA Experiment ID: 20001557 Result: Down-regulated in Transcription
  misc_feature: MA Experiment 20001557 PARAMETER Experiment Name: At_Drought_Soil_Dry_P Parameter: Age (day) Value: 27
  misc_feature: MA Experiment 20001557 PARAMETER Experiment Name: At_Drought_Soil_Dry_P Parameter: Organism Value: A. thaliana
  misc_feature: MA Experiment 20001557 PARAMETER Experiment Name: At_Drought_Soil_Dry_P Parameter: Plant Line Value: WS
  misc_feature: MA Experiment 20001557 PARAMETER Experiment Name: At_Drought_Soil_Dry_P Parameter: Post Timepoint (hr) Value: 3
  misc_feature: MA Experiment 20001557 PARAMETER Experiment Name: At_Drought_Soil_Dry_P Parameter: Post-Treatment Value: Re-Water vs. No Drought
  misc_feature: MA Experiment 20001557 PARAMETER Experiment Name: At_Drought_Soil_Dry_P Parameter: Timepoint (day) Value: 13
  misc_feature: MA Experiment 20001557 PARAMETER Experiment Name: At_Drought_Soil_Dry_P Parameter: Treatment Value: Drought vs. No Drought
  misc_feature: MA Experiment ID: 20001757 Result: Up-regulated in Transcription
  misc_feature: MA Experiment 20001757 PARAMETER Experiment Name: At_50mM_NH4NO3_L-to-H_P Parameter: Timepoint (hr) Value: 6
  misc_feature: MA Experiment 20001757 PARAMETER Experiment Name: At_50mM_NH4NO3_L-to-H_P Parameter: Tissue Value: Leaf
  misc_feature: MA Experiment 20001757 PARAMETER Experiment Name: At_50mM_NH4NO3_L-to-H_P Parameter: Treatment Value: 50mM NH4NO3 vs 100mM Mannitol
  misc_feature: MA Experiment ID: 20001904 Result: Down-regulated in Transcription
  misc_feature: MA Experiment 20001904 PARAMETER Experiment Name: At_Drought_Reproduction_P Parameter: Age (day) Value: 37
  misc_feature: MA Experiment 20001904 PARAMETER Experiment Name: At_Drought_Reproduction_P Parameter: Organism Value: A. thaliana
  misc_feature: MA Experiment 20001904 PARAMETER Experiment Name: At_Drought_Reproduction_P Parameter: Plant Line Value: WS
  misc_feature: MA Experiment 20001904 PARAMETER Experiment Name: At_Drought_Reproduction_P Parameter: Timepoint (day) Value: 7
  misc_feature: MA Experiment 20001904 PARAMETER Experiment Name: At_Drought_Reproduction_P Parameter: Tissue Value: Rosettes
  misc_feature: MA Experiment 20001904 PARAMETER Experiment Name: At_Drought_Reproduction_P Parameter: Treatment Value: Drought vs. No Drought
  misc_feature: MA Experiment ID: 20001906 Result: Down-regulated in Transcription
  misc_feature: MA Experiment 20001906 PARAMETER Experiment Name: At_Drought_Reproduction_P Parameter: Age (day) Value: 35
  misc_feature: MA Experiment 20001906 PARAMETER Experiment Name: At_Drought_Reproduction_P Parameter: Organism Value: A. thaliana
  misc_feature: MA Experiment 20001906 PARAMETER Experiment Name: At_Drought_Reproduction_P Parameter: Plant Line Value: WS
  misc_feature: MA Experiment 20001906 PARAMETER Experiment Name: At_Drought_Reproduction_P Parameter: Timepoint (day) Value: 5
  misc_feature: MA Experiment 20001906 PARAMETER Experiment Name: At_Drought_Reproduction_P Parameter: Tissue Value: Siliques
  misc_feature: MA Experiment 20001906 PARAMETER Experiment Name: At_Drought_Reproduction_P Parameter: Treatment Value: Drought vs. No Drought
ccacgcgtccgcaagaagaacaacaacactaagcaaaaagaaaagctcaagccgagagagacaatggcatcaacattcacgagctcaagcagtgttcttaccccaacaacattccttggccagactaaagcctcaagctttaacccccttcgtgatgttgtctctctcggatctcccaagtacactatgggaaatgatctttggtatggacctgacagagtgaagtacttaggacccttttccgttcaaactccgtcttacctcaccggagaattccctggcgattatggttgggacaccgccggtttatccgcagaccctgaagcctttgccaaaaacagagctcttgaggtgatccatgggagatgggcaatgttgggagcttttggttgcataacccctgaagttcttcaaaagtgggtccgtgtggacttcaaagaaccagtctggttcaaagccggttcacaaatcttctccgaaggcggtttggactacttaggcaacccaaacctagtccatgctcagagcattttagccgtccttggcttccaagtcatcctcatgggtttggttgaaggtttccgcatcaacggtcttgatggtgttggcgaaggcaacgacttgtaccccggtgggcaatactttgacccgttgggtctcgctgatgatccagttacttttgctgagcttaaggtgaaagagatcaagaacggaagattggctatgttctctatgtttggcttctttgttcaagccattgttactggaaaaggtcctttggagaatctccttgaccatcttgacaaccctgttgctaacaatgcgtgggctttcgcaactaagtttgcacctggagcttaaattttcaagtcttgatgtgattcttgtaatgatatgaacataacctttcttgttcctctc

SEQ ID NO: 76304 - protein, 286 aa, Arabidopsis thaliana
  peptide (1)..(286): Ceres Seq. ID no. 7107521
  misc_feature (83)..(253): Pfam Name: Chlorophyll A-B binding protein Pfam Description: Chlorophyll A-B binding protein
  misc_feature (22)..(286): Homolog of NCBI NO: 15239602 NR Description: light-harvesting chlorophyll a/b binding protein, protein id: At5g54270.1, supported by cDNA: gi_13605753,
  misc_feature (22)..(286): Homolog of NCBI NO: 4689380 NR Description: LHCII type III chlorophyll a/b binding protein
  misc_feature (22)..(286): Homolog of NCBI NO: 479406 NR Description: chlorophyll a/b-binding protein - garden pea
  misc_feature (28)..(286): Homolog of NCBI NO: 6644196 NR Description: chlorophyll a/b-binding protein [Daucus carota]
  misc_feature (21)..(286): Homolog of NCBI NO: 115794 NR Description: Chlorophyll A-B binding protein 13, chloroplast
  misc_feature (22)..(286): Homolog of NCBI NO: 7443222 NR Description: chlorophyll A/b-binding protein type III Lhcb3.2 - rape >gi|405615|emb|CAA43803.1| LHC II Type III chlorophyll a/b
  misc_feature (22)..(286): Homolog of NCBI NO: 115793 NR Description: Chlorophyll A-B binding protein of LHCII type III,
  misc_feature (66)..(286): Homolog of NCBI NO: 405617 NR Description: LHCII Type III chlorophyll a/b binding protein
  misc_feature (22)..(286): Homolog of NCBI NO: 34393384 NR Description: putative chlorophyll A-B binding protein of LHCII
  misc_feature (22)..(223): Homolog of NCBI NO: 7443221 NR Description: chlorophyll a/b-binding protein type III Lhcb3.1 - rape (fragment) >gi|515616|emb|CAA43802.1| LHC II Type III
PRVRKKNNNTKQKEKLKPRETMASTFTSSSSVLTPTTFLGQTKASSFNPLRDVVSLGSPKYTMGNDLWYGPDRVKYLGPFSVQTPSYLTGEFPGDYGWDTAGLSADPEAFAKNRALEVIHGRWAMLGAFGCITPEVLQKWVRVDFKEPVWFKAGSQIFSEGGLDYLGNPNLVHAQSILAVLGFQVILMGLVEGFRINGLDGVGEGNDLYPGGQYFDPLGLADDPVTFAELKVKEIKNGRLAMFSMFGFFVQAIVTGKGPLENLLDHLDNPVANNAWAFATKFAPGA

SEQ ID NO: 76305 - protein, 265 aa, Arabidopsis thaliana; identical to SEQ ID NO: 21703
  peptide (1)..(265): Ceres Seq. ID no. 7107522
  misc_feature (62)..(232): Pfam Name: Chlorophyll A-B binding protein Pfam Description: Chlorophyll A-B binding protein
  misc_feature (1)..(265): Homolog of NCBI NO: 15239602 NR Description: light-harvesting chlorophyll a/b binding protein, protein id: At5g54270.1, supported by cDNA: gi_13605753,
  misc_feature (1)..(265): Homolog of NCBI NO: 4689380 NR Description: LHCII type III chlorophyll a/b binding protein
  misc_feature (1)..(265): Homolog of NCBI NO: 479406 NR Description: chlorophyll a/b-binding protein - garden pea
  misc_feature (7)..(265): Homolog of NCBI NO: 6644196 NR Description: chlorophyll a/b-binding protein [Daucus carota]
  misc_feature (1)..(265): Homolog of NCBI NO: 115794 NR Description: Chlorophyll A-B binding protein 13, chloroplast
  misc_feature (1)..(265): Homolog of NCBI NO: 7443222 NR Description: chlorophyll A/b-binding protein type III Lhcb3.2 - rape >gi|405615|emb|CAA43803.1| LHC II Type III chlorophyll a/b
  misc_feature (1)..(265): Homolog of NCBI NO: 115793 NR Description: Chlorophyll A-B binding protein of LHCII type III,
  misc_feature (45)..(265): Homolog of NCBI NO: 405617 NR Description: LHCII Type III chlorophyll a/b binding protein
  misc_feature (1)..(265): Homolog of NCBI NO: 34393384 NR Description: putative chlorophyll A-B binding protein of LHCII
  misc_feature (1)..(202): Homolog of NCBI NO: 7443221 NR Description: chlorophyll a/b-binding protein type III Lhcb3.1 - rape (fragment) >gi|515616|emb|CAA43802.1| LHC II Type III

SEQ ID NO: 76306 - protein, 224 aa, Arabidopsis thaliana; identical to SEQ ID NO: 21704
  peptide (1)..(224): Ceres Seq. ID no. 7107523
  misc_feature (21)..(191): Pfam Name: Chlorophyll A-B binding protein Pfam Description: Chlorophyll A-B binding protein
  misc_feature (1)..(224): Homolog of NCBI NO: 15239602 NR Description: light-harvesting chlorophyll a/b binding protein, protein id: At5g54270.1, supported by cDNA: gi_13605753,
  misc_feature (1)..(224): Homolog of NCBI NO: 4689380 NR Description: LHCII type III chlorophyll a/b binding protein
  misc_feature (1)..(224): Homolog of NCBI NO: 479406 NR Description: chlorophyll a/b-binding protein - garden pea
  misc_feature (1)..(224): Homolog of NCBI NO: 6644196 NR Description: chlorophyll a/b-binding protein [Daucus carota]
  misc_feature (1)..(224): Homolog of NCBI NO: 115794 NR Description: Chlorophyll A-B binding protein 13, chloroplast
  misc_feature (1)..(224): Homolog of NCBI NO: 7443222 NR Description: chlorophyll A/b-binding protein type III Lhcb3.2 - rape >gi|405615|emb|CAA43803.1| LHC II Type III chlorophyll a/b
  misc_feature (1)..(224): Homolog of NCBI NO: 115793 NR Description: Chlorophyll A-B binding protein of LHCII type III,
  misc_feature (4)..(224): Homolog of NCBI NO: 405617 NR Description: LHCII Type III chlorophyll a/b binding protein
  misc_feature (1)..(224): Homolog of NCBI NO: 34393384 NR Description: putative chlorophyll A-B binding protein of LHCII
  misc_feature (1)..(161): Homolog of NCBI NO: 7443221 NR Description: chlorophyll a/b-binding protein type III Lhcb3.1 - rape (fragment) >gi|515616|emb|CAA43802.1| LHC II Type III

SEQ ID NO: 76307 - DNA, 1891 bp, Arabidopsis thaliana
  misc_feature (1)..(1891): Ceres Seq. ID no. 7107532
  misc_feature: MA Experiment ID: 108488 Result: Down-regulated in Transcription
  misc_feature: MA Experiment ID: 108569 Result: Down-regulated in Transcription
  misc_feature: MA Experiment 108569 PARAMETER Experiment Name: At_0.001%_MeJA__cDNA_P Parameter: Timepoint (hr) Value: 6
  misc_feature: MA Experiment 108569 PARAMETER Experiment Name: At_0.001%_MeJA__cDNA_P Parameter: Tissue Value: Aerial
  misc_feature: MA Experiment 108569 PARAMETER Experiment Name: At_0.001%_MeJA__cDNA_P Parameter: Treatment Value: 0.001% MeJA vs. No Treatment
  misc_feature: MA Experiment ID: 108585 Result: Up-regulated in Transcription
  misc_feature: MA Experiment 108585 PARAMETER Experiment Name: At_5mM_NaNP_cDNA_P Parameter: Timepoint (hr) Value: 6
  misc_feature: MA Experiment 108585 PARAMETER Experiment Name: At_5mM_NaNP_cDNA_P Parameter: Tissue Value: Aerial
  misc_feature: MA Experiment 108585 PARAMETER Experiment Name: At_5mM_NaNP_cDNA_P Parameter: Treatment Value: null
  misc_feature: MA Experiment ID: 108594 Result: Up-regulated in Transcription
  misc_feature: MA Experiment 108594 PARAMETER Experiment Name: At_Ler-rhl_Root_cDNA_P Parameter: Plant Line Value: null
  misc_feature: MA Experiment ID: 108607 Result: Up-regulated in Transcription
  misc_feature: MA Experiment 108607 PARAMETER Experiment Name: At_100uM_ABA_cDNA_P Parameter: Timepoint (hr) Value: 4
  misc_feature: MA Experiment 108607 PARAMETER Experiment Name: At_100uM_ABA_cDNA_P Parameter: Tissue Value: Aerial
  misc_feature: MA Experiment 108607 PARAMETER Experiment Name: At_100uM_ABA_cDNA_P Parameter: Treatment Value: 100uM ABA vs. No Treatment
  misc_feature: MA Experiment ID: 108668 Result: Up-regulated in Transcription
  misc_feature: MA Experiment 108668 PARAMETER Experiment Name: At_2mM_SA_cDNA_P Parameter: Plant Line Value: WS
  misc_feature: MA Experiment 108668 PARAMETER Experiment Name: At_2mM_SA_cDNA_P Parameter: Timepoint (hr) Value: 6
  misc_feature: MA Experiment 108668 PARAMETER Experiment Name: At_2mM_SA_cDNA_P Parameter: Treatment Value: 2mM SA vs. No Treatment
  misc_feature: MA Experiment ID: 20000111 Result: Down-regulated in Transcription
  misc_feature: MA Experiment 20000111 PARAMETER Experiment Name: At_42deg_Heat_cDNA_P Parameter: Temperature (deg C) Value: 42 vs. 22
  misc_feature: MA Experiment 20000111 PARAMETER Experiment Name: At_42deg_Heat_cDNA_P Parameter: Timepoint (hr) Value: 6
  misc_feature: MA Experiment 20000111 PARAMETER Experiment Name: At_42deg_Heat_cDNA_P Parameter: Tissue Value: Aerial
gttgttcgaacaaacaaaaaaagaaatagagagagactcaagaagagaagagagactagagagagatccccattcagaaaataaaaatagaacccaacaaaaccaaaattcccaaattgaccccaaaatttacgttcctcgtcaatgaccccgcgttccctggacctcccgccgctgttcctggggtagtcgagccactggtgcccggcgccggagcagatcccggcgaaggagcagagcccggtgctgcatcttctgtgaaactcaacacacggtgggagcccaaattatcaggaccgaaaggatgtacaccgggacgaccgttggtaacattgccgccgatctgccatacctgattcacactatcagctcccgccggaaccttaaccgtcgtgaaaatggcgatcctaccgccgcttaacgactcggcgcgtagattccaaaaatcaaaagcaagtttaccttcgacgagactgctgtagctgctaatgttgtacgtcttcacgaccggagccgcaccaccgccggatctgtaagcgaggaaggcttgagaaccagccatcttagtccccgtagggttaatagcccaagcgacccagccaccgttggcttgagatggagtggcgacgaaagcgacggagagagatgaatttgaggaattgtaggtgtaatggaggtaggaattgagtaccggaaggtcttcgcaactatcgaacggaccggcggagttcaagttctgtgatttgcaagcctgttgtgaaatcgccggtgagattagcgagacgaaacaagcaacggctaggattagaagagaagaagaagaagaagccatggctgagttctgttctgaaaaaacgacggtggatccacttctgagagatttggatgagaagaaagagagtttccggcgaaacgtggtgtctctggctacggagctgaagcaagtgaggggccgtttggtttctcaagaacaatcttttcttaaagagaccattactagaaaagaagcagagaaaaggggaaagaatatggaaatggagatttgtaaattgcagaagagattggaagaaaggaattgtcagcttgaagcttctgcatctgctgctgataagtttatcaaagagttggaggaatttagattaaagcttgatacaaccaagcaaaccgcagaggcaagtgctgattctgctcaatctacaaagatccaatgctcaatgctaaagcaacaacttgacgacaaaacacgttctctcagagaacaagaagaccgtatgactcagcttggtcatcagcttgatgatctacagagaggtctgagcttgagagagtgctcagaaaagcagcttagagaagaagttaggagaatcgagcgtgaggttactgaggccattgcaaaagcgggaataggtggcatggacagcgagctccagaaacttctagaagatgtgtctccaatgaaatttgagaggatgaataggctagttgaagtaaaagacgaagagattacaaaactgaaagatgagataaggttaatgtcaggtcaatggaaacataagactaaggaactcgaatctcagctggagaaacagagaagaactgatcaagatttgaagaagaaggtattgaagctagagttctgtttacaagaagctcgaagccagacaagaaagctgcagaggaaaggggaaagaagggacatggagatcaaagagataagagatcttatatcggagaagcaaaaccttaacaatgagtcttgggataaacagaagttctgggacaattcagggttcaagattgttgtatcaatgtctatgttgatgttagtggtagtctccaagagatgatgaattttgtaatgtataaatttagttgcagatagttgatgagg

SEQ ID NO: 76308 - protein, 338 aa, Arabidopsis thaliana
  peptide (1)..(338): Ceres Seq. ID no. 7107533
  misc_feature (1)..(301): Pfam Name: Myosin tail Pfam Description: Myosin tail
  misc_feature (1)..(338): Homolog of NCBI NO: 4097950 NR Description: plant IF-like protein [Arabidopsis thaliana]
  misc_feature (6)..(338): Homolog of NCBI NO: 18397379 NR Description: expressed protein; protein id: At3g05830.1, by cDNA: 110680., supported by cDNA: gi_4097949 [Arabidopsis >gi|6714396|gb|AAF26085.1|AC012393_11 hypothetical protein
  misc_feature (6)..(338): Homolog of NCBI NO: 18421042 NR Description: putative protein; protein id: At5g26770.1,
  misc_feature (6)..(331): Homolog of NCBI NO: 7485248 NR Description: hypothetical protein A_IG002P16.20 - Arabidopsis >gi|2191168|gb|AAB61054.1| contains similarity to myosin heavy
  misc_feature (12)..(338): Homolog of NCBI NO: 22329439 NR Description: hypothetical protein; protein id: At1g09470.1
  misc_feature (12)..(337): Homolog of NCBI NO: 25402551 NR Description: hypothetical protein [imported] - Arabidopsis >gi|3482922|gb|AAC33207.1| Hypothetical protein [Arabidopsis
  misc_feature (235)..(328): Homolog of NCBI NO: 22329441 NR Description: similar to contains similarity to myosin heavy
  misc_feature (212)..(338): Homolog of NCBI NO: 34894370 NR Description: unnamed protein product [Oryza sativa (japonica group)] >gi|8468034|dbj|BAA96634.1| unnamed protein product
  misc_feature (1)..(301): Homolog of NCBI NO: 6981234 NR Description: myosin, heavy polypeptide 3, skeletal muscle, [Rattus norvegicus] >gi|127755|sp|P12847|MYH3_RAT Myosin heavy fast skeletal muscle, embryonic >gi|92509|pir||A24922 myosin
  misc_feature (1)..(301): Homolog of NCBI NO: 31144 NR Description: myosin heavy chain (1167 AA) [Homo sapiens]
MAEFCSEKTTVDPLLRDLDEKKESFRRNVVSLATELKQVRGRLVSQEQSFLKETITRKEAEKRGKNMEMEICKLQKRLEERNCQLEASASAADKFIKELEEFRLKLDTTKQTAEASADSAQSTKIQCSMLKQQLDDKTRSLREQEDRMTQLGHQLDDLQRGLSLRECSEKQLREEVRRIEREVTEAIAKAGIGGMDSELQKLLEDVSPMKFERMNRLVEVKDEEITKLKDEIRLMSGQWKHKTKELESQLEKQRRTDQDLKKKVLKLEFCLQEARSQTRKLQRKGERRDMEIKEIRDLISEKQNLNNESWDKQKFWDNSGFKIVVSMSMLMLVVVSKR

SEQ ID NO: 76309 - protein, 272 aa, Arabidopsis thaliana; identical to SEQ ID NO: 39867
  peptide (1)..(272): Ceres Seq. ID no. 7107534
  misc_feature (1)..(235): Pfam Name: Myosin tail Pfam Description: Myosin tail
  misc_feature (1)..(272): Homolog of NCBI NO: 4097950 NR Description: plant IF-like protein [Arabidopsis thaliana]
  misc_feature (1)..(272): Homolog of NCBI NO: 18397379 NR Description: expressed protein; protein id: At3g05830.1, by cDNA: 110680., supported by cDNA: gi_4097949 [Arabidopsis >gi|6714396|gb|AAF26085.1|AC012393_11 hypothetical protein
  misc_feature (1)..(272): Homolog of NCBI NO: 18421042 NR Description: putative protein; protein id: At5g26770.1,
  misc_feature (1)..(265): Homolog of NCBI NO: 7485248 NR Description: hypothetical protein A_IG002P16.20 - Arabidopsis >gi|2191168|gb|AAB61054.1| contains similarity to myosin heavy
  misc_feature (1)..(272): Homolog of NCBI NO: 22329439 NR Description: hypothetical protein; protein id: At1g09470.1
  misc_feature (1)..(271): Homolog of NCBI NO: 25402551 NR Description: hypothetical protein [imported] - Arabidopsis >gi|3482922|gb|AAC33207.1| Hypothetical protein [Arabidopsis
  misc_feature (169)..(262): Homolog of NCBI NO: 22329441 NR Description: similar to contains similarity to myosin heavy
  misc_feature (146)..(272): Homolog of NCBI NO: 34894370 NR Description: unnamed protein product [Oryza sativa (japonica group)] >gi|8468034|dbj|BAA96634.1| unnamed protein product
  misc_feature (1)..(235): Homolog of NCBI NO: 6981234 NR Description: myosin, heavy polypeptide 3, skeletal muscle, [Rattus norvegicus] >gi|127755|sp|P12847|MYH3_RAT Myosin heavy fast skeletal muscle, embryonic >gi|92509|pir||A24922 myosin
  misc_feature (1)..(235): Homolog of NCBI NO: 31144 NR Description: myosin heavy chain (1167 AA) [Homo sapiens]

SEQ ID NO: 76310 - protein, 270 aa, Arabidopsis thaliana; identical to SEQ ID NO: 39868
  peptide (1)..(270): Ceres Seq. ID no. 7107535
  misc_feature (1)..(233): Pfam Name: Myosin tail Pfam Description: Myosin tail
  misc_feature (1)..(270): Homolog of NCBI NO: 4097950 NR Description: plant IF-like protein [Arabidopsis thaliana]
  misc_feature (1)..(270): Homolog of NCBI NO: 18397379 NR Description: expressed protein; protein id: At3g05830.1, by cDNA: 110680., supported by cDNA: gi_4097949 [Arabidopsis >gi|6714396|gb|AAF26085.1|AC012393_11 hypothetical protein
  misc_feature (1)..(270): Homolog of NCBI NO: 18421042 NR Description: putative protein; protein id: At5g26770.1,
  misc_feature (1)..(263): Homolog of NCBI NO: 7485248 NR Description: hypothetical protein A_IG002P16.20 - Arabidopsis >gi|2191168|gb|AAB61054.1| contains similarity to myosin heavy
  misc_feature (1)..(270): Homolog of NCBI NO: 22329439 NR Description: hypothetical protein; protein id: At1g09470.1
  misc_feature (1)..(269): Homolog of NCBI NO: 25402551 NR Description: hypothetical protein [imported] - Arabidopsis >gi|3482922|gb|AAC33207.1| Hypothetical protein [Arabidopsis
  misc_feature (167)..(260): Homolog of NCBI NO: 22329441 NR Description: similar to contains similarity to myosin heavy
  misc_feature (144)..(270): Homolog of NCBI NO: 34894370 NR Description: unnamed protein product [Oryza sativa (japonica group)] >gi|8468034|dbj|BAA96634.1| unnamed protein product
  misc_feature (1)..(233): Homolog of NCBI NO: 6981234 NR Description: myosin, heavy polypeptide 3, skeletal muscle, [Rattus norvegicus] >gi|127755|sp|P12847|MYH3_RAT Myosin heavy fast skeletal muscle, embryonic >gi|92509|pir||A24922 myosin
  misc_feature (1)..(233): Homolog of NCBI NO: 31144 NR Description: myosin heavy chain (1167 AA) [Homo sapiens]

SEQ ID NO: 76311 - DNA, 1694 bp, Arabidopsis thaliana
  misc_feature (1)..(1694): Ceres Seq. ID no. 7107540
  misc_feature: MA Experiment ID: 108434 Result: Up-regulated in Transcription
  misc_feature: MA Experiment 108434 PARAMETER Experiment Name: At_Root_Tips_cDNA_P Parameter: Tissue Value: Root Tips
  misc_feature: MA Experiment ID: 108461 Result: Up-regulated in Transcription
  misc_feature: MA Experiment 108461 PARAMETER Experiment Name: At_Germinating_Seeds_cDNA_P Parameter: Age (day) Value: 1 vs. 0
  misc_feature: MA Experiment 108461 PARAMETER Experiment Name: At_Germinating_Seeds_cDNA_P Parameter: Tissue Value: Germinating Seeds
  misc_feature: MA Experiment ID: 108462 Result: Up-regulated in Transcription
  misc_feature: MA Experiment 108462 PARAMETER Experiment Name: At_Germinating_Seeds_cDNA_P Parameter: Age (day) Value: 2 vs. 0
  misc_feature: MA Experiment 108462 PARAMETER Experiment Name: At_Germinating_Seeds_cDNA_P Parameter: Tissue Value: Germinating Seeds
  misc_feature: MA Experiment ID: 108463 Result: Up-regulated in Transcription
  misc_feature: MA Experiment 108463 PARAMETER Experiment Name: At_Germinating_Seeds_cDNA_P Parameter: Age (day) Value: 3 vs. 0
  misc_feature: MA Experiment 108463 PARAMETER Experiment Name: At_Germinating_Seeds_cDNA_P Parameter: Tissue Value: Germinating Seeds
  misc_feature: MA Experiment ID: 108573 Result: Up-regulated in Transcription
  misc_feature: MA Experiment 108573 PARAMETER Experiment Name: At_Drought_cDNA_P Parameter: Timepoint (hr) Value: 6
  misc_feature: MA Experiment 108573 PARAMETER Experiment Name: At_Drought_cDNA_P Parameter: Tissue Value: Aerial
  misc_feature: MA Experiment 108573 PARAMETER Experiment Name: At_Drought_cDNA_P Parameter: Treatment Value: Drought vs. No Drought
  misc_feature: MA Experiment ID: 108579 Result: Down-regulated in Transcription
  misc_feature: MA Experiment 108579 PARAMETER Experiment Name: At_4deg_Cold_cDNA_P Parameter: Temperature (deg C) Value: 4 vs. 22
  misc_feature: MA Experiment 108579 PARAMETER Experiment Name: At_4deg_Cold_cDNA_P Parameter: Timepoint (hr) Value: 6
  misc_feature: MA Experiment 108579 PARAMETER Experiment Name: At_4deg_Cold_cDNA_P Parameter: Tissue Value: Aerial
  misc_feature: MA Experiment ID: 20000113 Result: Down-regulated in Transcription
  misc_feature: MA Experiment 20000113 PARAMETER Experiment Name: At_42deg_Heat_cDNA_P Parameter: Temperature (deg C) Value: 42 vs. 22
  misc_feature: MA Experiment 20000113 PARAMETER Experiment Name: At_42deg_Heat_cDNA_P Parameter: Timepoint (hr) Value: 8
  misc_feature: MA Experiment 20000113 PARAMETER Experiment Name: At_42deg_Heat_cDNA_P Parameter: Tissue Value: Aerial
  misc_feature: MA Experiment ID: 20000180 Result: Up-regulated in Transcription
  misc_feature: MA Experiment 20000180 PARAMETER Experiment Name: At_Germinating_Seeds_P Parameter: Age (hr) Value: 24 vs. 0
  misc_feature: MA Experiment 20000180 PARAMETER Experiment Name: At_Germinating_Seeds_P Parameter: Tissue Value: Germinating Seeds
  misc_feature: Pfam Name: GHMP_kinases_C Pfam Description: GHMP kinases C terminal
acctgatttgagctgtttctttctctttcgaactctccgtcacttccatttcatttctatttgaatcttctcaaagctacacagatctctggaatcgaaaaagcttgagctgtgttaatggcggaggagaaatgggtggtgatggtgacggcgcagactccaacgaatatcgccgtgattaagtattggggaaagagagatgaggttcggattcttcccattaatgatagcattagcgtcacgcttgatcctgatcacctctgtactctcaccaccgtcgctgttagtccttcctttgatcgagatcgaatgtggctcaatggcaaggaaatctcgctttctggaagtaggtaccagaattgcttgagggaaattcgaagtcgtgctgatgatgtagaagataaagaaaagggtatcaagattgcgaagaaagattgggagaagctgcatctgcacattgcttctcataacaacttccctactgctgctggcttagcatcttctgctgctggttttgcttgcttagtttttgctcttgccaagttgatgaatgtaaatgaagatccaagccaactttctgctatagcaaggcaaggttcaggaagtgcttgccgtagtttatttgggggatttgtcaagtggaatatgggaaacaaagaagatggaagtgacagtgttgcagttcaactggtagatgataagcactgggatgatcttgttatcattattgctgtggttagttcacgacagaaggaaacaagcagcacctcgggaatgcgtgagagtgttgagacaagtttgcttttacagcatagagcaaaggaagttgtcccagtacggattttgcaaatggaagaagctataaagaatcgagatttcacatcttttacaaaattgacgtgttcagacagtaatcagtttcatgctgtttgtatggatacatctccacccatattctacatgaatgacacctcccacaggataatcagcttagttgaaaagtggaaccgttctgccggtacaccagagattgcttatacatttgatgctggcccaaatgcagtcatgattgcaagaaacaggaaagtagcagttgaattgctgcaggggctgctctactgcttccctcctaagcctgacacagacatgaagagttacgtactgggggatacatcgatagtaaaagaggcaggcttggaaggagagcttccacaaggaattaaagacaaaattggaagtcaggatcaaaaaggtgaagtgagttattttatatgcagcagacctggaagaggtcctgtggtgcttcaagaccaaactcaagctcttctccatcctcaaactggcctccccaaataaccatttctatgtcttgttgttacttcaactctgagatttgcaacagcttcatcttttgctttgccagctccaactcttgtcctaagagagcactcttctgaatcttttcccaattatttgtgtttacgtacaattcttctgcatcgggtgcaaaaaacaaaacaatcaatattgcaaacgaataagatcatcccagtgcttatcatctaccagttgaactgcaacactgtcacttccatcttctttgtttcccatattccacttgacaaatcccccaaataaactacggcaagcacttcctgaaccttgccttgctatagcagaaagttggcttgatc

SEQ ID NO: 76312 - protein, 412 aa, Arabidopsis thaliana; identical to SEQ ID NO: 23100
  peptide (1)..(412): Ceres Seq. ID no. 7107541
  misc_feature: Pfam Name: GHMP_kinases_C Pfam Description: GHMP kinases C terminal
  misc_feature (1)..(412): Homolog of NCBI NO: 15224931 NR Description: mevalonate diphosphate decarboxylase; protein id: supported by cDNA: 35493. [Arabidopsis thaliana]
  misc_feature (9)..(412): Homolog of NCBI NO: 21593039 NR Description: mevalonate diphosphate decarboxylase [Arabidopsis
  misc_feature (1)..(412): Homolog of NCBI NO: 18410026 NR Description: DIPHOSPHOMEVALONATE DECARBOXYLASE - like protein;
  misc_feature (1)..(412): Homolog of NCBI NO: 21593243 NR Description: diphosphomevalonate decarboxylase-like protein
  misc_feature (1)..(412): Homolog of NCBI NO: 11281655 NR Description: diphosphomevalonate decarboxylase (EC 4.1.1.33)
  misc_feature (4)..(412): Homolog of NCBI NO: 16417950 NR Description: mevalonate disphosphate decarboxylase [Hevea
  misc_feature (1)..(412): Homolog of NCBI NO: 4505289 NR Description: diphosphomevalonate decarboxylase; mevalonate decarboxylase [Homo sapiens] >gi|1706681|sp|P53602|ER19_HUMAN decarboxylase (Mevalonate pyrophosphate decarboxylase)
  misc_feature (1)..(412): Homolog of NCBI NO: 30584105 NR Description: Homo sapiens mevalonate (diphospho) decarboxylase
  misc_feature (1)..(412): Homolog of NCBI NO: 20149736 NR Description: mevalonate (diphospho) decarboxylase; decarboxylase [Mus musculus] >gi|14250208|gb|AAH08526.1| Unknown
  misc_feature (1)..(412): Homolog of NCBI NO: 26354448 NR Description: unnamed protein product [Mus musculus]

SEQ ID NO: 76313 - protein, 404 aa, Arabidopsis thaliana; identical to SEQ ID NO: 23101
  peptide (1)..(404): Ceres Seq. ID no. 7107542
  misc_feature: Pfam Name: GHMP_kinases_C Pfam Description: GHMP kinases C terminal
  misc_feature (1)..(404): Homolog of NCBI NO: 15224931 NR Description: mevalonate diphosphate decarboxylase; protein id: supported by cDNA: 35493. [Arabidopsis thaliana]
  misc_feature (1)..(404): Homolog of NCBI NO: 21593039 NR Description: mevalonate diphosphate decarboxylase [Arabidopsis
  misc_feature (1)..(404): Homolog of NCBI NO: 18410026 NR Description: DIPHOSPHOMEVALONATE DECARBOXYLASE - like protein;
  misc_feature (1)..(404): Homolog of NCBI NO: 21593243 NR Description: diphosphomevalonate decarboxylase-like protein
  misc_feature (1)..(404): Homolog of NCBI NO: 11281655 NR Description: diphosphomevalonate decarboxylase (EC 4.1.1.33)
  misc_feature (1)..(404): Homolog of NCBI NO: 16417950 NR Description: mevalonate disphosphate decarboxylase [Hevea
  misc_feature (1)..(404): Homolog of NCBI NO: 4505289 NR Description: diphosphomevalonate decarboxylase; mevalonate decarboxylase [Homo sapiens] >gi|1706681|sp|P53602|ER19_HUMAN decarboxylase (Mevalonate pyrophosphate decarboxylase)
  misc_feature (1)..(404): Homolog of NCBI NO: 30584105 NR Description: Homo sapiens mevalonate (diphospho) decarboxylase
  misc_feature (1)..(404): Homolog of NCBI NO: 20149736 NR Description: mevalonate (diphospho) decarboxylase; decarboxylase [Mus musculus] >gi|14250208|gb|AAH08526.1| Unknown
  misc_feature (1)..(404): Homolog of NCBI NO: 26354448 NR Description: unnamed protein product [Mus musculus]

SEQ ID NO: 76314 - protein, 348 aa, Arabidopsis thaliana; identical to SEQ ID NO: 23102
  peptide (1)..(348): Ceres Seq. ID no. 7107543
  misc_feature: Pfam Name: GHMP_kinases_C Pfam Description: GHMP kinases C terminal
  misc_feature (1)..(348): Homolog of NCBI NO: 15224931 NR Description: mevalonate diphosphate decarboxylase; protein id: supported by cDNA: 35493. [Arabidopsis thaliana]
  misc_feature (1)..(348): Homolog of NCBI NO: 21593039 NR Description: mevalonate diphosphate decarboxylase [Arabidopsis
  misc_feature (1)..(348): Homolog of NCBI NO: 18410026 NR Description: DIPHOSPHOMEVALONATE DECARBOXYLASE - like protein;
  misc_feature (1)..(348): Homolog of NCBI NO: 21593243 NR Description: diphosphomevalonate decarboxylase-like protein
  misc_feature (1)..(348): Homolog of NCBI NO: 11281655 NR Description: diphosphomevalonate decarboxylase (EC 4.1.1.33)
  misc_feature (1)..(348): Homolog of NCBI NO: 16417950 NR Description: mevalonate disphosphate decarboxylase [Hevea
  misc_feature (1)..(348): Homolog of NCBI NO: 4505289 NR Description: diphosphomevalonate decarboxylase; mevalonate decarboxylase [Homo sapiens] >gi|1706681|sp|P53602|ER19_HUMAN decarboxylase (Mevalonate pyrophosphate decarboxylase)
  misc_feature (1)..(348): Homolog of NCBI NO: 30584105 NR Description: Homo sapiens mevalonate (diphospho) decarboxylase
  misc_feature (1)..(348): Homolog of NCBI NO: 20149736 NR Description: mevalonate (diphospho) decarboxylase; decarboxylase [Mus musculus] >gi|14250208|gb|AAH08526.1| Unknown
  misc_feature (1)..(348): Homolog of NCBI NO: 26354448 NR Description: unnamed protein product [Mus musculus]

SEQ ID NO: 76315 - DNA, 943 bp, Arabidopsis thaliana
  misc_feature (1)..(943): Ceres Seq. ID no. 7107556
  misc_feature: MA Experiment ID: 108434 Result: Down-regulated in Transcription
  misc_feature: MA Experiment 108434 PARAMETER Experiment Name: At_Root_Tips_cDNA_P Parameter: Tissue Value: Root Tips
  misc_feature: MA Experiment ID: 108461 Result: Up-regulated in Transcription
  misc_feature: MA Experiment 108461 PARAMETER Experiment Name: At_Germinating_Seeds_cDNA_P Parameter: Age (day) Value: 1 vs. 0
  misc_feature: MA Experiment 108461 PARAMETER Experiment Name: At_Germinating_Seeds_cDNA_P Parameter: Tissue Value: Germinating Seeds
  misc_feature: MA Experiment ID: 108462 Result: Up-regulated in Transcription
  misc_feature: MA Experiment 108462 PARAMETER Experiment Name: At_Germinating_Seeds_cDNA_P Parameter: Age (day) Value: 2 vs. 0
  misc_feature: MA Experiment 108462 PARAMETER Experiment Name: At_Germinating_Seeds_cDNA_P Parameter: Tissue Value: Germinating Seeds
  misc_feature: MA Experiment ID: 108464 Result: Up-regulated in Transcription
  misc_feature: MA Experiment 108464 PARAMETER Experiment Name: At_Germinating_Seeds_cDNA_P Parameter: Age (day) Value: 4 vs. 0
  misc_feature: MA Experiment 108464 PARAMETER Experiment Name: At_Germinating_Seeds_cDNA_P Parameter: Tissue Value: Germinating Seeds
  misc_feature: MA Experiment ID: 108488 Result: Up-regulated in Transcription
  misc_feature: MA Experiment ID: 108489 Result: Down-regulated in Transcription
  misc_feature: MA Experiment ID: 108595 Result: Down-regulated in Transcription
  misc_feature: MA Experiment 108595 PARAMETER Experiment Name: At_Ler-pi_Ovule_cDNA_P Parameter: Plant Line Value: null
gacccacgcgtccgtgaaggtcaacaacgtcgagaataatggcatcatctctttgtgcttcttctgccatcgctgccatttcttctccaagtttcttgggtggtaagaaactgaggctgaagaagaagttgactgttccagctgtctccaggccagatgcgtcggtgcgcgccgtcgcagctgatccagatagaccaatctggttcccgggaagcactcctccagagtggctagacggtagcctccctggtgacttcggatttgatcctcttggtctttcatcggacccggacagtctaaaatggaacgtacaagccgagatagtccactgccgatgggctatgctaggagccgccgggatattcatcccagagttcctaacgaagatcggaatcctcaacactccgtcatggtacacggcgggagagcaagagtatttcacggacaaaaccacactctttgtcgttgagctcatcttgatcggatgggcagaaggacgtagatgggccgatatcatcaagcccggtagcgtcaacactgacccagtcttcccaaacaacaaactgacgggcacagacgttggttacccaggtgggttatggttcgacccgttgggttggggatccggtagcccggctaaactcaaggagttgaggaccaaggagatcaagaacggaaggttggctatgttggcagtgatgggtgcttggttccaacacatctacacgggcactggtcctattgataacctttttgcacatcttgctgatcctggtcacgccacaatcttcgctgctttcacacccaagtgagacaacgaaaaagggttatggggaggtgaatgcgtttgtgtgtgatcatgtttgtacaaatatcattttgaacttaaaattattatgtactttatataaattgtggtcgaatgcaaattaagttcccccgt

SEQ ID NO: 76316 - protein, 257 aa, Arabidopsis thaliana [sequence omitted]

SEQ ID NO: 76317 - protein, 156 aa, Arabidopsis thaliana; identical to SEQ ID NO: 41714
  peptide (1)..(156): Ceres Seq. ID no. 7107558
  misc_feature (1)..(127): Pfam Name: Chlorophyll A-B binding protein Pfam Description: Chlorophyll A-B binding protein
  misc_feature (1)..(156): Homolog of NCBI NO: 11277627 NR Description: PS I antenna protein Lhca2 [imported] - thaliana >gi|4741940|gb|AAD28767.1|AF134120_1 Lhca2 protein thaliana] >gi|15451180|gb|AAK96861.1| Lhca2 protein [Arabidopsis
  misc_feature (1)..(156): Homolog of NCBI NO: 15233120 NR Description: light-harvesting chlorophyll a/b binding protein; id: At3g61470.1, supported by cDNA: 123159., supported by cDNA:
  misc_feature (1)..(156): Homolog of NCBI NO: 115766 NR Description: Chlorophyll A-B binding protein, chloroplast
  misc_feature (1)..(156): Homolog of NCBI NO: 115765 NR Description: Chlorophyll A-B binding protein 7, chloroplast
  misc_feature (1)..(156): Homolog of NCBI NO: 2129879 NR Description: chlorophyll a/b-binding protein type II precursor,
  misc_feature (1)..(156): Homolog of NCBI NO: 34393511 NR Description: putative photosystem I antenna protein [Oryza
  misc_feature (1)..(156): Homolog of NCBI NO: 1076724 NR Description: LHCI-680, photosystem I antenna protein - barley
  misc_feature (1)..(156): Homolog of NCBI NO: 7443233 NR Description: chlorophyll a/b-binding protein type II, I - Lolium temulentum >gi|551047|emb|CAA55864.1| type II LHCI
  misc_feature (1)..(156): Homolog of NCBI NO: 18376587 NR Description: putative chlorophyll A-B binding protein of LHCI
  misc_feature (1)..(156): Homolog of NCBI NO: 99486 NR Description: chlorophyll a/b-binding protein (clone pINEab 31)

SEQ ID NO: 76318 - DNA, 1308 bp, Arabidopsis thaliana
  misc_feature (1)..(1308): Ceres Seq. ID no. 7107559
  misc_feature: MA Experiment ID: 20000185 Result: Down-regulated in Transcription
  misc_feature: MA Experiment 20000185 PARAMETER Experiment Name: At_Roots__P Parameter: Age (day) Value: 7 vs. 21
  misc_feature: MA Experiment 20000185 PARAMETER Experiment Name: At_Roots__P Parameter: Organism Value: A. thaliana
  misc_feature: MA Experiment 20000185 PARAMETER Experiment Name: At_Roots__P Parameter: Tissue Value: Roots vs. Whole Plant
  misc_feature: MA Experiment ID: 20000234 Result: Down-regulated in Transcription
  misc_feature: MA Experiment 20000234 PARAMETER Experiment Name: At_Siliques_P Parameter: Age (day) Value: 21
  misc_feature: MA Experiment 20000234 PARAMETER Experiment Name: At_Siliques_P Parameter: Organism Value: A. thaliana
  misc_feature: MA Experiment 20000234 PARAMETER Experiment Name: At_Siliques_P Parameter: Plant Line Value: WS
  misc_feature: MA Experiment 20000234 PARAMETER Experiment Name: At_Siliques_P Parameter: Tissue Value: Less Than 5mm Siliques vs. Whole Plant
  misc_feature: MA Experiment ID: 20000235 Result: Down-regulated in Transcription
  misc_feature: MA Experiment 20000235 PARAMETER Experiment Name: At_Siliques_P Parameter: Age (day) Value: 21
  misc_feature: MA Experiment 20000235 PARAMETER Experiment Name: At_Siliques_P Parameter: Organism Value: A. thaliana
  misc_feature: MA Experiment 20000235 PARAMETER Experiment Name: At_Siliques_P Parameter: Plant Line Value: WS
  misc_feature: MA Experiment 20000235 PARAMETER Experiment Name: At_Siliques_P Parameter: Tissue Value: 5-10mm Siliques vs. Whole Plant
  misc_feature: MA Experiment ID: 20000264 Result: Down-regulated in Transcription
  misc_feature: MA Experiment 20000264 PARAMETER Experiment Name: At_Open_Flower_P Parameter: Age (day) Value: 21
  misc_feature: MA Experiment 20000264 PARAMETER Experiment Name: At_Open_Flower_P Parameter: Plant Line Value: WS
  misc_feature: MA Experiment 20000264 PARAMETER Experiment Name: At_Open_Flower_P Parameter: Tissue Value: Open Flower vs. Whole Plant
  misc_feature: MA Experiment ID: 20000265 Result: Down-regulated in Transcription
  misc_feature: MA Experiment 20000265 PARAMETER Experiment Name: At_Open_Flower_P Parameter: Age (day) Value: 21
  misc_feature: MA Experiment 20000265 PARAMETER Experiment Name: At_Open_Flower_P Parameter: Plant Line Value: WS
  misc_feature: MA Experiment 20000265 PARAMETER Experiment Name: At_Open_Flower_P Parameter: Tissue Value: Closed Flower vs. Whole Plant
  misc_feature: MA Experiment ID: 20000286 Result: Down-regulated in Transcription
  misc_feature: MA Experiment 20000286 PARAMETER Experiment Name: At_Open_Flower_P Parameter: Age (day) Value: 21
  misc_feature: MA Experiment 20000286 PARAMETER Experiment Name: At_Open_Flower_P Parameter: Plant Line Value: WS
  misc_feature: MA Experiment 20000286 PARAMETER Experiment Name: At_Open_Flower_P Parameter: Tissue Value: Half Open vs. Whole Plant
  misc_feature: MA Experiment ID: 20000437 Result: Down-regulated in Transcription
  misc_feature: MA Experiment 20000437 PARAMETER Experiment Name: At_Drought_P Parameter: Age (day) Value: 8
  misc_feature: MA Experiment 20000437 PARAMETER Experiment Name: At_Drought_P Parameter: Organism Value: A. thaliana
  misc_feature: MA Experiment 20000437 PARAMETER Experiment Name: At_Drought_P Parameter: Plant Line Value: WS
  misc_feature: MA Experiment 20000437 PARAMETER Experiment Name: At_Drought_P Parameter: Timepoint (hr) Value: 24
  misc_feature: MA Experiment 20000437 PARAMETER Experiment Name: At_Drought_P Parameter: Tissue Value: Whole Plant
  misc_feature: MA Experiment 20000437 PARAMETER Experiment Name: At_Drought_P Parameter: Treatment Value: Drought vs. No Drought
  misc_feature: MA Experiment ID: 20000439 Result: Down-regulated in Transcription
  misc_feature: MA Experiment 20000439 PARAMETER Experiment Name: At_Roots__P Parameter: Age (day) Value: 14 vs. 21
  misc_feature: MA Experiment 20000439 PARAMETER Experiment Name: At_Roots__P Parameter: Organism Value: A. thaliana
  misc_feature: MA Experiment 20000439 PARAMETER Experiment Name: At_Roots__P Parameter: Tissue Value: Roots vs. Whole Plant
  misc_feature: MA Experiment ID: 20000441 Result: Up-regulated in Transcription
  misc_feature: MA Experiment 20000441 PARAMETER Experiment Name: At_1uM_BR-BRZ__P Parameter: Tissue Value: Shoot Apices
  misc_feature: MA Experiment 20000441 PARAMETER Experiment Name: At_1uM_BR-BRZ__P Parameter: Treatment Value: 1uM BR vs. No Treatment
  misc_feature: MA Experiment ID: 20000451 Result: Up-regulated in Transcription
  misc_feature: MA Experiment 20000451 PARAMETER Experiment Name: At_CS6879_Shoots-Roots_P Parameter: Age (day) Value: 14
  misc_feature: MA Experiment 20000451 PARAMETER Experiment Name: At_CS6879_Shoots-Roots_P Parameter: Organism Value: A. thaliana
  misc_feature: MA Experiment 20000451 PARAMETER Experiment Name: At_CS6879_Shoots-Roots_P Parameter: Plant Line Value: CS6879 vs. WS
  misc_feature: MA Experiment 20000451 PARAMETER Experiment Name: At_CS6879_Shoots-Roots_P Parameter: Tissue Value: Roots
  misc_feature: MA Experiment ID: 20000452 Result: Up-regulated in Transcription
  misc_feature: MA Experiment 20000452 PARAMETER Experiment Name: At_CS6879_Shoots-Roots_P Parameter: Age (day) Value: 14
  misc_feature: MA Experiment 20000452 PARAMETER Experiment Name: At_CS6879_Shoots-Roots_P Parameter: Organism Value: A. thaliana
  misc_feature: MA Experiment 20000452 PARAMETER Experiment Name: At_CS6879_Shoots-Roots_P Parameter: Plant Line Value: CS6879 vs. WS
  misc_feature: MA Experiment 20000452 PARAMETER Experiment Name: At_CS6879_Shoots-Roots_P Parameter: Tissue Value: Shoots
  misc_feature: MA Experiment ID: 20000794 Result: Down-regulated in Transcription
  misc_feature: MA Experiment 20000794 PARAMETER Experiment Name: At_Petals_P Parameter: Age (day) Value: 23-25 days
  misc_feature: MA Experiment 20000794 PARAMETER Experiment Name: At_Petals_P Parameter: Plant Line Value: WS
  misc_feature: MA Experiment 20000794 PARAMETER Experiment Name: At_Petals_P Parameter: Tissue Value: Petals vs. Whole plant
  misc_feature: MA Experiment ID: 20001451 Result: Up-regulated in Transcription
  misc_feature: MA Experiment 20001451 PARAMETER Experiment Name: At_Far-red-induction_P Parameter: Age (day) Value: 7
  misc_feature: MA Experiment 20001451 PARAMETER Experiment Name: At_Far-red-induction_P Parameter: Light Value: Far-red vs. White
  misc_feature: MA Experiment 20001451 PARAMETER Experiment Name: At_Far-red-induction_P Parameter: Organism Value: A. thaliana
  misc_feature: MA Experiment 20001451 PARAMETER Experiment Name: At_Far-red-induction_P Parameter: Plant Line Value: Columbia
  misc_feature: MA Experiment 20001451 PARAMETER Experiment Name: At_Far-red-induction_P Parameter: Timepoint (hr) Value: 24
  misc_feature: MA Experiment 20001451 PARAMETER Experiment Name: At_Far-red-induction_P Parameter: Tissue Value: Whole Plant
  misc_feature: MA Experiment ID: 20001557 Result: Down-regulated in Transcription
  misc_feature: MA Experiment 20001557 PARAMETER Experiment Name: At_Drought_Soil_Dry_P Parameter: Age (day) Value: 27
  misc_feature: MA Experiment 20001557 PARAMETER Experiment Name: At_Drought_Soil_Dry_P Parameter: Organism Value: A. thaliana
  misc_feature: MA Experiment 20001557 PARAMETER Experiment Name: At_Drought_Soil_Dry_P Parameter: Plant Line Value: WS
  misc_feature: MA Experiment 20001557 PARAMETER Experiment Name: At_Drought_Soil_Dry_P Parameter: Post Timepoint (hr) Value: 3
  misc_feature: MA Experiment 20001557 PARAMETER Experiment Name: At_Drought_Soil_Dry_P Parameter: Post-Treatment Value: Re-Water vs. No Drought
  misc_feature: MA Experiment 20001557 PARAMETER Experiment Name: At_Drought_Soil_Dry_P Parameter: Timepoint (day) Value: 13
  misc_feature: MA Experiment 20001557 PARAMETER Experiment Name: At_Drought_Soil_Dry_P Parameter: Treatment Value: Drought vs. No Drought
  misc_feature: MA Experiment ID: 20001558 Result: Down-regulated in Transcription
  misc_feature: MA Experiment 20001558 PARAMETER Experiment Name: At_Drought_Soil_Dry_P Parameter: Age (day) Value: 27
  misc_feature: MA Experiment 20001558 PARAMETER Experiment Name: At_Drought_Soil_Dry_P Parameter: Organism Value: A. thaliana
  misc_feature: MA Experiment 20001558 PARAMETER Experiment Name: At_Drought_Soil_Dry_P Parameter: Plant Line Value: WS
  misc_feature: MA Experiment 20001558 PARAMETER Experiment Name: At_Drought_Soil_Dry_P Parameter: Post Timepoint (hr) Value: 6
  misc_feature: MA Experiment 20001558 PARAMETER Experiment Name: At_Drought_Soil_Dry_P Parameter: Post-Treatment Value: Re-Water vs. No Drought
  misc_feature: MA Experiment 20001558 PARAMETER Experiment Name: At_Drought_Soil_Dry_P Parameter: Timepoint (day) Value: 13
  misc_feature: MA Experiment 20001558 PARAMETER Experiment Name: At_Drought_Soil_Dry_P Parameter: Treatment Value: Drought vs. No Drought
  misc_feature: MA Experiment ID: 20001757 Result: Up-regulated in Transcription
  misc_feature: MA Experiment 20001757 PARAMETER Experiment Name: At_50mM_NH4NO3_L-to-H_P Parameter: Timepoint (hr) Value: 6
  misc_feature: MA Experiment 20001757 PARAMETER Experiment Name: At_50mM_NH4NO3_L-to-H_P Parameter: Tissue Value: Leaf
  misc_feature: MA Experiment 20001757 PARAMETER Experiment Name: At_50mM_NH4NO3_L-to-H_P Parameter: Treatment Value: 50mM NH4NO3 vs 100mM Mannitol
  misc_feature: MA Experiment ID: 20001904 Result: Down-regulated in Transcription
  misc_feature: MA Experiment 20001904 PARAMETER Experiment Name: At_Drought_Reproduction_P Parameter: Age (day) Value: 37
  misc_feature: MA Experiment 20001904 PARAMETER Experiment Name: At_Drought_Reproduction_P Parameter: Organism Value: A. thaliana
  misc_feature: MA Experiment 20001904 PARAMETER Experiment Name: At_Drought_Reproduction_P Parameter: Plant Line Value: WS
  misc_feature: MA Experiment 20001904 PARAMETER Experiment Name: At_Drought_Reproduction_P Parameter: Timepoint (day) Value: 7
  misc_feature: MA Experiment 20001904 PARAMETER Experiment Name: At_Drought_Reproduction_P Parameter: Tissue Value: Rosettes
  misc_feature: MA Experiment 20001904 PARAMETER Experiment Name: At_Drought_Reproduction_P Parameter: Treatment Value: Drought vs. No Drought
  misc_feature: MA Experiment ID: 20001905 Result: Down-regulated in Transcription
  misc_feature: MA Experiment 20001905 PARAMETER Experiment Name: At_Drought_Reproduction_P Parameter: Age (day) Value: 40
  misc_feature: MA Experiment 20001905 PARAMETER Experiment Name: At_Drought_Reproduction_P Parameter: Organism Value: A. thaliana
  misc_feature: MA Experiment 20001905 PARAMETER Experiment Name: At_Drought_Reproduction_P Parameter: Plant Line Value: WS
  misc_feature: MA Experiment 20001905 PARAMETER Experiment Name: At_Drought_Reproduction_P Parameter: Timepoint (day) Value: 10
  misc_feature: MA Experiment 20001905 PARAMETER Experiment Name: At_Drought_Reproduction_P Parameter: Tissue Value: Rosettes
  misc_feature: MA Experiment 20001905 PARAMETER Experiment Name: At_Drought_Reproduction_P Parameter: Treatment Value: Drought vs. No Drought
  misc_feature: MA Experiment ID: 20001911 Result: Up-regulated in Transcription
  misc_feature: MA Experiment 20001911 PARAMETER Experiment Name: At_Drought_Reproduction_P Parameter: Age (day) Value: 40
  misc_feature: MA Experiment 20001911 PARAMETER Experiment Name: At_Drought_Reproduction_P Parameter: Organism Value: A. thaliana
  misc_feature: MA Experiment 20001911 PARAMETER Experiment Name: At_Drought_Reproduction_P Parameter: Plant Line Value: WS
  misc_feature: MA Experiment 20001911 PARAMETER Experiment Name: At_Drought_Reproduction_P Parameter: Timepoint (day) Value: 10
  misc_feature: MA Experiment 20001911 PARAMETER Experiment Name: At_Drought_Reproduction_P Parameter: Tissue Value: Flowers
  misc_feature: MA Experiment 20001911 PARAMETER Experiment Name: At_Drought_Reproduction_P Parameter: Treatment Value: Drought vs. No Drought
gaattcgcggccgccaagacccaaccatcggagggagggggcgagatgatgggattgagttccttggtctttaccgagtttcacagcctcggcttctctgaccttatagtttttgttgcgccactctggattgctgtggctgccggtgttttggttggttgggtttggaggcccaagtgggcttatctcgattctaaactcttgtccaattcacctaaattcctcaatcttcagcttcccacttccatcctcaaaacttcttctcaccacgttaaccccagcctttcttccaaagagaaaactgggtttgtaacggacgatgattttaggcatctatggaagttggttgaggtcaaagatggcggtccttgttggattcaaatgatggaccgatcaaccccaaccttctcatatcaagcttggaggcgagatcctgagaatgggcctccccagtaccgtagcagaactgtgtttgaggatgccactcccgagatggtcagggacttcttttgggatgatgarttccgttccaagtgggatgatatgcttttgtattcttctactctcgagcgttgcaaggacacgggcactatgggttgtgcaatgggtgcgaaagttccccttctttgtagcgacagggagtatattataggccgtcgtatatgggatgctggccgagtcttttactgcattactaagggagtacaatacccgtctgtacctagacaaaacaagccaaggcgagtcgacttgtactattcaagctggtgtatccgtgcagttgaatcaaaaagaggcgatggtgagatgacatcatgtgaggtactactatttcaccatgaagatatgggaataccgtgggagattgcaaagctkggggtgagacagggttatgtgggggtggcagtcaagaagattgagcccaggccttacgtgcatatcagagggctaaagcagcgggagccaggtttatccccgagtgccataatggctcacatcaacaccaaagtgagtgcagaggagttcatgatgagaaggggttcgatagcagaggttacaggagacaagccgacggggaaaaacataccaaagatactagtggtaggaggggcgattgcacttgcatgtacattggacaaagggctgttgacaaaggcggtgatattcggagtagccagaagatttgcaagaatgggaaaaaggatgtaggagagagtgtacatgtaagtagacagagaacgaatgagggaatgagagaggtgaaaagactatctctttagtcattgtcttgctggcggccgcgaattc

SEQ ID NO: 76319 - protein, 402 aa, Arabidopsis thaliana
  peptide (1)..(402): Ceres Seq. ID no. 7107560
  misc_feature (152)..(231): Pfam Name: START domain Pfam Description: START domain
  misc_feature (16)..(402): Homolog of NCBI NO: 4741929 NR Description: membrane related protein CP5 [Arabidopsis
  misc_feature (16)..(402): Homolog of NCBI NO: 15217736 NR Description: membrane related protein CP5, putative; protein
  misc_feature (16)..(402): Homolog of NCBI NO: 22135902 NR Description: membrane related protein CP5, putative thaliana] >gi|23197608|gb|AAN15331.1| membrane related protein
  misc_feature (63)..(401): Homolog of NCBI NO: 18033654 NR Description: putative nodule membrane protein [Medicago sativa]
  misc_feature (31)..(83): Homolog of NCBI NO: 18033654 NR Description: putative nodule membrane protein [Medicago sativa]
  misc_feature (34)..(401): Homolog of NCBI NO: 38344869 NR Description: OSJNBa0020P07.12 [Oryza sativa (japonica
  misc_feature (43)..(401): Homolog of NCBI NO: 10178166 NR Description: membrane related protein-like [Arabidopsis
  misc_feature (97)..(401): Homolog of NCBI NO: 18423599 NR Description: membrane related protein-like; protein id: supported by cDNA: 37644., supported by cDNA: gi_19423949
  misc_feature (43)..(82): Homolog of NCBI NO: 18423599 NR Description: membrane related protein-like; protein id: supported by cDNA: 37644., supported by cDNA: gi_19423949
  misc_feature (104)..(401): Homolog of NCBI NO: 21593272 NR Description: membrane related protein-like [Arabidopsis
  misc_feature (174)..(174): Xaa is any aa, unknown or other
  misc_feature (292)..(292): Xaa is any aa, unknown or other
EFAAAKTQPSEGGGEMMGLSSLVFTEFHSLGFSDLIVFVAPLWIAVAAGVLVGWVWRPKWAYLDSKLLSNSPKFLNLQLPTSILKTSSHHVNPSLSSKEKTGFVTDDDFRHLWKLVEVKDGGPCWIQMMDRSTPTFSYQAWRRDPENGPPQYRSRTVFEDATPEMVRDFFWDDXFRSKWDDMLLYSSTLERCKDTGTMGCAMGAKVPLLCSDREYIIGRRIWDAGRVFYCITKGVQYPSVPRQNKPRRVDLYYSSWCIRAVESKRGDGEMTSCEVLLFHHEDMGIPWEIAKXGVRQGYVGVAVKKIEPRPYVHIRGLKQREPGLSPSAIMAHINTKVSAEEFMMRRGSIAEVTGDKPTGKNIPKILVVGGAIALACTLDKGLLTKAVIFGVARRFARMGKRM

SEQ ID NO: 76320 - protein, 387 aa, Arabidopsis thaliana
  peptide (1)..(387): Ceres Seq. ID no. 7107561
  misc_feature (137)..(216): Pfam Name: START domain Pfam Description: START domain
  misc_feature (1)..(387): Homolog of NCBI NO: 4741929 NR Description: membrane related protein CP5 [Arabidopsis
  misc_feature (1)..(387): Homolog of NCBI NO: 15217736 NR Description: membrane related protein CP5, putative; protein
  misc_feature (1)..(387): Homolog of NCBI NO: 22135902 NR Description: membrane related protein CP5, putative thaliana] >gi|23197608|gb|AAN15331.1| membrane related protein
  misc_feature (48)..(386): Homolog of NCBI NO: 18033654 NR Description: putative nodule membrane protein [Medicago sativa]
  misc_feature (16)..(68): Homolog of NCBI NO: 18033654 NR Description: putative nodule membrane protein [Medicago sativa]
  misc_feature (19)..(386): Homolog of NCBI NO: 38344869 NR Description: OSJNBa0020P07.12 [Oryza sativa (japonica
  misc_feature (28)..(386): Homolog of NCBI NO: 10178166 NR Description: membrane related protein-like [Arabidopsis
  misc_feature (82)..(386): Homolog of NCBI NO: 18423599 NR Description: membrane related protein-like; protein id: supported by cDNA: 37644., supported by cDNA: gi_19423949
  misc_feature (28)..(67): Homolog of NCBI NO: 18423599 NR Description: membrane related protein-like; protein id: supported by cDNA: 37644., supported by cDNA: gi_19423949
  misc_feature (89)..(386): Homolog of NCBI NO: 21593272 NR Description: membrane related protein-like [Arabidopsis
  misc_feature (159)..(159): Xaa is any aa, unknown or other
  misc_feature (277)..(277): Xaa is any aa, unknown or other
MMGLSSLVFTEFHSLGFSDLIVFVAPLWIAVAAGVLVGWVWRPKWAYLDSKLLSNSPKFLNLQLPTSILKTSSHHVNPSLSSKEKTGFVTDDDFRHLWKLVEVKDGGPCWIQMMDRSTPTFSYQAWRRDPENGPPQYRSRTVFEDATPEMVRDFFWDDXFRSKWDDMLLYSSTLERCKDTGTMGCAMGAKVPLLCSDREYIIGRRIWDAGRVFYCITKGVQYPSVPRQNKPRRVDLYYSSWCIRAVESKRGDGEMTSCEVLLFHHEDMGIPWEIAKXGVRQGYVGVAVKKIEPRPYVHIRGLKQREPGLSPSAIMAHINTKVSAEEFMMRRGSIAEVTGDKPTGKNIPKILVVGGAIALACTLDKGLLTKAVIFGVARRFARMGKRM

SEQ ID NO: 76321 - protein, 386 aa, Arabidopsis thaliana
  peptide (1)..(386): Ceres Seq. ID no. 7107562
  misc_feature (136)..(215): Pfam Name: START domain Pfam Description: START domain
  misc_feature (1)..(386): Homolog of NCBI NO: 4741929 NR Description: membrane related protein CP5 [Arabidopsis
  misc_feature (1)..(386): Homolog of NCBI NO: 15217736 NR Description: membrane related protein CP5, putative; protein
  misc_feature (1)..(386): Homolog of NCBI NO: 22135902 NR Description: membrane related protein CP5, putative thaliana] >gi|23197608|gb|AAN15331.1| membrane related protein
  misc_feature (47)..(385): Homolog of NCBI NO: 18033654 NR Description: putative nodule membrane protein [Medicago sativa]
  misc_feature (15)..(67): Homolog of NCBI NO: 18033654 NR Description: putative nodule membrane protein [Medicago sativa]
  misc_feature (18)..(385): Homolog of NCBI NO: 38344869 NR Description: OSJNBa0020P07.12 [Oryza sativa (japonica
  misc_feature (27)..(385): Homolog of NCBI NO: 10178166 NR Description: membrane related protein-like [Arabidopsis
  misc_feature (81)..(385): Homolog of NCBI NO: 18423599 NR Description: membrane related protein-like; protein id: supported by cDNA: 37644., supported by cDNA: gi_19423949
  misc_feature (27)..(66): Homolog of NCBI NO: 18423599 NR Description: membrane related protein-like; protein id: supported by cDNA: 37644., supported by cDNA: gi_19423949
  misc_feature (88)..(385): Homolog of NCBI NO: 21593272 NR Description: membrane related protein-like [Arabidopsis
  misc_feature (158)..(158): Xaa is any aa, unknown or other
  misc_feature (276)..(276): Xaa is any aa, unknown or other
MGLSSLVFTEFHSLGFSDLIVFVAPLWIAVAAGVLVGWVWRPKWAYLDSKLLSNSPKFLNLQLPTSILKTSSHHVNPSLSSKEKTGFVTDDDFRHLWKLVEVKDGGPCWIQMMDRSTPTFSYQAWRRDPENGPPQYRSRTVFEDATPEMVRDFFWDDXFRSKWDDMLLYSSTLERCKDTGTMGCAMGAKVPLLCSDREYIIGRRIWDAGRVFYCITKGVQYPSVPRQNKPRRVDLYYSSWCIRAVESKRGDGEMTSCEVLLFHHEDMGIPWEIAKXGVRQGYVGVAVKKIEPRPYVHIRGLKQREPGLSPSAIMAHINTKVSAEEFMMRRGSIAEVTGDKPTGKNIPKILVVGGAIALACTLDKGLLTKAVIFGVARRFARMGKRM

SEQ ID NO: 76322 - DNA, 1592 bp, Arabidopsis thaliana
  misc_feature (1)..(1592): Ceres Seq. ID no. 7107575
  misc_feature: MA Experiment ID: 108595 Result: Down-regulated in Transcription
  misc_feature: MA Experiment 108595 PARAMETER Experiment Name: At_Ler-pi_Ovule_cDNA_P Parameter: Plant Line Value: null
gtggatctgcgataatgaatcgtttctagtcagatttggttattggttcattgtaatttgtttacgtagatgagaaacccaaatcgacggaggagaataagagttctaagccggaatcagcttctggttcggcccacctctgaaggttccagatcgatagtgaattcgtgtttaaaaaaaaaagattatctgtatttcaaatttcatgagcgtttgccaccacaacattgtcttttcggggttttagtcatacttaatggcttccaattcggagaaaaatcctcttctttcagatgagaaacccaaatcgacggaggagaataagagttctaagccggaatcagcttctgggagttcaacttcatcagctatgcctggcttgaatttcaatgcttttgatttctctaatatggctagtattctcaacgatcctagcatcagagaaatggctgagcaaatagctaaagatcctgcctttaaccaattggctgagcagcttcagagatctattcctaacgctggccaggaaggtggtttccctaactttgatcctcaacagtatgtcaatacaatgcaacaggttatgcataaccctgagtttaagacaatggccgagaaacttggtaccgccttagttcaggatccacaaatgtctccttttttggatgctttctcgaatcctgaaacagcagaacactttactgagcgtatggcgcggatgaaagaagatccagagttgaaacctatactagatgagattgatgctggtggtccttctgccatgatgaagtactggaatgatccagaagtgctgaaaaagctgggtgaagcaatgggtatgcctgttgctggcttaccagaccagactgtttcagctgaacctgaggtagcagaagaaggtgaagaagaagagtctattgttcaccaaactgccagtcttggtgatgttgagggtttgaaagctgccttggcatctggtggtaacaaagatgaagaagattctgaaggaaggacagcattgcattttgcttgtggatacggcgagttgaaatgtgctcaagttcttatcgatgctggagcaagtgttaatgcggttgacaaaaacaagaacacacctctgcattatgctgctggttacgggaggaaagagagtgtaagccttctcctggagaatggtgctgcagtcactctgcaaaacctagacgagaagacgccaattgatgtagcgaagctcaacagccagctggaggtggtgaagctgcttgagaaggatgctttcctttgagctctgctggttaaaggaaagctctaagctcatattgtctttgaggcatttgtcttgtgtgtgtcctgaaccagtttcacaggctttttgtgtacactttttattagttcctctcttcttctaaatttgtctcttatgttgttttaaaagtcaataaagaaagaaatagcaatcaatgatttaatttatgattatattctttatttcgtcgacctctacagaatgattcaatttggaagaatcattctggtttggaggatatgtaagaaaaactacttgatctccaagttattccattcttctgttg

SEQ ID NO: 76323 - protein, 342 aa, Arabidopsis thaliana
  peptide (1)..(342): Ceres Seq. ID no. 7107576
  misc_feature (250)..(282): Pfam Name: Ankyrin repeat Pfam Description: Ankyrin repeat
  misc_feature (1)..(342): Homolog of NCBI NO: 4205079 NR Description: ankyrin repeat-containing protein 2 [Arabidopsis
  misc_feature (1)..(342): Homolog of NCBI NO: 15237008 NR Description: ankyrin repeat-containing protein 2; protein id: supported by cDNA: 34698., supported by cDNA: gi_14423489, by cDNA: gi_20148296, supported by cDNA: gi_3478699, supported by
  misc_feature (1)..(342): Homolog of NCBI NO: 3478700 NR Description: AFT protein [Arabidopsis thaliana]
  misc_feature (39)..(342): Homolog of NCBI NO: 30690372 NR Description: ankyrin repeat-containing protein 2 [Arabidopsis
  misc_feature (1)..(342): Homolog of NCBI NO: 15227825 NR Description: putative glucanase; protein id: At2g17390.1
  misc_feature (2)..(342): Homolog of NCBI NO: 13310811 NR Description: ankyrin-repeat protein HBP1 [Nicotiana tabacum]
  misc_feature (13)..(342): Homolog of NCBI NO: 29826242 NR Description: TGB12K interacting protein 2 [Nicotiana tabacum]
  misc_feature (13)..(342): Homolog of NCBI NO: 29826244 NR Description: TGB12K interacting protein 3 [Nicotiana tabacum]
  misc_feature (2)..(342): Homolog of NCBI NO: 24637568 NR Description: ankyrin domain protein [Nicotiana tabacum]
  misc_feature (1)..(342): Homolog of NCBI NO: 27573339 NR Description: unknown protein [Oryza sativa (japonica
MASNSEKNPLLSDEKPKSTEENKSSKPESASGSSTSSAMPGLNFNAFDFSNMASILNDPSIREMAEQIAKDPAFNQLAEQLQRSIPNAGQEGGFPNFDPQQYVNTMQQVMHNPEFKTMAEKLGTALVQDPQMSPFLDAFSNPETAEHFTERMARMKEDPELKPILDEIDAGGPSAMMKYWNDPEVLKKLGEAMGMPVAGLPDQTVSAEPEVAEEGEEEESIVHQTASLGDVEGLKAALASGGNKDEEDSEGRTALHFACGYGELKCAQVLIDAGASVNAVDKNKNTPLHYAAGYGRKESVSLLLENGAAVTLQNLDEKTPIDVAKLNSQLEVVKLLEKDAFL

SEQ ID NO: 76324 - protein, 304 aa, Arabidopsis thaliana
  peptide (1)..(304): Ceres Seq. ID no. 7107577
  misc_feature (212)..(244): Pfam Name: Ankyrin repeat Pfam Description: Ankyrin repeat
  misc_feature (1)..(304): Homolog of NCBI NO: 4205079 NR Description: ankyrin repeat-containing protein 2 [Arabidopsis
  misc_feature (1)..(304): Homolog of NCBI NO: 15237008 NR Description: ankyrin repeat-containing protein 2; protein id: supported by cDNA: 34698., supported by cDNA: gi_14423489, by cDNA: gi_20148296, supported by cDNA: gi_3478699, supported by
  misc_feature (1)..(304): Homolog of NCBI NO: 3478700 NR Description: AFT protein [Arabidopsis thaliana]
  misc_feature (1)..(304): Homolog of NCBI NO: 30690372 NR Description: ankyrin repeat-containing protein 2 [Arabidopsis
  misc_feature (1)..(304): Homolog of NCBI NO: 15227825 NR Description: putative glucanase; protein id: At2g17390.1
  misc_feature (1)..(304): Homolog of NCBI NO: 13310811 NR Description: ankyrin-repeat protein HBP1 [Nicotiana tabacum]
  misc_feature (1)..(304): Homolog of NCBI NO: 29826242 NR Description: TGB12K interacting protein 2 [Nicotiana tabacum]
  misc_feature (1)..(304): Homolog of NCBI NO: 29826244 NR Description: TGB12K interacting protein 3 [Nicotiana tabacum]
  misc_feature (1)..(304): Homolog of NCBI NO: 24637568 NR Description: ankyrin domain protein [Nicotiana tabacum]
  misc_feature (1)..(304): Homolog of NCBI NO: 27573339 NR Description: unknown protein [Oryza sativa (japonica
MPGLNFNAFDFSNMASILNDPSIREMAEQIAKDPAFNQLAEQLQRSIPNAGQEGGFPNFDPQQYVNTMQQVMHNPEFKTMAEKLGTALVQDPQMSPFLDAFSNPETAEHFTERMARMKEDPELKPILDEIDAGGPSAMMKYWNDPEVLKKLGEAMGMPVAGLPDQTVSAEPEVAEEGEEEESIVHQTASLGDVEGLKAALASGGNKDEEDSEGRTALHFACGYGELKCAQVLIDAGASVNAVDKNKNTPLHYAAGYGRKESVSLLLENGAAVTLQNLDEKTPIDVAKLNSQLEVVKLLEKDAFL

SEQ ID NO: 76325 - protein, 291 aa, Arabidopsis thaliana
  peptide (1)..(291): Ceres Seq. ID no. 7107578
  misc_feature (199)..(231): Pfam Name: Ankyrin repeat Pfam Description: Ankyrin repeat
  misc_feature (1)..(291): Homolog of NCBI NO: 4205079 NR Description: ankyrin repeat-containing protein 2 [Arabidopsis
  misc_feature (1)..(291): Homolog of NCBI NO: 15237008 NR Description: ankyrin repeat-containing protein 2; protein id: supported by cDNA: 34698., supported by cDNA: gi_14423489, by cDNA: gi_20148296, supported by cDNA: gi_3478699, supported by
  misc_feature (1)..(291): Homolog of NCBI NO: 3478700 NR Description: AFT protein [Arabidopsis thaliana]
  misc_feature (1)..(291): Homolog of NCBI NO: 30690372 NR Description: ankyrin repeat-containing protein 2 [Arabidopsis
  misc_feature (1)..(291): Homolog of NCBI NO: 15227825 NR Description: putative glucanase; protein id: At2g17390.1
  misc_feature (1)..(291): Homolog of NCBI NO: 13310811 NR Description: ankyrin-repeat protein HBP1 [Nicotiana tabacum]
  misc_feature (1)..(291): Homolog of NCBI NO: 29826242 NR Description: TGB12K interacting protein 2 [Nicotiana tabacum]
  misc_feature (1)..(291): Homolog of NCBI NO: 29826244 NR Description: TGB12K interacting protein 3 [Nicotiana tabacum]
  misc_feature (1)..(291): Homolog of NCBI NO: 24637568 NR Description: ankyrin domain protein [Nicotiana tabacum]
  misc_feature (1)..(291): Homolog of NCBI NO: 27573339 NR Description: unknown protein [Oryza sativa (japonica
MASILNDPSIREMAEQIAKDPAFNQLAEQLQRSIPNAGQEGGFPNFDPQQYVNTMQQVMHNPEFKTMAEKLGTALVQDPQMSPFLDAFSNPETAEHFTERMARMKEDPELKPILDEIDAGGPSAMMKYWNDPEVLKKLGEAMGMPVAGLPDQTVSAEPEVAEEGEEEESIVHQTASLGDVEGLKAALASGGNKDEEDSEGRTALHFACGYGELKCAQVLIDAGASVNAVDKNKNTPLHYAAGYGRKESVSLLLENGAAVTLQNLDEKTPIDVAKLNSQLEVVKLLEKDAFL

SEQ ID NO: 76326 - DNA, 2267 bp, Arabidopsis thaliana
  misc_feature (1)..(2267): Ceres Seq. ID no. 7107579
  misc_feature: MA Experiment ID: 20000173 Result: Down-regulated in Transcription
  misc_feature: MA Experiment 20000173 PARAMETER Experiment Name: At_42deg_Heat_P Parameter: Age (day) Value: 14
  misc_feature: MA Experiment 20000173 PARAMETER Experiment Name: At_42deg_Heat_P Parameter: Organism Value: A. thaliana
  misc_feature: MA Experiment 20000173 PARAMETER Experiment Name: At_42deg_Heat_P Parameter: Plant Line Value: WS
  misc_feature: MA Experiment 20000173 PARAMETER Experiment Name: At_42deg_Heat_P Parameter: Temperature (deg C) Value: 42 vs. 22
  misc_feature: MA Experiment 20000173 PARAMETER Experiment Name: At_42deg_Heat_P Parameter: Timepoint (hr) Value: 6
  misc_feature: MA Experiment 20000173 PARAMETER Experiment Name: At_42deg_Heat_P Parameter: Tissue Value: Aerial
  misc_feature: MA Experiment ID: 20000184 Result: Down-regulated in Transcription
  misc_feature: MA Experiment 20000184 PARAMETER Experiment Name: At_Shoots__P Parameter: Age (day) Value: 7
  misc_feature: MA Experiment 20000184 PARAMETER Experiment Name: At_Shoots__P Parameter: Tissue Value: Shoots vs. Whole Plant
  misc_feature: MA Experiment ID: 20000437 Result: Up-regulated in Transcription
  misc_feature: MA Experiment 20000437 PARAMETER Experiment Name: At_Drought_P Parameter: Age (day) Value: 8
  misc_feature: MA Experiment 20000437 PARAMETER Experiment Name: At_Drought_P Parameter: Organism Value: A. thaliana
  misc_feature: MA Experiment 20000437 PARAMETER Experiment Name: At_Drought_P Parameter: Plant Line Value: WS
  misc_feature: MA Experiment 20000437 PARAMETER Experiment Name: At_Drought_P Parameter: Timepoint (hr) Value: 24
  misc_feature: MA Experiment 20000437 PARAMETER Experiment Name: At_Drought_P Parameter: Tissue Value: Whole Plant
  misc_feature: MA Experiment 20000437 PARAMETER Experiment Name: At_Drought_P Parameter: Treatment Value: Drought vs. No Drought
  misc_feature: MA Experiment ID: 20001247 Result: Up-regulated in Transcription
  misc_feature: MA Experiment 20001247 PARAMETER Experiment Name: At_Far-red-induction_P Parameter: Age (day) Value: 7
  misc_feature: MA Experiment 20001247 PARAMETER Experiment Name: At_Far-red-induction_P Parameter: Light Value: Far-red vs. White
  misc_feature: MA Experiment 20001247 PARAMETER Experiment Name: At_Far-red-induction_P Parameter: Organism Value: A. thaliana
  misc_feature: MA Experiment 20001247 PARAMETER Experiment Name: At_Far-red-induction_P Parameter: Plant Line Value: Columbia
  misc_feature: MA Experiment 20001247 PARAMETER Experiment Name: At_Far-red-induction_P Parameter: Timepoint (hr) Value: 1
  misc_feature: MA Experiment 20001247 PARAMETER Experiment Name: At_Far-red-induction_P Parameter: Tissue Value: Whole Plant
  misc_feature: MA Experiment ID: 20001451 Result: Down-regulated in Transcription
  misc_feature: MA Experiment 20001451 PARAMETER Experiment Name: At_Far-red-induction_P Parameter: Age (day) Value: 7
  misc_feature: MA Experiment 20001451 PARAMETER Experiment Name: At_Far-red-induction_P Parameter: Light Value: Far-red vs. White
  misc_feature: MA Experiment 20001451 PARAMETER Experiment Name: At_Far-red-induction_P Parameter: Organism Value: A. thaliana
  misc_feature: MA Experiment 20001451 PARAMETER Experiment Name: At_Far-red-induction_P Parameter: Plant Line Value: Columbia
  misc_feature: MA Experiment 20001451 PARAMETER Experiment Name: At_Far-red-induction_P Parameter: Timepoint (hr) Value: 24
  misc_feature: MA Experiment 20001451 PARAMETER Experiment Name: At_Far-red-induction_P Parameter: Tissue Value: Whole Plant
  misc_feature: MA Experiment ID: 20001911 Result: Up-regulated in Transcription
  misc_feature: MA Experiment 20001911 PARAMETER Experiment Name: At_Drought_Reproduction_P Parameter: Age (day) Value: 40
  misc_feature: MA Experiment 20001911 PARAMETER Experiment Name: At_Drought_Reproduction_P Parameter: Organism Value: A. thaliana
  misc_feature: MA Experiment 20001911 PARAMETER Experiment Name: At_Drought_Reproduction_P Parameter: Plant Line Value: WS
  misc_feature: MA Experiment 20001911 PARAMETER Experiment Name: At_Drought_Reproduction_P Parameter: Timepoint (day) Value: 10
  misc_feature: MA Experiment 20001911 PARAMETER Experiment Name: At_Drought_Reproduction_P Parameter: Tissue Value: Flowers
  misc_feature: MA Experiment 20001911 PARAMETER Experiment Name: At_Drought_Reproduction_P Parameter: Treatment Value: Drought vs. No Drought
ctcactatagggctcgagcggccgcccgggcaggtaagtctcacctttcaattcaaaaccccttccatttttgtgattaatatgcctacttggtggggaagaaagtcctgcaagaacaaggacgataatcacagaggaatcatctccacagatagagatatcaagagctctgctgttgttgatcctcctctcactcctactcgtggtggtacacctcgttgcagtcgtgaattcgctggagcttcttctgctttctctggttttgactctgattctaccgagaagaaaggtcaccctcttcctcgtcctttgctctctcctgtttcgatccatcatcaagatcatgtaagcggatccacttctggatctacatctgtttctagcgttagctcatctggatcagctgatgatcagagtcaacttgttgcttctaggggtcgtggtgatgtgaaattcaatgtagcagcagcaccacgtagtcctgagagagtttctccaaaggcagctactattactactaggcccacgtctccacggcatcagcgtttgtctggagttgtgagcttagagtcttctacagggaggaatgatgatggaaggtcctcctctgagtgtcatcctttgcctcgaccacctacttctcctacaagcccttctgctgtgcatggttccaggattggaggaggctacgagacctctccttcggggttttccacgtggaaaaaagggaaatttcttgggagtggcacctttggtcaagtctatcttggtttcaacagtgagaaagggaaaatgtgtgctattaaagaggtcaaggtaatttctgacgatcaaacatcaaaagaatgtctgaagcaactaaatcaggagataaatttgcttaaccagctttgtcatccgaatattgtccagtattacggaagtgaactgagtgaagaaaccttgtccgtctacttggagtacgtgtcaggtggttcaatccataaactacttaaggattatggttctttcactgaacccgttatccaaaactacacgcggcagattcttgctgggcttgcctatttacatggacgaaatacagtacatagggacatcaaaggagcaaatatattagtggatccgaatggtgaaatcaagttggcagactttgggatggccaaacatgtaacagccttttctactatgctttcttttaaagggagtccttactggatggcacccgaggttgtgatgagccaaaatggctacactcatgcagtcgatatctggagtttgggttgtactattctggaaatggcaacatcaaagccaccttggagccagtttgaaggggttgctgcgattttcaaaatcggaaacagtaaagacaccccggaaatacctgatcacctttcaaatgatgcaaagaattttataaggctttgtctgcaacgaaatccgacagtacgtcctacagcttctcagcttctagaacacccttttctacgtaacacaacaagagtggctagtactagtttgcccaaagacttccccccacgttcctatgatggaaacttctcactgcagcctacaagggaaccctatccagggagactgagccatgataattatgcaaaacagccattgtctagaactataaagagcccgagcagagaaaacgtaagacctatcacatccttaccagtatctccatgttcaagccctttacgccaacttgggccagcatacaaaagttgtttcctgtcacctcctcacccgtcttacgcatttcctgggcaagacagtgggtacaacctagcagagtttgctgcaagccctttcaggatgaagaaagacgcaatgatggaaccatctagtttcaggactcaaacaccgaattcaccattgagatcaagactggtgtagaaatggagcaaagattgagagactgaaagccacatactataaacaaggcccaatgaccatgtataaaacagtgtctacccctagttttggccttctccttctcaacacccagggaaatatgaagttatgagaccttagttgtgtgtgtgtggagcatctcctagaagtggagatttttggaacaagaaggagaaatttggggggaaaacagaaagatgtaaagagaaacatgaaaatgaatacaaagttagtgtgagaagtatagatagtaagttgtgttgtcacacaaagataatattcaaccatttgttttcaacctacagtgtgaatatacttttcagaaagtaaattagttactc

SEQ ID NO: 76327 - protein, 635 aa, Arabidopsis thaliana
  peptide (1)..(635): Ceres Seq. ID no. 7107580
  misc_feature (240)..(496): Pfam Name: Protein kinase domain Pfam Description: Protein kinase domain
  misc_feature (28)..(635): Homolog of NCBI NO: 3688193 NR Description: MAP3K alpha 1 protein kinase [Brassica napus]
  misc_feature (175)..(631): Homolog of NCBI NO: 6979343 NR Description: similar to mitogen-activated protein kinases
  misc_feature (68)..(138): Homolog of NCBI NO: 6979343 NR Description: similar to mitogen-activated protein kinases
  misc_feature (136)..(631): Homolog of NCBI NO: 38344069 NR Description: OSJNBa0006B20.13 [Oryza sativa (japonica
  misc_feature (119)..(633): Homolog of NCBI NO: 38345839 NR Description: OSJNBa0084K11.3 [Oryza sativa (japonica
  misc_feature (83)..(498): Homolog of NCBI NO: 15222512 NR Description: putative protein kinase; protein id: At1g63700.1
  misc_feature (83)..(498): Homolog of NCBI NO: 38049268 NR Description: YDA [Arabidopsis thaliana]
  misc_feature (79)..(506): Homolog of NCBI NO: 18425121 NR Description: MAP protein kinase; protein id: At5g66850.1, by cDNA: gi_13430659, supported by cDNA: gi_15982851 [Arabidopsis >gi|13430660|gb|AAK25952.1|AF360242_1 putative MAP protein kinase
  misc_feature (79)..(506): Homolog of NCBI NO: 15982852 NR Description: AT5g66850/MUD21_11 [Arabidopsis thaliana]
  misc_feature (238)..(506): Homolog of NCBI NO: 9758135 NR Description: MAP protein kinase [Arabidopsis thaliana]
LTIGLERPPGQVSLTFQFKTPSIFVINMPTWWGRKSCKNKDDNHRGIISTDRDIKSSAVVDPPLTPTRGGTPRCSREFAGASSAFSGFDSDSTEKKGHPLPRPLLSPVSIHHQDHVSGSTSGSTSVSSVSSSGSADDQSQLVASRGRGDVKFNVAAAPRSPERVSPKAATITTRPTSPRHQRLSGVVSLESSTGRNDDGRSSSECHPLPRPPTSPTSPSAVHGSRIGGGYETSPSGFSTWKKGKFLGSGTFGQVYLGFNSEKGKMCAIKEVKVISDDQTSKECLKQLNQEINLLNQLCHPNIVQYYGSELSEETLSVYLEYVSGGSIHKLLKDYGSFTEPVIQNYTRQILAGLAYLHGRNTVHRDIKGANILVDPNGEIKLADFGMAKHVTAFSTMLSFKGSPYWMAPEVVMSQNGYTHAVDIWSLGCTILEMATSKPPWSQFEGVAAIFKIGNSKDTPEIPDHLSNDAKNFIRLCLQRNPTVRPTASQLLEHPFLRNTTRVASTSLPKDFPPRSYDGNFSLQPTREPYPGRLSHDNYAKQPLSRTIKSPSRENVRPITSLPVSPCSSPLRQLGPAYKSCFLSPPHPSYAFPGQDSGYNLAEFAASPFRMKKDAMMEPSSFRTQTPNSPLRSRLV

SEQ ID NO: 76328 - protein, 608 aa, Arabidopsis thaliana
  peptide (1)..(608): Ceres Seq. ID no. 7107581
  misc_feature (213)..(469): Pfam Name: Protein kinase domain Pfam Description: Protein kinase domain
  misc_feature (1)..(608): Homolog of NCBI NO: 3688193 NR Description: MAP3K alpha 1 protein kinase [Brassica napus]
  misc_feature (148)..(604): Homolog of NCBI NO: 6979343 NR Description: similar to mitogen-activated protein kinases
  misc_feature (41)..(111): Homolog of NCBI NO: 6979343 NR Description: similar to mitogen-activated protein kinases
  misc_feature (109)..(604): Homolog of NCBI NO: 38344069 NR Description: OSJNBa0006B20.13 [Oryza sativa (japonica
  misc_feature (92)..(606): Homolog of NCBI NO: 38345839 NR Description: OSJNBa0084K11.3 [Oryza sativa (japonica
  misc_feature (56)..(471): Homolog of NCBI NO: 15222512 NR Description: putative protein kinase; protein id: At1g63700.1
  misc_feature (56)..(471): Homolog of NCBI NO: 38049268 NR Description: YDA [Arabidopsis thaliana]
  misc_feature (52)..(479): Homolog of NCBI NO: 18425121 NR Description: MAP protein kinase; protein id: At5g66850.1, by cDNA: gi_13430659, supported by cDNA: gi_15982851 [Arabidopsis >gi|13430660|gb|AAK25952.1|AF360242_1 putative MAP protein kinase
  misc_feature (52)..(479): Homolog of NCBI NO: 15982852 NR Description: AT5g66850/MUD21_11 [Arabidopsis thaliana]
  misc_feature (211)..(479): Homolog of NCBI NO: 9758135 NR Description: MAP protein kinase [Arabidopsis thaliana]
MPTWWGRKSCKNKDDNHRGIISTDRDIKSSAVVDPPLTPTRGGTPRCSREFAGASSAFSGFDSDSTEKKGHPLPRPLLSPVSIHHQDHVSGSTSGSTSVSSVSSSGSADDQSQLVASRGRGDVKFNVAAAPRSPERVSPKAATITTRPTSPRHQRLSGVVSLESSTGRNDDGRSSSECHPLPRPPTSPTSPSAVHGSRIGGGYETSPSGFSTWKKGKFLGSGTFGQVYLGFNSEKGKMCAIKEVKVISDDQTSKECLKQLNQEINLLNQLCHPNIVQYYGSELSEETLSVYLEYVSGGSIHKLLKDYGSFTEPVIQNYTRQILAGLAYLHGRNTVHRDIKGANILVDPNGEIKLADFGMAKHVTAFSTMLSFKGSPYWMAPEVVMSQNGYTHAVDIWSLGCTILEMATSKPPWSQFEGVAAIFKIGNSKDTPEIPDHLSNDAKNFIRLCLQRNPTVRPTASQLLEHPFLRNTTRVASTSLPKDFPPRSYDGNFSLQPTREPYPGRLSHDNYAKQPLSRTIKSPSRENVRPITSLPVSPCSSPLRQLGPAYKSCFLSPPHPSYAFPGQDSGYNLAEFAASPFRMKKDAMMEPSSFRTQTPNSPLRSRLV

SEQ ID NO: 76329 - protein, 371 aa, Arabidopsis thaliana
  peptide (1)..(371): Ceres Seq. ID no. 7107582
  misc_feature (1)..(232): Pfam Name: Protein kinase domain Pfam Description: Protein kinase domain
  misc_feature (1)..(371): Homolog of NCBI NO: 3688193 NR Description: MAP3K alpha 1 protein kinase [Brassica napus]
  misc_feature (1)..(367): Homolog of NCBI NO: 6979343 NR Description: similar to mitogen-activated protein kinases
  misc_feature (1)..(367): Homolog of NCBI NO: 38344069 NR Description: OSJNBa0006B20.13 [Oryza sativa (japonica
  misc_feature (1)..(369): Homolog of NCBI NO: 38345839 NR Description: OSJNBa0084K11.3 [Oryza sativa (japonica
  misc_feature (1)..(234): Homolog of NCBI NO: 15222512 NR Description: putative protein kinase; protein id: At1g63700.1
  misc_feature (1)..(234): Homolog of NCBI NO: 38049268 NR Description: YDA [Arabidopsis thaliana]
  misc_feature (1)..(242): Homolog of NCBI NO: 18425121 NR Description: MAP protein kinase; protein id: At5g66850.1, by cDNA: gi_13430659, supported by cDNA: gi_15982851 [Arabidopsis >gi|13430660|gb|AAK25952.1|AF360242_1 putative MAP protein kinase
  misc_feature (1)..(242): Homolog of NCBI NO: 15982852 NR Description: AT5g66850/MUD21_11 [Arabidopsis thaliana]
  misc_feature (1)..(242): Homolog of NCBI NO: 9758135 NR Description: MAP protein kinase [Arabidopsis thaliana]
  misc_feature (1)..(242): Homolog of NCBI NO: 25387031 NR Description: mitogen-activated protein kinase MAP3K [imported] Arabidopsis thaliana (fragment) >gi|2315153|emb|CAA74696.1| MAP3K
MCAIKEVKVISDDQTSKECLKQLNQEINLLNQLCHPNIVQYYGSELSEETLSVYLEYVSGGSIHKLLKDYGSFTEPVIQNYTRQILAGLAYLHGRNTVHRDIKGANILVDPNGEIKLADFGMAKHVTAFSTMLSFKGSPYWMAPEVVMSQNGYTHAVDIWSLGCTILEMATSKPPWSQFEGVAAIFKIGNSKDTPEIPDHLSNDAKNFIRLCLQRNPTVRPTASQLLEHPFLRNTTRVASTSLPKDFPPRSYDGNFSLQPTREPYPGRLSHDNYAKQPLSRTIKSPSRENVRPITSLPVSPCSSPLRQLGPAYKSCFLSPPHPSYAFPGQDSGYNLAEFAASPFRMKKDAMMEPSSFRTQTPNSPLRSRLV

SEQ ID NO: 76330 - DNA, 939 bp, Arabidopsis thaliana
  misc_feature (1)..(939): Ceres Seq. ID no. 7107587
  misc_feature: MA Experiment ID: 108569 Result: Down-regulated in Transcription
  misc_feature: MA Experiment 108569 PARAMETER Experiment Name: At_0.001%_MeJA__cDNA_P Parameter: Timepoint (hr) Value: 6
  misc_feature: MA Experiment 108569 PARAMETER Experiment Name: At_0.001%_MeJA__cDNA_P Parameter: Tissue Value: Aerial
  misc_feature: MA Experiment 108569 PARAMETER Experiment Name: At_0.001%_MeJA__cDNA_P Parameter: Treatment Value: 0.001% MeJA vs. No Treatment
  misc_feature: MA Experiment ID: 108668 Result: Up-regulated in Transcription
  misc_feature: MA Experiment 108668 PARAMETER Experiment Name: At_2mM_SA_cDNA_P Parameter: Plant Line Value: WS
  misc_feature: MA Experiment 108668 PARAMETER Experiment Name: At_2mM_SA_cDNA_P Parameter: Timepoint (hr) Value: 6
  misc_feature: MA Experiment 108668 PARAMETER Experiment Name: At_2mM_SA_cDNA_P Parameter: Treatment Value: 2mM SA vs. No Treatment
  misc_feature: MA Experiment ID: 20000173 Result: Up-regulated in Transcription
  misc_feature: MA Experiment 20000173 PARAMETER Experiment Name: At_42deg_Heat_P Parameter: Age (day) Value: 14
  misc_feature: MA Experiment 20000173 PARAMETER Experiment Name: At_42deg_Heat_P Parameter: Organism Value: A. thaliana
  misc_feature: MA Experiment 20000173 PARAMETER Experiment Name: At_42deg_Heat_P Parameter: Plant Line Value: WS
  misc_feature: MA Experiment 20000173 PARAMETER Experiment Name: At_42deg_Heat_P Parameter: Temperature (deg C) Value: 42 vs. 22
  misc_feature: MA Experiment 20000173 PARAMETER Experiment Name: At_42deg_Heat_P Parameter: Timepoint (hr) Value: 6
  misc_feature: MA Experiment 20000173 PARAMETER Experiment Name: At_42deg_Heat_P Parameter: Tissue Value: Aerial
  misc_feature: MA Experiment ID: 20000182 Result: Up-regulated in Transcription
  misc_feature: MA Experiment 20000182 PARAMETER Experiment Name: At_2mM_SA_P Parameter: Age (day) Value: 14
  misc_feature: MA Experiment 20000182 PARAMETER Experiment Name: At_2mM_SA_P Parameter: Organism Value: A. thaliana
  misc_feature: MA Experiment 20000182 PARAMETER Experiment Name: At_2mM_SA_P Parameter: Plant Line Value: WS
  misc_feature: MA Experiment 20000182 PARAMETER Experiment Name: At_2mM_SA_P Parameter: Timepoint (hr) Value: 6
  misc_feature: MA Experiment 20000182 PARAMETER Experiment Name: At_2mM_SA_P Parameter: Tissue Value: Aerial
  misc_feature: MA Experiment 20000182 PARAMETER Experiment Name: At_2mM_SA_P Parameter: Treatment Value: 2mM SA vs. No Treatment
  misc_feature: MA Experiment ID: 20000184 Result: Down-regulated in Transcription
  misc_feature: MA Experiment 20000184 PARAMETER Experiment Name: At_Shoots__P Parameter: Age (day) Value: 7
  misc_feature: MA Experiment 20000184 PARAMETER Experiment Name: At_Shoots__P Parameter: Tissue Value: Shoots vs. Whole Plant
  misc_feature: MA Experiment ID: 20000227 Result: Down-regulated in Transcription
  misc_feature: MA Experiment 20000227 PARAMETER Experiment Name: At_Root-Tips-vs-Tops_P Parameter: Tissue Value: Root Tips vs. Root Tops
ccacgcgtccggtctgaagaaagcagaatcaaatccatgtctttcagaggacttagcaggccaaatgcaatatctggaatgggtgttgcagatgagagcaaaaccacatttctagagcttcaaaggaaaaaaactcatcgctatgtggtcttcaagattgatgaatccaaaaaagaagttgttgttgagaaaactggaaatcctacagagagctacgatgatttcttagcttcacttcctgataatgactgcagatacgctgtttatgactttgatttcgttacttctgagaattgtcaaaagagcaaaatcttcttctttgcttggtctccttcgacctctggaattcgagccaaggtgctttactcgacttctaaagaccagttaagtagggagcttcaagggattcactatgagattcaagctactgatcctactgaggttgatcttgaagtgttacgcgaacgagcgaactgagagcaagcaaggttgctatgtctattcaaaacttatggtaatgtaatgaataattcgtattctctgtggattgatttgtgtaaacacagtttcatgttctatgtcaaactgtataacctctggtgtttcagattgcacaacctaaagcttaggtaaactgaatatggtttaagatcgtaaaaggttgatatattagtaatgttaagagggagaagaaacttctctttagtagataacgagaatgttgatgagcatgatgagagagttcttaaactagtctagcaaattctgtataagctcttgttgtagccatcttgaattcgaatctaatccttgcgaacaatataaaaagtggtagtgtgtaaagtttccctcatcatttgtggtttctttttctcactttcttcggtgtagtaaaatttaagttgtatgtataataattctatcatatacctgctttct

SEQ ID NO: 76331 - protein, 158 aa, Arabidopsis thaliana
  peptide (1)..(158): Ceres Seq. ID no. 7107588
  misc_feature (31)..(158): Pfam Name: Cofilin/tropomyosin-type actin-binding protein Pfam Description: Cofilin/tropomyosin-type actin-binding protein
  misc_feature (13)..(158): Homolog of NCBI NO: 18402587 NR Description: actin depolymerizing factor 6; protein id: supported by cDNA: 255294., supported by cDNA: gi_13926244,
  misc_feature (13)..(158): Homolog of NCBI NO: 21554405 NR Description: Actin-depolymerizing factor ADF-6 [Arabidopsis
  misc_feature (27)..(158): Homolog of NCBI NO: 25295741 NR Description: actin depolymerizing factor 6 [imported] - thaliana >gi|13926245|gb|AAK49596.1|AF372880_1 At2g31200/F16D14.4 thaliana] >gi|16323230|gb|AAL15349.1| At2g31200/F16D14.4
  misc_feature (21)..(158): Homolog of NCBI NO: 4566614 NR Description: actin depolymerizing factor [Populus x canescens]
  misc_feature (13)..(158): Homolog of NCBI NO: 32363121 NR Description: Actin-depolymerizing factor (ADF)
  misc_feature (13)..(157): Homolog of NCBI NO: 24745620 NR Description: actin depolymerizing factor 6 [Solanum tuberosum]
  misc_feature (24)..(157): Homolog of NCBI NO: 7330254 NR Description: actin depolymerizing factor [Elaeis guineensis]
  misc_feature (19)..(158): Homolog of NCBI NO: 34897072 NR Description: putative actin-depolymerizing factor [Oryza
  misc_feature (22)..(158): Homolog of NCBI NO: 17366768 NR Description: Actin-depolymerizing factor 1 (ADF 1)
  misc_feature (22)..(158): Homolog of NCBI NO: 30697300 NR Description: actin depolymerizing factor 4 - like protein
PRVRSEESRIKSMSFRGLSRPNAISGMGVADESKTTFLELQRKKTHRYVVFKIDESKKEVVVEKTGNPTESYDDFLASLPDNDCRYAVYDFDFVTSENCQKSKIFFFAWSPSTSGIRAKVLYSTSKDQLSRELQGIHYEIQATDPTEVDLEVLRERAN

SEQ ID NO: 76332 - protein, 146 aa, Arabidopsis thaliana; identical to SEQ ID NO: 28358
  peptide (1)..(146): Ceres Seq. ID no. 7107589
  misc_feature (19)..(146): Pfam Name: Cofilin/tropomyosin-type actin-binding protein Pfam Description: Cofilin/tropomyosin-type actin-binding protein
  misc_feature (1)..(146): Homolog of NCBI NO: 18402587 NR Description: actin depolymerizing factor 6; protein id: supported by cDNA: 255294., supported by cDNA: gi_13926244,
  misc_feature (1)..(146): Homolog of NCBI NO: 21554405 NR Description: Actin-depolymerizing factor ADF-6 [Arabidopsis
  misc_feature (15)..(146): Homolog of NCBI NO: 25295741 NR Description: actin depolymerizing factor 6 [imported] - thaliana >gi|13926245|gb|AAK49596.1|AF372880_1 At2g31200/F16D14.4 thaliana] >gi|16323230|gb|AAL15349.1| At2g31200/F16D14.4
  misc_feature (9)..(146): Homolog of NCBI NO: 4566614 NR Description: actin depolymerizing factor [Populus x canescens]
  misc_feature (1)..(146): Homolog of NCBI NO: 32363121 NR Description: Actin-depolymerizing factor (ADF)
  misc_feature (1)..(145): Homolog of NCBI NO: 24745620 NR Description: actin depolymerizing factor 6 [Solanum tuberosum]
  misc_feature (12)..(145): Homolog of NCBI NO: 7330254 NR Description: actin depolymerizing factor [Elaeis guineensis]
  misc_feature (7)..(146): Homolog of NCBI NO: 34897072 NR Description: putative actin-depolymerizing factor [Oryza
  misc_feature (10)..(146): Homolog of NCBI NO: 17366768 NR Description: Actin-depolymerizing factor 1 (ADF 1)
  misc_feature (10)..(146): Homolog of NCBI NO: 30697300 NR Description: actin depolymerizing factor 4 - like protein

SEQ ID NO: 76333 - protein, 132 aa, Arabidopsis thaliana; identical to SEQ ID NO: 28359
  peptide (1)..(132): Ceres Seq. ID no. 7107590
  misc_feature (5)..(132): Pfam Name: Cofilin/tropomyosin-type actin-binding protein Pfam Description: Cofilin/tropomyosin-type actin-binding protein
  misc_feature (1)..(132): Homolog of NCBI NO: 18402587 NR Description: actin depolymerizing factor 6; protein id: supported by cDNA: 255294., supported by cDNA: gi_13926244,
  misc_feature (1)..(132): Homolog of NCBI NO: 21554405 NR Description: Actin-depolymerizing factor ADF-6 [Arabidopsis
  misc_feature (1)..(132): Homolog of NCBI NO: 25295741 NR Description: actin depolymerizing factor 6 [imported] - thaliana >gi|13926245|gb|AAK49596.1|AF372880_1 At2g31200/F16D14.4 thaliana] >gi|16323230|gb|AAL15349.1| At2g31200/F16D14.4
  misc_feature (1)..(132): Homolog of NCBI NO: 4566614 NR Description: actin depolymerizing factor [Populus x canescens]
  misc_feature (1)..(132): Homolog of NCBI NO: 32363121 NR Description: Actin-depolymerizing factor (ADF)
  misc_feature (1)..(131): Homolog of NCBI NO: 24745620 NR Description: actin depolymerizing factor 6 [Solanum tuberosum]
  misc_feature (1)..(131): Homolog of NCBI NO: 7330254 NR Description: actin depolymerizing factor [Elaeis guineensis]
  misc_feature (1)..(132): Homolog of NCBI NO: 34897072 NR Description: putative actin-depolymerizing factor [Oryza
  misc_feature (1)..(132): Homolog of NCBI NO: 17366768 NR Description: Actin-depolymerizing factor 1 (ADF 1)
  misc_feature (1)..(132): Homolog of NCBI NO: 30697300 NR Description: actin depolymerizing factor 4 - like protein

SEQ ID NO: 76334 - DNA, 943 bp, Arabidopsis thaliana
  misc_feature (1)..(943): Ceres Seq. ID no. 7107599
  misc_feature: MA Experiment ID: 108434 Result: Up-regulated in Transcription
  misc_feature: MA Experiment 108434 PARAMETER Experiment Name: At_Root_Tips_cDNA_P Parameter: Tissue Value: Root Tips
  misc_feature: MA Experiment ID: 108595 Result: Up-regulated in Transcription
  misc_feature: MA Experiment 108595 PARAMETER Experiment Name: At_Ler-pi_Ovule_cDNA_P Parameter: Plant Line Value: null
  misc_feature: MA Experiment ID: 20000184 Result: Down-regulated in Transcription
  misc_feature: MA Experiment 20000184 PARAMETER Experiment Name: At_Shoots__P Parameter: Age (day) Value: 7
  misc_feature: MA Experiment 20000184 PARAMETER Experiment Name: At_Shoots__P Parameter: Tissue Value: Shoots vs. Whole Plant
  misc_feature: MA Experiment ID: 20001451 Result: Up-regulated in Transcription
  misc_feature: MA Experiment 20001451 PARAMETER Experiment Name: At_Far-red-induction_P Parameter: Age (day) Value: 7
  misc_feature: MA Experiment 20001451 PARAMETER Experiment Name: At_Far-red-induction_P Parameter: Light Value: Far-red vs. White
  misc_feature: MA Experiment 20001451 PARAMETER Experiment Name: At_Far-red-induction_P Parameter: Organism Value: A. thaliana
  misc_feature: MA Experiment 20001451 PARAMETER Experiment Name: At_Far-red-induction_P Parameter: Plant Line Value: Columbia
  misc_feature: MA Experiment 20001451 PARAMETER Experiment Name: At_Far-red-induction_P Parameter: Timepoint (hr) Value: 24
  misc_feature: MA Experiment 20001451 PARAMETER Experiment Name: At_Far-red-induction_P Parameter: Tissue Value: Whole Plant
gtcgacccacgcgtccgtgaggatgagtagtaaaaattaggaagactctagtctgggagagactttcagcagctatttctttgtcttctttctctttaaagaacctcactctctctctctttagtcaaaaatccccaattcgtgaacaaattagggtttttgaagtttgaagaaggagagaaagatgagtgcttcaaggtttatcaagtgtgtcactgtcggcgacggtgctgttggaaagacttgtcttctcatctcctacactagcaacactttccccacggattatgtgccaactgtgttcgataatttcagtgccaatgtgattgttgatggcaacactatcaacttgggattgtgggatactgcagggcaagaggactacaatagactaagacctttgagctatcgcggtgcagatgtcttcttacttgcattctcacttgtcagcaaagctagctatgaaaatgtttctaaaaagtgggttcctgaactgagacattatgctcctggtgttcccatcatcctcgttggaacaaagcttgatcttcgagatgataagcaattctttgccgagcaccctggtgctgtgcctatctctaccgctcagggtgaagaactaaagaagctgattggggcgcctgcttatatcgaatgcagtgcaaaaactcaacagaatgtgaaagcagtgtttgatgcggctatcaaggtcgttctccagccaccaaaaaacaagaagaagaagaagagaaaatctcagaaaggttgttctatactctgattcaacaagaagaaaggaatcaacaggagaattagagctataagtatttgttttctcctttttcataacttgtttacccaaggaatcaaaaatctgttgtttgtagtctgaaaatgacaaaagttgaagaactagtaacaagtatttgtattccttgtttgc

SEQ ID NO: 76335 - protein, 198 aa, Arabidopsis thaliana; identical to SEQ ID NO: 30837
  peptide (1)..(198): Ceres Seq. ID no. 7107600
  misc_feature (8)..(179): Pfam Name: Ras family Pfam Description: Ras family
  misc_feature (1)..(198): Homolog of NCBI NO: 15236247 NR Description: Rho1Ps homolog Rac-like protein; protein id: supported by cDNA: gi_1732518, supported by cDNA: gi_2645642
  misc_feature (1)..(198): Homolog of NCBI NO: 28393687 NR Description: putative Rho1Ps homolog Rac protein [Arabidopsis
  misc_feature (1)..(198): Homolog of NCBI NO: 1732519 NR Description: Rho1Ps homolog [Arabidopsis thaliana]
  misc_feature (1)..(198): Homolog of NCBI NO: 7438393 NR Description: small GTP binding protein, rac-type - turnip
  misc_feature (1)..(198): Homolog of NCBI NO: 38524283 NR Description: putative RACD protein [Hordeum vulgare subsp.
  misc_feature (1)..(198): Homolog of NCBI NO: 34421680 NR Description: RAC-like G-protein Rac1 [Gossypium hirsutum]
  misc_feature (1)..(198): Homolog of NCBI NO: 6822324 NR Description: small GTP binding protein RACDP [Oryza sativa japonica] >gi|13487163|gb|AAK27450.1|AF329814_1 small GTP binding
  misc_feature (1)..(198): Homolog of NCBI NO: 4097583 NR Description: NTGP3 [Nicotiana tabacum]
  misc_feature (1)..(198): Homolog of NCBI NO: 4097565 NR Description: ATGP3 [Arabidopsis thaliana]
  misc_feature (1)..(198): Homolog of NCBI NO: 2117168 NR Description: RAC1 [Lotus japonicus]

SEQ ID NO: 76336 - DNA, 928 bp, Arabidopsis thaliana
  misc_feature (1)..(928): Ceres Seq. ID no. 7107601
  misc_feature: MA Experiment ID: 108435 Result: Down-regulated in Transcription
  misc_feature: MA Experiment 108435 PARAMETER Experiment Name: At_stm_Mutants_cDNA_P Parameter: Plant Line Value: wt Landsburg vs stm
  misc_feature: MA Experiment 108435 PARAMETER Experiment Name: At_stm_Mutants_cDNA_P Parameter: Tissue Value: Shoot Apical Meristem Region
  misc_feature: MA Experiment ID: 108463 Result: Up-regulated in Transcription
  misc_feature: MA Experiment 108463 PARAMETER Experiment Name: At_Germinating_Seeds_cDNA_P Parameter: Age (day) Value: 3 vs. 0
  misc_feature: MA Experiment 108463 PARAMETER Experiment Name: At_Germinating_Seeds_cDNA_P Parameter: Tissue Value: Germinating Seeds
  misc_feature: MA Experiment ID: 108464 Result: Up-regulated in Transcription
  misc_feature: MA Experiment 108464 PARAMETER Experiment Name: At_Germinating_Seeds_cDNA_P Parameter: Age (day) Value: 4 vs. 0
  misc_feature: MA Experiment 108464 PARAMETER Experiment Name: At_Germinating_Seeds_cDNA_P Parameter: Tissue Value: Germinating Seeds
  misc_feature: MA Experiment ID: 108488 Result: Up-regulated in Transcription
  misc_feature: MA Experiment ID: 108577 Result: Up-regulated in Transcription
  misc_feature: MA Experiment 108577 PARAMETER Experiment Name: At_42deg_Heat_cDNA_P Parameter: Temperature (deg C) Value: 42 vs. 22
  misc_feature: MA Experiment 108577 PARAMETER Experiment Name: At_42deg_Heat_cDNA_P Parameter: Timepoint (hr) Value: 6
  misc_feature: MA Experiment 108577 PARAMETER Experiment Name: At_42deg_Heat_cDNA_P Parameter: Tissue Value: Aerial
  misc_feature: MA Experiment ID: 108594 Result: Down-regulated in Transcription
  misc_feature: MA Experiment 108594 PARAMETER Experiment Name: At_Ler-rhl_Root_cDNA_P Parameter: Plant Line Value: null
  misc_feature: MA Experiment ID: 108595 Result: Down-regulated in Transcription
  misc_feature: MA Experiment 108595 PARAMETER Experiment Name: At_Ler-pi_Ovule_cDNA_P Parameter: Plant Line Value: null
  misc_feature: MA Experiment ID: 20000086 Result: Down-regulated in Transcription
  misc_feature: MA Experiment 20000086 PARAMETER Experiment Name: At_100uM_ABA_Mutants_cDNA_P Parameter: Plant Line Value: CS22
  misc_feature: MA Experiment 20000086 PARAMETER Experiment Name: At_100uM_ABA_Mutants_cDNA_P Parameter: Timepoint (hr) Value: 6
  misc_feature: MA Experiment 20000086 PARAMETER Experiment Name: At_100uM_ABA_Mutants_cDNA_P Parameter: Tissue Value: Aerial
  misc_feature: MA Experiment 20000086 PARAMETER Experiment Name: At_100uM_ABA_Mutants_cDNA_P Parameter: Treatment Value: 100uM ABA vs. No Treatment
  misc_feature: MA Experiment ID: 20000087 Result: Down-regulated in Transcription
  misc_feature: MA Experiment 20000087 PARAMETER Experiment Name: At_100uM_ABA_Mutants_cDNA_P Parameter: Plant Line Value: WS
  misc_feature: MA Experiment 20000087 PARAMETER Experiment Name: At_100uM_ABA_Mutants_cDNA_P Parameter: Timepoint (hr) Value: 6
  misc_feature: MA Experiment 20000087 PARAMETER Experiment Name: At_100uM_ABA_Mutants_cDNA_P Parameter: Tissue Value: Aerial
  misc_feature: MA Experiment 20000087 PARAMETER Experiment Name: At_100uM_ABA_Mutants_cDNA_P Parameter: Treatment Value: 100uM ABA vs. No Treatment
  misc_feature: MA Experiment ID: 20000090 Result: Down-regulated in Transcription
  misc_feature: MA Experiment ID: 20000185 Result: Down-regulated in Transcription
  misc_feature: MA Experiment 20000185 PARAMETER Experiment Name: At_Roots__P Parameter: Age (day) Value: 7 vs. 21
  misc_feature: MA Experiment 20000185 PARAMETER Experiment Name: At_Roots__P Parameter: Organism Value: A. thaliana
  misc_feature: MA Experiment 20000185 PARAMETER Experiment Name: At_Roots__P Parameter: Tissue Value: Roots vs. Whole Plant
  misc_feature: MA Experiment ID: 20000227 Result: Down-regulated in Transcription
  misc_feature: MA Experiment 20000227 PARAMETER Experiment Name: At_Root-Tips-vs-Tops_P Parameter: Tissue Value: Root Tips vs. Root Tops
  misc_feature: MA Experiment ID: 20000234 Result: Down-regulated in Transcription
  misc_feature: MA Experiment 20000234 PARAMETER Experiment Name: At_Siliques_P Parameter: Age (day) Value: 21
  misc_feature: MA Experiment 20000234 PARAMETER Experiment Name: At_Siliques_P Parameter: Organism Value: A. thaliana
  misc_feature: MA Experiment 20000234 PARAMETER Experiment Name: At_Siliques_P Parameter: Plant Line Value: WS
  misc_feature: MA Experiment 20000234 PARAMETER Experiment Name: At_Siliques_P Parameter: Tissue Value: Less Than 5mm Siliques vs. Whole Plant
  misc_feature: MA Experiment ID: 20000235 Result: Down-regulated in Transcription
  misc_feature: MA Experiment 20000235 PARAMETER Experiment Name: At_Siliques_P Parameter: Age (day) Value: 21
  misc_feature: MA Experiment 20000235 PARAMETER Experiment Name: At_Siliques_P Parameter: Organism Value: A. thaliana
  misc_feature: MA Experiment 20000235 PARAMETER Experiment Name: At_Siliques_P Parameter: Plant Line Value: WS
  misc_feature: MA Experiment 20000235 PARAMETER Experiment Name: At_Siliques_P Parameter: Tissue Value: 5-10mm Siliques vs. Whole Plant
  misc_feature: MA Experiment ID: 20000286 Result: Down-regulated in Transcription
  misc_feature: MA Experiment 20000286 PARAMETER Experiment Name: At_Open_Flower_P Parameter: Age (day) Value: 21
  misc_feature: MA Experiment 20000286 PARAMETER Experiment Name: At_Open_Flower_P Parameter: Plant Line Value: WS
  misc_feature: MA Experiment 20000286 PARAMETER Experiment Name: At_Open_Flower_P Parameter: Tissue Value: Half Open vs. Whole Plant
  misc_feature: MA Experiment ID: 20000308 Result: Down-regulated in Transcription
  misc_feature: MA Experiment 20000308 PARAMETER Experiment Name: At_100mM_NaCl__P Parameter: Age (day) Value: 17
  misc_feature: MA Experiment 20000308 PARAMETER Experiment Name: At_100mM_NaCl__P Parameter: Organism Value: A. thaliana
  misc_feature: MA Experiment 20000308 PARAMETER Experiment Name: At_100mM_NaCl__P Parameter: Plant Line Value: WS
  misc_feature: MA Experiment 20000308 PARAMETER Experiment Name: At_100mM_NaCl__P Parameter: Timepoint (hr) Value: 72
  misc_feature: MA Experiment 20000308 PARAMETER Experiment Name: At_100mM_NaCl__P Parameter: Tissue Value: Whole Plant
  misc_feature: MA Experiment 20000308 PARAMETER Experiment Name: At_100mM_NaCl__P Parameter: Treatment Value: 100mM NaCl vs. No Treatment
  misc_feature: MA Experiment ID: 20000438 Result: Up-regulated in Transcription
  misc_feature: MA Experiment 20000438 PARAMETER Experiment Name: At_Shoots__P Parameter: Age (day) Value: 14
  misc_feature: MA Experiment 20000438 PARAMETER Experiment Name: At_Shoots__P Parameter: Tissue Value: Shoots vs. Whole Plant
  misc_feature: MA Experiment ID: 20000439 Result: Down-regulated in Transcription
  misc_feature: MA Experiment 20000439 PARAMETER Experiment Name: At_Roots__P Parameter: Age (day) Value: 14 vs. 21
  misc_feature: MA Experiment 20000439 PARAMETER Experiment Name: At_Roots__P Parameter: Organism Value: A. thaliana
  misc_feature: MA Experiment 20000439 PARAMETER Experiment Name: At_Roots__P Parameter: Tissue Value: Roots vs. Whole Plant
  misc_feature: MA Experiment ID: 20000527 Result: Up-regulated in Transcription
  misc_feature: MA Experiment 20000527 PARAMETER Experiment Name: At_10percent_PEG_P Parameter: Age (day) Value: 20
  misc_feature: MA Experiment 20000527 PARAMETER Experiment Name: At_10percent_PEG_P Parameter: Organism Value: A. thaliana
  misc_feature: MA Experiment 20000527 PARAMETER Experiment Name: At_10percent_PEG_P Parameter: Plant Line Value: WS
  misc_feature: MA Experiment 20000527 PARAMETER Experiment Name: At_10percent_PEG_P Parameter: Timepoint (day) Value: 20
  misc_feature: MA Experiment 20000527 PARAMETER Experiment Name: At_10percent_PEG_P Parameter: Tissue Value: Whole Plant
  misc_feature: MA Experiment 20000527 PARAMETER Experiment Name: At_10percent_PEG_P Parameter: Treatment Value: 10percent PEG vs. No Treatment
  misc_feature: MA Experiment ID: 20001247 Result: Up-regulated in Transcription
  misc_feature: MA Experiment 20001247 PARAMETER Experiment Name: At_Far-red-induction_P Parameter: Age (day) Value: 7
  misc_feature: MA Experiment 20001247 PARAMETER Experiment Name: At_Far-red-induction_P Parameter: Light Value: Far-red vs. White
  misc_feature: MA Experiment 20001247 PARAMETER Experiment Name: At_Far-red-induction_P Parameter: Organism Value: A. thaliana
  misc_feature: MA Experiment 20001247 PARAMETER Experiment Name: At_Far-red-induction_P Parameter: Plant Line Value: Columbia
  misc_feature: MA Experiment 20001247 PARAMETER Experiment Name: At_Far-red-induction_P Parameter: Timepoint (hr) Value: 1
  misc_feature: MA Experiment 20001247 PARAMETER Experiment Name: At_Far-red-induction_P Parameter: Tissue Value: Whole Plant
  misc_feature: MA Experiment ID: 20001248 Result: Down-regulated in Transcription
  misc_feature: MA Experiment 20001248 PARAMETER Experiment Name: At_Far-red-induction_P Parameter: Age (day) Value: 7
  misc_feature: MA Experiment 20001248 PARAMETER Experiment Name: At_Far-red-induction_P Parameter: Light Value: Far-red vs. White
  misc_feature: MA Experiment 20001248 PARAMETER Experiment Name: At_Far-red-induction_P Parameter: Organism Value: A. thaliana
  misc_feature: MA Experiment 20001248 PARAMETER Experiment Name: At_Far-red-induction_P Parameter: Plant Line Value: Columbia
  misc_feature: MA Experiment 20001248 PARAMETER Experiment Name: At_Far-red-induction_P Parameter: Timepoint (hr) Value: 4
  misc_feature: MA Experiment 20001248 PARAMETER Experiment Name: At_Far-red-induction_P Parameter: Tissue Value: Whole Plant
  misc_feature: MA Experiment ID: 20001556 Result: Down-regulated in Transcription
  misc_feature: MA Experiment 20001556 PARAMETER Experiment Name: At_Drought_Soil_Dry_P Parameter: Age (day) Value: 26
  misc_feature: MA Experiment 20001556 PARAMETER Experiment Name: At_Drought_Soil_Dry_P Parameter: Organism Value: A. thaliana
  misc_feature: MA Experiment 20001556 PARAMETER Experiment Name: At_Drought_Soil_Dry_P Parameter: Plant Line Value: WS
  misc_feature: MA Experiment 20001556 PARAMETER Experiment Name: At_Drought_Soil_Dry_P Parameter: Post Timepoint (hr) Value: None
  misc_feature: MA Experiment 20001556 PARAMETER Experiment Name: At_Drought_Soil_Dry_P Parameter: Post-Treatment Value: None
  misc_feature: MA Experiment 20001556 PARAMETER Experiment Name: At_Drought_Soil_Dry_P Parameter: Timepoint (day) Value: 12
  misc_feature: MA Experiment 20001556 PARAMETER Experiment Name: At_Drought_Soil_Dry_P Parameter: Treatment Value: Drought vs. No Drought
  misc_feature: MA Experiment ID: 20001557 Result: Down-regulated in Transcription
  misc_feature: MA Experiment 20001557 PARAMETER Experiment Name: At_Drought_Soil_Dry_P Parameter: Age (day) Value: 27
  misc_feature: MA Experiment 20001557 PARAMETER Experiment Name: At_Drought_Soil_Dry_P Parameter: Organism Value: A. thaliana
  misc_feature: MA Experiment 20001557 PARAMETER Experiment Name: At_Drought_Soil_Dry_P Parameter: Plant Line Value: WS
  misc_feature: MA Experiment 20001557 PARAMETER Experiment Name: At_Drought_Soil_Dry_P Parameter: Post Timepoint (hr) Value: 3
  misc_feature: MA Experiment 20001557 PARAMETER Experiment Name: At_Drought_Soil_Dry_P Parameter: Post-Treatment Value: Re-Water vs. No Drought
  misc_feature: MA Experiment 20001557 PARAMETER Experiment Name: At_Drought_Soil_Dry_P Parameter: Timepoint (day) Value: 13
  misc_feature: MA Experiment 20001557 PARAMETER Experiment Name: At_Drought_Soil_Dry_P Parameter: Treatment Value: Drought vs. No Drought
  misc_feature: MA Experiment ID: 20001558 Result: Down-regulated in Transcription
  misc_feature: MA Experiment 20001558 PARAMETER Experiment Name: At_Drought_Soil_Dry_P Parameter: Age (day) Value: 27
  misc_feature: MA Experiment 20001558 PARAMETER Experiment Name: At_Drought_Soil_Dry_P Parameter: Organism Value: A. thaliana
  misc_feature: MA Experiment 20001558 PARAMETER Experiment Name: At_Drought_Soil_Dry_P Parameter: Plant Line Value: WS
  misc_feature: MA Experiment 20001558 PARAMETER Experiment Name: At_Drought_Soil_Dry_P Parameter: Post Timepoint (hr) Value: 6
  misc_feature: MA Experiment 20001558 PARAMETER Experiment Name: At_Drought_Soil_Dry_P Parameter: Post-Treatment Value: Re-Water vs. No Drought
  misc_feature: MA Experiment 20001558 PARAMETER Experiment Name: At_Drought_Soil_Dry_P Parameter: Timepoint (day) Value: 13
  misc_feature: MA Experiment 20001558 PARAMETER Experiment Name: At_Drought_Soil_Dry_P Parameter: Treatment Value: Drought vs. No Drought
  misc_feature: MA Experiment ID: 20001559 Result: Down-regulated in Transcription
  misc_feature: MA Experiment 20001559 PARAMETER Experiment Name: At_Drought_Soil_Dry_P Parameter: Age (day) Value: 28
  misc_feature: MA Experiment 20001559 PARAMETER Experiment Name: At_Drought_Soil_Dry_P Parameter: Organism Value: A. thaliana
  misc_feature: MA Experiment 20001559 PARAMETER Experiment Name: At_Drought_Soil_Dry_P Parameter: Plant Line Value: WS
  misc_feature: MA Experiment 20001559 PARAMETER Experiment Name: At_Drought_Soil_Dry_P Parameter: Post Timepoint (hr) Value: 29
  misc_feature: MA Experiment 20001559 PARAMETER Experiment Name: At_Drought_Soil_Dry_P Parameter: Post-Treatment Value: Re-Water vs. No Drought
  misc_feature: MA Experiment 20001559 PARAMETER Experiment Name: At_Drought_Soil_Dry_P Parameter: Timepoint (day) Value: 14
  misc_feature: MA Experiment 20001559 PARAMETER Experiment Name: At_Drought_Soil_Dry_P Parameter: Treatment Value: Drought vs. No Drought
  misc_feature: MA Experiment ID: 20001560 Result: Down-regulated in Transcription
  misc_feature: MA Experiment 20001560 PARAMETER Experiment Name: At_Drought_Soil_Dry_P Parameter: Age (day) Value: 28
  misc_feature: MA Experiment 20001560 PARAMETER Experiment Name: At_Drought_Soil_Dry_P Parameter: Organism Value: A. thaliana
  misc_feature: MA Experiment 20001560 PARAMETER Experiment Name: At_Drought_Soil_Dry_P Parameter: Plant Line Value: WS
  misc_feature: MA Experiment 20001560 PARAMETER Experiment Name: At_Drought_Soil_Dry_P Parameter: Post Timepoint (hr) Value: None
  misc_feature: MA Experiment 20001560 PARAMETER Experiment Name: At_Drought_Soil_Dry_P Parameter: Post-Treatment Value: None
  misc_feature: MA Experiment 20001560 PARAMETER Experiment Name: At_Drought_Soil_Dry_P Parameter: Timepoint (day) Value: 14
  misc_feature: MA Experiment 20001560 PARAMETER Experiment Name: At_Drought_Soil_Dry_P Parameter: Treatment Value: Drought vs. No Drought
  misc_feature: MA Experiment ID: 20001757 Result: Up-regulated in Transcription
  misc_feature: MA Experiment 20001757 PARAMETER Experiment Name: At_50mM_NH4NO3_L-to-H_P Parameter: Timepoint (hr) Value: 6
  misc_feature: MA Experiment 20001757 PARAMETER Experiment Name: At_50mM_NH4NO3_L-to-H_P Parameter: Tissue Value: Leaf
  misc_feature: MA Experiment 20001757 PARAMETER Experiment Name: At_50mM_NH4NO3_L-to-H_P Parameter: Treatment Value: 50mM NH4NO3 vs 100mM Mannitol
  misc_feature: MA Experiment ID: 20001904 Result: Down-regulated in Transcription
  misc_feature: MA Experiment 20001904 PARAMETER Experiment Name: At_Drought_Reproduction_P Parameter: Age (day) Value: 37
  misc_feature: MA Experiment 20001904 PARAMETER Experiment Name: At_Drought_Reproduction_P Parameter: Organism Value: A. thaliana
  misc_feature: MA Experiment 20001904 PARAMETER Experiment Name: At_Drought_Reproduction_P Parameter: Plant Line Value: WS
  misc_feature: MA Experiment 20001904 PARAMETER Experiment Name: At_Drought_Reproduction_P Parameter: Timepoint (day) Value: 7
  misc_feature: MA Experiment 20001904 PARAMETER Experiment Name: At_Drought_Reproduction_P Parameter: Tissue Value: Rosettes
  misc_feature: MA Experiment 20001904 PARAMETER Experiment Name: At_Drought_Reproduction_P Parameter: Treatment Value: Drought vs. No Drought
  misc_feature: MA Experiment ID: 20001905 Result: Down-regulated in Transcription
  misc_feature: MA Experiment 20001905 PARAMETER Experiment Name: At_Drought_Reproduction_P Parameter: Age (day) Value: 40
  misc_feature: MA Experiment 20001905 PARAMETER Experiment Name: At_Drought_Reproduction_P Parameter: Organism Value: A. thaliana
  misc_feature: MA Experiment 20001905 PARAMETER Experiment Name: At_Drought_Reproduction_P Parameter: Plant Line Value: WS
  misc_feature: MA Experiment 20001905 PARAMETER Experiment Name: At_Drought_Reproduction_P Parameter: Timepoint (day) Value: 10
  misc_feature: MA Experiment 20001905 PARAMETER Experiment Name: At_Drought_Reproduction_P Parameter: Tissue Value: Rosettes
  misc_feature: MA Experiment 20001905 PARAMETER Experiment Name: At_Drought_Reproduction_P Parameter: Treatment Value: Drought vs. No Drought
agtgtgagtaatttaggacgaacataaactcgtctccggtaaccaaaaatggtttccatgactacttcatcttcttcgtacggaacattctctacagtcttcaacagttctagacctaattcctcagcaacctttctcgtcccttccttgaaattctccaccggaatatcgaatttcgcgaatctgagtaatgggttttctctaaaatctccaattaatcctgggtttctcttcaagtctcgtcctttcactgtccaagctagagctgctgcagaaaaaaccgttcacgatttcaccgttaaggacattgatgggaaggatgttgctttgaacaaattcaaggggaaagttatgttgattgtcaatgttgcttcaagatgtggtttgacatcatcaaattactcagagctttcacatctgtacgagaaatacaaaactcaaggatttgagattctagcttttccctgcaatcagtttggtttccaagagcccgggtcaaactccgagatcaaacaattcgcttgcacccggtttaaagcagagttccctatatttgataaggttgacgtgaatggaccaagcacagcgccgatctacgagttcttgaaatcaaacgcaggaggattcttgggtggtctcattaaatggaactttgagaagttcttgattgataaaaagggaaaggtcgttgagaggtaccctcccaccacatcccctttccaaatcgagaaagacatccagaagttgcttgccgagcttaaaaacttttgctcatgagtgagcatatagagactgatggttaaagtaaccgtaaattgtgacataaagtttccggttattgcttgtataccttcttacattctaagttgtactaatcgcttaataatttgcgtataatggtaatgttatatctaaattactcacactg

SEQ ID NO: 76337 - protein, 242 aa, Arabidopsis thaliana
  peptide (1)..(242): Ceres Seq. ID no. 7107602
  misc_feature (78)..(187): Pfam Name: Glutathione peroxidase Pfam Description: Glutathione peroxidase
  misc_feature (1)..(242): Homolog of NCBI NO: 2129599 NR Description: glutathione peroxidase (EC 1.11.1.9) precursor - thaliana >gi|1061036|emb|CAA61965.1| glutathione peroxidase
  misc_feature (1)..(235): Homolog of NCBI NO: 15224678 NR Description: glutathione peroxidase, putative; protein id: supported by cDNA: gi_14334959, supported by cDNA: gi_17104618 thaliana] >gi|20141398|sp|P52032|GSHY_ARATH Phospholipid
  misc_feature (10)..(235): Homolog of NCBI NO: 22329066 NR Description: glutathione peroxidase, putative; protein id:
  misc_feature (10)..(233): Homolog of NCBI NO: 7433114 NR Description: glutathione peroxidase (EC 1.11.1.9) F11C18.70 -
  misc_feature (7)..(234): Homolog of NCBI NO: 20147455 NR Description: glutathione peroxidase [Brassica napus]
  misc_feature (7)..(234): Homolog of NCBI NO: 40388501 NR Description: GPx [Brassica oleracea var. botrytis]
  misc_feature (22)..(235): Homolog of NCBI NO: 2982362 NR Description: glutathione peroxidase [Zantedeschia aethiopica]
  misc_feature (1)..(235): Homolog of NCBI NO: 20138099 NR Description: Phospholipid hydroperoxide glutathione chloroplast precursor (PHGPx) >gi|7433115|pir||T06462 glutathione
  misc_feature (71)..(234): Homolog of NCBI NO: 21360380 NR Description: glutathione peroxidase 1 [Oryza sativa]
  misc_feature (21)..(235): Homolog of NCBI NO: 6179600 NR Description: GPX12Hv, glutathione peroxidase-like protein
MVSMTTSSSSYGTFSTVFNSSRPNSSATFLVPSLKFSTGISNFANLSNGFSLKSPINPGFLFKSRPFTVQARAAAEKTVHDFTVKDIDGKDVALNKFKGKVMLIVNVASRCGLTSSNYSELSHLYEKYKTQGFEILAFPCNQFGFQEPGSNSEIKQFACTRFKAEFPIFDKVDVNGPSTAPIYEFLKSNAGGFLGGLIKWNFEKFLIDKKGKVVERYPPTTSPFQIEKDIQKLLAELKNFCS

SEQ ID NO: 76338 - protein, 239 aa, Arabidopsis thaliana
  peptide (1)..(239): Ceres Seq. ID no. 7107603
  misc_feature (75)..(184): Pfam Name: Glutathione peroxidase Pfam Description: Glutathione peroxidase
  misc_feature (1)..(239): Homolog of NCBI NO: 2129599 NR Description: glutathione peroxidase (EC 1.11.1.9) precursor - thaliana >gi|1061036|emb|CAA61965.1| glutathione peroxidase
  misc_feature (1)..(232): Homolog of NCBI NO: 15224678 NR Description: glutathione peroxidase, putative; protein id: supported by cDNA: gi_14334959, supported by cDNA: gi_17104618 thaliana] >gi|20141398|sp|P52032|GSHY_ARATH Phospholipid
  misc_feature (7)..(232): Homolog of NCBI NO: 22329066 NR Description: glutathione peroxidase, putative; protein id:
  misc_feature (7)..(230): Homolog of NCBI NO: 7433114 NR Description: glutathione peroxidase (EC 1.11.1.9) F11C18.70 -
  misc_feature (4)..(231): Homolog of NCBI NO: 20147455 NR Description: glutathione peroxidase [Brassica napus]
  misc_feature (4)..(231): Homolog of NCBI NO: 40388501 NR Description: GPx [Brassica oleracea var. botrytis]
  misc_feature (19)..(232): Homolog of NCBI NO: 2982362 NR Description: glutathione peroxidase [Zantedeschia aethiopica]
  misc_feature (1)..(232): Homolog of NCBI NO: 20138099 NR Description: Phospholipid hydroperoxide glutathione chloroplast precursor (PHGPx) >gi|7433115|pir||T06462 glutathione
  misc_feature (68)..(231): Homolog of NCBI NO: 21360380 NR Description: glutathione peroxidase 1 [Oryza sativa]
  misc_feature (18)..(232): Homolog of NCBI NO: 6179600 NR Description: GPX12Hv, glutathione peroxidase-like protein
MTTSSSSYGTFSTVFNSSRPNSSATFLVPSLKFSTGISNFANLSNGFSLKSPINPGFLFKSRPFTVQARAAAEKTVHDFTVKDIDGKDVALNKFKGKVMLIVNVASRCGLTSSNYSELSHLYEKYKTQGFEILAFPCNQFGFQEPGSNSEIKQFACTRFKAEFPIFDKVDVNGPSTAPIYEFLKSNAGGFLGGLIKWNFEKFLIDKKGKVVERYPPTTSPFQIEKDIQKLLAELKNFCS

SEQ ID NO: 76339 - protein, 141 aa, Arabidopsis thaliana
  peptide (1)..(141): Ceres Seq. ID no. 7107604
  misc_feature (1)..(86): Pfam Name: Glutathione peroxidase Pfam Description: Glutathione peroxidase
  misc_feature (1)..(141): Homolog of NCBI NO: 2129599 NR Description: glutathione peroxidase (EC 1.11.1.9) precursor - thaliana >gi|1061036|emb|CAA61965.1| glutathione peroxidase
  misc_feature (1)..(134): Homolog of NCBI NO: 15224678 NR Description: glutathione peroxidase, putative; protein id: supported by cDNA: gi_14334959, supported by cDNA: gi_17104618 thaliana] >gi|20141398|sp|P52032|GSHY_ARATH Phospholipid
  misc_feature (1)..(134): Homolog of NCBI NO: 22329066 NR Description: glutathione peroxidase, putative; protein id:
  misc_feature (1)..(132): Homolog of NCBI NO: 7433114 NR Description: glutathione peroxidase (EC 1.11.1.9) F11C18.70 -
  misc_feature (1)..(133): Homolog of NCBI NO: 20147455 NR Description: glutathione peroxidase [Brassica napus]
  misc_feature (1)..(133): Homolog of NCBI NO: 40388501 NR Description: GPx [Brassica oleracea var. botrytis]
  misc_feature (1)..(134): Homolog of NCBI NO: 2982362 NR Description: glutathione peroxidase [Zantedeschia aethiopica]
  misc_feature (1)..(134): Homolog of NCBI NO: 20138099 NR Description: Phospholipid hydroperoxide glutathione chloroplast precursor (PHGPx) >gi|7433115|pir||T06462 glutathione
  misc_feature (1)..(133): Homolog of NCBI NO: 21360380 NR Description: glutathione peroxidase 1 [Oryza sativa]
  misc_feature (1)..(134): Homolog of NCBI NO: 6179600 NR Description: GPX12Hv, glutathione peroxidase-like protein
MLIVNVASRCGLTSSNYSELSHLYEKYKTQGFEILAFPCNQFGFQEPGSNSEIKQFACTRFKAEFPIFDKVDVNGPSTAPIYEFLKSNAGGFLGGLIKWNFEKFLIDKKGKVVERYPPTTSPFQIEKDIQKLLAELKNFCS

SEQ ID NO: 76340 - DNA, 1029 bp, Arabidopsis thaliana
  misc_feature (1)..(1029): Ceres Seq. ID no. 7107633
  misc_feature: MA Experiment ID: 108434 Result: Up-regulated in Transcription
  misc_feature: MA Experiment 108434 PARAMETER Experiment Name: At_Root_Tips_cDNA_P Parameter: Tissue Value: Root Tips
  misc_feature: MA Experiment ID: 108461 Result: Up-regulated in Transcription
  misc_feature: MA Experiment 108461 PARAMETER Experiment Name: At_Germinating_Seeds_cDNA_P Parameter: Age (day) Value: 1 vs. 0
  misc_feature: MA Experiment 108461 PARAMETER Experiment Name: At_Germinating_Seeds_cDNA_P Parameter: Tissue Value: Germinating Seeds
  misc_feature: MA Experiment ID: 108489 Result: Down-regulated in Transcription
  misc_feature: MA Experiment ID: 20000179 Result: Up-regulated in Transcription
  misc_feature: MA Experiment 20000179 PARAMETER Experiment Name: At_Germinating_Seeds_P Parameter: Age (hr) Value: 6 vs. 0
  misc_feature: MA Experiment 20000179 PARAMETER Experiment Name: At_Germinating_Seeds_P Parameter: Tissue Value: Germinating Seeds
  misc_feature: MA Experiment ID: 20000180 Result: Up-regulated in Transcription
  misc_feature: MA Experiment 20000180 PARAMETER Experiment Name: At_Germinating_Seeds_P Parameter: Age (hr) Value: 24 vs. 0
  misc_feature: MA Experiment 20000180 PARAMETER Experiment Name: At_Germinating_Seeds_P Parameter: Tissue Value: Germinating Seeds
  misc_feature: MA Experiment ID: 20000184 Result: Down-regulated in Transcription
  misc_feature: MA Experiment 20000184 PARAMETER Experiment Name: At_Shoots__P Parameter: Age (day) Value: 7
  misc_feature: MA Experiment 20000184 PARAMETER Experiment Name: At_Shoots__P Parameter: Tissue Value: Shoots vs. Whole Plant
  misc_feature: MA Experiment ID: 20000227 Result: Up-regulated in Transcription
  misc_feature: MA Experiment 20000227 PARAMETER Experiment Name: At_Root-Tips-vs-Tops_P Parameter: Tissue Value: Root Tips vs. Root Tops
  misc_feature: MA Experiment ID: 20000495 Result: Up-regulated in Transcription
  misc_feature: MA Experiment 20000495 PARAMETER Experiment Name: At_Guard_Cells_P Parameter: Harvest Date Value: 8/2/2002
  misc_feature: MA Experiment 20000495 PARAMETER Experiment Name: At_Guard_Cells_P Parameter: Organism Value: A. thaliana
  misc_feature: MA Experiment 20000495 PARAMETER Experiment Name: At_Guard_Cells_P Parameter: Tissue Value: Guard Cells vs. Leaves
  misc_feature: MA Experiment ID: 20000709 Result: Down-regulated in Transcription
  misc_feature: MA Experiment 20000709 PARAMETER Experiment Name: At_15mM_NH4NO3_L-to-H_P Parameter: Age (hr) Value: 14
  misc_feature: MA Experiment 20000709 PARAMETER Experiment Name: At_15mM_NH4NO3_L-to-H_P Parameter: Organism Value: A. thaliana
  misc_feature: MA Experiment 20000709 PARAMETER Experiment Name: At_15mM_NH4NO3_L-to-H_P Parameter: Plant Line Value: WS
  misc_feature: MA Experiment 20000709 PARAMETER Experiment Name: At_15mM_NH4NO3_L-to-H_P Parameter: Timepoint (hr) Value: 4
  misc_feature: MA Experiment 20000709 PARAMETER Experiment Name: At_15mM_NH4NO3_L-to-H_P Parameter: Tissue Value: Aerial
  misc_feature: MA Experiment 20000709 PARAMETER Experiment Name: At_15mM_NH4NO3_L-to-H_P Parameter: Treatment Value: 15mM NH4NO3 vs. 30mM Mannitol
  misc_feature: MA Experiment ID: 20001557 Result: Down-regulated in Transcription
  misc_feature: MA Experiment 20001557 PARAMETER Experiment Name: At_Drought_Soil_Dry_P Parameter: Age (day) Value: 27
  misc_feature: MA Experiment 20001557 PARAMETER Experiment Name: At_Drought_Soil_Dry_P Parameter: Organism Value: A. thaliana
  misc_feature: MA Experiment 20001557 PARAMETER Experiment Name: At_Drought_Soil_Dry_P Parameter: Plant Line Value: WS
  misc_feature: MA Experiment 20001557 PARAMETER Experiment Name: At_Drought_Soil_Dry_P Parameter: Post Timepoint (hr) Value: 3
  misc_feature: MA Experiment 20001557 PARAMETER Experiment Name: At_Drought_Soil_Dry_P Parameter: Post-Treatment Value: Re-Water vs. No Drought
  misc_feature: MA Experiment 20001557 PARAMETER Experiment Name: At_Drought_Soil_Dry_P Parameter: Timepoint (day) Value: 13
  misc_feature: MA Experiment 20001557 PARAMETER Experiment Name: At_Drought_Soil_Dry_P Parameter: Treatment Value: Drought vs. No Drought
  misc_feature: MA Experiment ID: 20001558 Result: Down-regulated in Transcription
  misc_feature: MA Experiment 20001558 PARAMETER Experiment Name: At_Drought_Soil_Dry_P Parameter: Age (day) Value: 27
  misc_feature: MA Experiment 20001558 PARAMETER Experiment Name: At_Drought_Soil_Dry_P Parameter: Organism Value: A. thaliana
  misc_feature: MA Experiment 20001558 PARAMETER Experiment Name: At_Drought_Soil_Dry_P Parameter: Plant Line Value: WS
  misc_feature: MA Experiment 20001558 PARAMETER Experiment Name: At_Drought_Soil_Dry_P Parameter: Post Timepoint (hr) Value: 6
  misc_feature: MA Experiment 20001558 PARAMETER Experiment Name: At_Drought_Soil_Dry_P Parameter: Post-Treatment Value: Re-Water vs. No Drought
  misc_feature: MA Experiment 20001558 PARAMETER Experiment Name: At_Drought_Soil_Dry_P Parameter: Timepoint (day) Value: 13
  misc_feature: MA Experiment 20001558 PARAMETER Experiment Name: At_Drought_Soil_Dry_P Parameter: Treatment Value: Drought vs. No Drought
  misc_feature: MA Experiment ID: 20001905 Result: Down-regulated in Transcription
  misc_feature: MA Experiment 20001905 PARAMETER Experiment Name: At_Drought_Reproduction_P Parameter: Age (day) Value: 40
  misc_feature: MA Experiment 20001905 PARAMETER Experiment Name: At_Drought_Reproduction_P Parameter: Organism Value: A. thaliana
  misc_feature: MA Experiment 20001905 PARAMETER Experiment Name: At_Drought_Reproduction_P Parameter: Plant Line Value: WS
  misc_feature: MA Experiment 20001905 PARAMETER Experiment Name: At_Drought_Reproduction_P Parameter: Timepoint (day) Value: 10
  misc_feature: MA Experiment 20001905 PARAMETER Experiment Name: At_Drought_Reproduction_P Parameter: Tissue Value: Rosettes
  misc_feature: MA Experiment 20001905 PARAMETER Experiment Name: At_Drought_Reproduction_P Parameter: Treatment Value: Drought vs. No Drought
agtgtgagtaatttaggaagattcgagtctctcggaaatggcatcacacgaccaccctcatcatcatcacgatcatgagcatgaccacgagaaatcagacggcggagaagggaaggcgtcgtgggtggggaaggacgggaaggtgtaccatagccacgatggactcgcacctcactcacacgaacccatctactctcctggctacttcagtcgccgagctcctccgcttcacgaccgtaacttctctgagagagcttttaccgtcggtattggcggtcccgttggcactgggaaaacggcattgatgcttgctctttgtagattcttgagggacaaatatagtcttgctgctgtgacaaatgatatattcacgaaagaggatggtgagtttctggtgaagaatggggctcctcctgaggaaaggattagagctgttgaaacaggtggatgtccacacgctgctatccgtgaagatatcagtatcaatttgggtcctcttgaggagttatctaacttattcaaggctgatttgcttctttgtgaatccggtggagataatttagctgctaatttcagtagagaactagctgactatatcatctacatcatcgatgtatcggctggtgataaaataccccgtaaaggcggccctggaatcactcaagctgatcttctggtgataaacaagactgaccttgcagcagctgttggggctgacttatcggtcatggaaagggattcactacgcatgcgtgatggagggccatttgtctttgctcaggtgaagcatgggcttggagtcgaggaaatcgtgaaccatgtcatgcactcatgggaacatgcgaccgggaagaagcgccagtgatgatggggttcttaagacccaaaatggataagatatgaaactgaatggaactctttcaatacttatcttgaactcaatttatgcgcaaaagtctatgtaatctgtttgttgtactcaagacataagagaaataaaaggtttgagcatgagactcattacattct

SEQ ID NO: 76341 - protein, 275 aa, Arabidopsis thaliana
  peptide (1)..(275): Ceres Seq. ID no. 7107634
  misc_feature (63)..(199): Pfam Name: HypB/UreG nucleotide-binding domain Pfam Description: HypB/UreG nucleotide-binding domain
  misc_feature (1)..(275): Homolog of NCBI NO: 25313831 NR Description: urease accessory protein UREG [imported] - thaliana >gi|4324678|gb|AAD16984.1| urease accessory protein UREG
  misc_feature (1)..(275): Homolog of NCBI NO: 15226754 NR Description: putative urease accessory protein; protein id: supported by cDNA: 18513. [Arabidopsis thaliana]
  misc_feature (4)..(275): Homolog of NCBI NO: 13161912 NR Description: urease accessory protein G [Solanum tuberosum]
  misc_feature (1)..(275): Homolog of NCBI NO: 13161906 NR Description: urease accessory protein G [Solanum tuberosum]
  misc_feature (1)..(275): Homolog of NCBI NO: 13161910 NR Description: urease accessory protein G [Solanum tuberosum]
  misc_feature (4)..(275): Homolog of NCBI NO: 13161908 NR Description: urease accessory protein G [Solanum tuberosum]
  misc_feature (1)..(275): Homolog of NCBI NO: 13161904 NR Description: urease accessory protein G [Solanum tuberosum]
MASHDHPHHHHDHEHDHEKSDGGEGKASWVGKDGKVYHSHDGLAPHSHEPIYSPGYFSRRAPPLHDRNFSERAFTVGIGGPVGTGKTALMLALCRFLRDKYSLAAVTNDIFTKEDGEFLVKNGAPPEERIRAVETGGCPHAAIREDISINLGPLEELSNLFKADLLLCESGGDNLAANFSRELADYIIYIIDVSAGDKIPRKGGPGITQADLLVINKTDLAAAVGADLSVMERDSLRMRDGGPFVFAQVKHGLGVEEIVNHVMHSWEHATGKKRQ

SEQ ID NO: 76342 - protein, 186 aa, Arabidopsis thaliana
  peptide (1)..(186): Ceres Seq. ID no. 7107635
  misc_feature (1)..(110): Pfam Name: HypB/UreG nucleotide-binding domain Pfam Description: HypB/UreG nucleotide-binding domain
  misc_feature (1)..(186): Homolog of NCBI NO: 25313831 NR Description: urease accessory protein UREG [imported] - thaliana >gi|4324678|gb|AAD16984.1| urease accessory protein UREG
  misc_feature (1)..(186): Homolog of NCBI NO: 15226754 NR Description: putative urease accessory protein; protein id: supported by cDNA: 18513. [Arabidopsis thaliana]
  misc_feature (1)..(186): Homolog of NCBI NO: 13161912 NR Description: urease accessory protein G [Solanum tuberosum]
  misc_feature (1)..(186): Homolog of NCBI NO: 13161906 NR Description: urease accessory protein G [Solanum tuberosum]
  misc_feature (1)..(186): Homolog of NCBI NO: 13161910 NR Description: urease accessory protein G [Solanum tuberosum]
  misc_feature (1)..(186): Homolog of NCBI NO: 13161908 NR Description: urease accessory protein G [Solanum tuberosum]
  misc_feature (1)..(186): Homolog of NCBI NO: 13161904 NR Description: urease accessory protein G [Solanum tuberosum]
MLALCRFLRDKYSLAAVTNDIFTKEDGEFLVKNGAPPEERIRAVETGGCPHAAIREDISINLGPLEELSNLFKADLLLCESGGDNLAANFSRELADYIIYIIDVSAGDKIPRKGGPGITQADLLVINKTDLAAAVGADLSVMERDSLRMRDGGPFVFAQVKHGLGVEEIVNHVMHSWEHATGKKRQ

SEQ ID NO: 76343 - DNA, 738 bp, Arabidopsis thaliana
  misc_feature (1)..(738): Ceres Seq. ID no. 7107636
  misc_feature: MA Experiment ID: 108595 Result: Down-regulated in Transcription
  misc_feature: MA Experiment 108595 PARAMETER Experiment Name: At_Ler-pi_Ovule_cDNA_P Parameter: Plant Line Value: null
ccacgcgtccgaacacacaagactccattattctcctgcttcttcgtctcttcaattattttctctgagactagctttgattcaaccatggctaatgcagcatcaggaatggcagtccatgatgactgcaagctgaaatttatggaattgaagacgaaaaggacacaccgtttcatcatttacaagattgaggagctgcagaaacaagtgattgttgagaaaatcggtgaaccgggtcaaacccatgaggaccttgctgcaagtcttccagctgatgaatgccgctatgccattttcgattttgattttgtcagttctgagggtgtcccaaggagcaggatttttttcgtggcatggtctccggacacagcaagagtgagaagcaagatgatctatgcgagctccaaggacaggttcaagagagaactagacggaattcaggtcgagcttcaggcaaccgatccaaccgagatggatcttgatgttttcaaaagccgagccaattgatgaaagaaatcccctgaaaatttcggttgaatcaaactttttcggactattacctcagtgatgctttttcctaaagtttcgtgacggtaccaacctgaacagcttcattttatcagtttggtctttgtctttgtctttggtctcctttttgggtccttatagtgttgtcttaaaacttaaggaatctggcttgtgctctttaccattgtggaagaaatcgaaccctttatt

SEQ ID NO: 76344 - protein, 168 aa, Arabidopsis thaliana
  peptide (1)..(168): Ceres Seq. ID no. 7107637
  misc_feature (41)..(168): Pfam Name: Cofilin/tropomyosin-type actin-binding protein Pfam Description: Cofilin/tropomyosin-type actin-binding protein
  misc_feature (30)..(168): Homolog of NCBI NO: 30697295 NR Description: actin depolymerizing factor 3 - like protein
  misc_feature (30)..(168): Homolog of NCBI NO: 15231309 NR Description: actin depolymerizing factor 1 (ADF1); protein id: supported by cDNA: 1907., supported by cDNA: gi_1408470, by cDNA: gi_14334961 [Arabidopsis thaliana]
  misc_feature (30)..(168): Homolog of NCBI NO: 30697300 NR Description: actin depolymerizing factor 4 - like protein
  misc_feature (30)..(168): Homolog of NCBI NO: 4185511 NR Description: actin depolymerizing factor 4 [Arabidopsis
  misc_feature (30)..(168): Homolog of NCBI NO: 30697298 NR Description: actin depolymerizing factor 3 - like protein
  misc_feature (30)..(167): Homolog of NCBI NO: 17366765 NR Description: Actin-depolymerizing factor 2 (ADF 2)
  misc_feature (30)..(168): Homolog of NCBI NO: 17366768 NR Description: Actin-depolymerizing factor 1 (ADF 1)
  misc_feature (30)..(168): Homolog of NCBI NO: 38564721 NR Description: putative actin-depolymerizing factor 2
  misc_feature (30)..(168): Homolog of NCBI NO: 18408116 NR Description: actin depolymerizing factor 2 (ADF2); protein id: supported by cDNA: 99657., supported by cDNA: gi_13877562, by cDNA: gi_1408472, supported by cDNA: gi_14423375 [Arabidopsis
  misc_feature (37)..(168): Homolog of NCBI NO: 30697303 NR Description: actin depolymerizing factor 4 - like protein thaliana] >gi|15215859|gb|AAK91473.1| AT5g59890/mmn10_110 thaliana] >gi|19699262|gb|AAL90997.1| At1g05180/YUP8H12_21
PRVRTHKTPLFSCFFVSSIIFSETSFDSTMANAASGMAVHDDCKLKFMELKTKRTHRFIIYKIEELQKQVIVEKIGEPGQTHEDLAASLPADECRYAIFDFDFVSSEGVPRSRIFFVAWSPDTARVRSKMIYASSKDRFKRELDGIQVELQATDPTEMDLDVFKSRAN

SEQ ID NO: 76345 - protein, 139 aa, Arabidopsis thaliana; identical to SEQ ID NO: 34902
  peptide (1)..(139): Ceres Seq. ID no. 7107638
  misc_feature (12)..(139): Pfam Name: Cofilin/tropomyosin-type actin-binding protein Pfam Description: Cofilin/tropomyosin-type actin-binding protein
  misc_feature (1)..(139): Homolog of NCBI NO: 30697295 NR Description: actin depolymerizing factor 3 - like protein
  misc_feature (1)..(139): Homolog of NCBI NO: 15231309 NR Description: actin depolymerizing factor 1 (ADF1); protein id: supported by cDNA: 1907., supported by cDNA: gi_1408470, by cDNA: gi_14334961 [Arabidopsis thaliana]
  misc_feature (1)..(139): Homolog of NCBI NO: 30697300 NR Description: actin depolymerizing factor 4 - like protein
  misc_feature (1)..(139): Homolog of NCBI NO: 4185511 NR Description: actin depolymerizing factor 4 [Arabidopsis
  misc_feature (1)..(139): Homolog of NCBI NO: 30697298 NR Description: actin depolymerizing factor 3 - like protein
  misc_feature (1)..(138): Homolog of NCBI NO: 17366765 NR Description: Actin-depolymerizing factor 2 (ADF 2)
  misc_feature (1)..(139): Homolog of NCBI NO: 17366768 NR Description: Actin-depolymerizing factor 1 (ADF 1)
  misc_feature (1)..(139): Homolog of NCBI NO: 38564721 NR Description: putative actin-depolymerizing factor 2
  misc_feature (1)..(139): Homolog of NCBI NO: 18408116 NR Description: actin depolymerizing factor 2 (ADF2); protein id: supported by cDNA: 99657., supported by cDNA: gi_13877562, by cDNA: gi_1408472, supported by cDNA: gi_14423375 [Arabidopsis
  misc_feature (8)..(139): Homolog of NCBI NO: 30697303 NR Description: actin depolymerizing factor 4 - like protein thaliana] >gi|15215859|gb|AAK91473.1| AT5g59890/mmn10_110 thaliana] >gi|19699262|gb|AAL90997.1| At1g05180/YUP8H12_21

SEQ ID NO: 76346 - protein, 132 aa, Arabidopsis thaliana; identical to SEQ ID NO: 34903
  peptide (1)..(132): Ceres Seq. ID no. 7107639
  misc_feature (5)..(132): Pfam Name: Cofilin/tropomyosin-type actin-binding protein Pfam Description: Cofilin/tropomyosin-type actin-binding protein
  misc_feature (1)..(132): Homolog of NCBI NO: 30697295 NR Description: actin depolymerizing factor 3 - like protein
  misc_feature (1)..(132): Homolog of NCBI NO: 15231309 NR Description: actin depolymerizing factor 1 (ADF1); protein id: supported by cDNA: 1907., supported by cDNA: gi_1408470, by cDNA: gi_14334961 [Arabidopsis thaliana]
  misc_feature (1)..(132): Homolog of NCBI NO: 30697300 NR Description: actin depolymerizing factor 4 - like protein
  misc_feature (1)..(132): Homolog of NCBI NO: 4185511 NR Description: actin depolymerizing factor 4 [Arabidopsis
  misc_feature (1)..(132): Homolog of NCBI NO: 30697298 NR Description: actin depolymerizing factor 3 - like protein
  misc_feature (1)..(131): Homolog of NCBI NO: 17366765 NR Description: Actin-depolymerizing factor 2 (ADF 2)
  misc_feature (1)..(132): Homolog of NCBI NO: 17366768 NR Description: Actin-depolymerizing factor 1 (ADF 1)
  misc_feature (1)..(132): Homolog of NCBI NO: 38564721 NR Description: putative actin-depolymerizing factor 2
  misc_feature (1)..(132): Homolog of NCBI NO: 18408116 NR Description: actin depolymerizing factor 2 (ADF2); protein id: supported by cDNA: 99657., supported by cDNA: gi_13877562, by cDNA: gi_1408472, supported by cDNA: gi_14423375 [Arabidopsis
  misc_feature (1)..(132): Homolog of NCBI NO: 30697303 NR Description: actin depolymerizing factor 4 - like protein thaliana] >gi|15215859|gb|AAK91473.1| AT5g59890/mmn10_110 thaliana] >gi|19699262|gb|AAL90997.1| At1g05180/YUP8H12_21

SEQ ID NO: 76347 - DNA, 2208 bp, Arabidopsis thaliana
  misc_feature (1)..(2208): Ceres Seq. ID no. 7107644
  misc_feature: MA Experiment ID: 20000184 Result: Down-regulated in Transcription
  misc_feature: MA Experiment 20000184 PARAMETER Experiment Name: At_Shoots__P Parameter: Age (day) Value: 7
  misc_feature: MA Experiment 20000184 PARAMETER Experiment Name: At_Shoots__P Parameter: Tissue Value: Shoots vs. Whole Plant
  misc_feature: MA Experiment ID: 20000227 Result: Up-regulated in Transcription
  misc_feature: MA Experiment 20000227 PARAMETER Experiment Name: At_Root-Tips-vs-Tops_P Parameter: Tissue Value: Root Tips vs. Root Tops
  misc_feature: MA Experiment ID: 20000495 Result: Down-regulated in Transcription
  misc_feature: MA Experiment 20000495 PARAMETER Experiment Name: At_Guard_Cells_P Parameter: Harvest Date Value: 8/2/2002
  misc_feature: MA Experiment 20000495 PARAMETER Experiment Name: At_Guard_Cells_P Parameter: Organism Value: A. thaliana
  misc_feature: MA Experiment 20000495 PARAMETER Experiment Name: At_Guard_Cells_P Parameter: Tissue Value: Guard Cells vs. Leaves
  misc_feature: MA Experiment ID: 20001247 Result: Up-regulated in Transcription
  misc_feature: MA Experiment 20001247 PARAMETER Experiment Name: At_Far-red-induction_P Parameter: Age (day) Value: 7
  misc_feature: MA Experiment 20001247 PARAMETER Experiment Name: At_Far-red-induction_P Parameter: Light Value: Far-red vs. White
  misc_feature: MA Experiment 20001247 PARAMETER Experiment Name: At_Far-red-induction_P Parameter: Organism Value: A. thaliana
  misc_feature: MA Experiment 20001247 PARAMETER Experiment Name: At_Far-red-induction_P Parameter: Plant Line Value: Columbia
  misc_feature: MA Experiment 20001247 PARAMETER Experiment Name: At_Far-red-induction_P Parameter: Timepoint (hr) Value: 1
  misc_feature: MA Experiment 20001247 PARAMETER Experiment Name: At_Far-red-induction_P Parameter: Tissue Value: Whole Plant
  misc_feature: MA Experiment ID: 20001451 Result: Down-regulated in Transcription
  misc_feature: MA Experiment 20001451 PARAMETER Experiment Name: At_Far-red-induction_P Parameter: Age (day) Value: 7
  misc_feature: MA Experiment 20001451 PARAMETER Experiment Name: At_Far-red-induction_P Parameter: Light Value: Far-red vs. White
  misc_feature: MA Experiment 20001451 PARAMETER Experiment Name: At_Far-red-induction_P Parameter: Organism Value: A. thaliana
  misc_feature: MA Experiment 20001451 PARAMETER Experiment Name: At_Far-red-induction_P Parameter: Plant Line Value: Columbia
  misc_feature: MA Experiment 20001451 PARAMETER Experiment Name: At_Far-red-induction_P Parameter: Timepoint (hr) Value: 24
  misc_feature: MA Experiment 20001451 PARAMETER Experiment Name: At_Far-red-induction_P Parameter: Tissue Value: Whole Plant
agagagagagagagagagagagagagagaggatctacctatagaggtggaaactgcagaatcagctccgaaaaacctcgagttctatattgatgaagaagactgtcatttgattccagttgaattctataaaccgagtgaagaagttcgagagatttccgacattaacggagattttatcctcgatttcggcgttgagcatgatttcacggcggcggcggagacggaggaaatctccgactttgcttcgccgggtgaatcgaaaccggaggatgcagagacgaatctagttgcttcggaaatggaaaacgacgacgaagaaacagacgcagaggtttctataggtacagagattcctgatcatgagcaaatcggagatattccttctcaccagctcattcctcaccacgatgacgatgatcatgaggaggaaacgttggagttcaaaacagtaacgattgaaaccaagatgccagtcttaaacatcaacgaagagcggattttagaagctcaaggctcgatggaaagctcgcatagtagtctacataacgctatgtttcacttagagcaaagagtatctgttgatggtattgaatgtcctgaaggagtactcactgttgataagttgaagtttgagttacaagaagagagaaaagcacttcacgcgttatacgaggagctggaggtagagaggaatgcgtctgctgttgctgccagtgaaacaatggcgatgatcaataggttgcatgaggagaaagctgcgatgcagatggaagcgttgcagtatcagagaatgatggaggagcaagctgagtttgatcaagaagctttgcagttgttgaatgagcttatggtgaatagagagaaggagaatgctgagcttgagaaggagctagaggtgtatagaaagagaatggaggagtatgaagctaaagagaaaatggggatgttgaggaggagattgagagattcctctgttgattcgtatagaaataatggcgattctgatgagaatagcaatggagagttacagtttaagaacgtgaaggggttacggattggaaatatagagagaatgagatggagaatacgccggtggatgttgtacttcgtcttgatgagtgtttagatgattatgatggagagaggctttcgattcttgggagattgaagtttcttgaagagaaactcacagatcttaataacgaagaggacgacgaggaggaggctaaaacgtttgagagtaatggtagcatcaatggaaatgagcatattcatggcaaagaaacaaacgggaagcacagagttatcaagtcaaagagattacttcccctgtttgatgcggtcgatggagagatggaaaacgggttaagtaacggaaaccatcacgaaaacgggtttgatgattcggagaagggtgagaatgtgacgatagaagaagaagtggatgagctttacgagaggttagaagctctagaggcagatagagagttcttaagacattgtgttggttcattgaaaaaaggagacaaaggtgtacatctcctccatgagattctgcaacatcttcgtgatctaaggaatatcgatcttactcgcgtcagagaaaacggagacatgagtttatgagtttgattttgagttttgggtttgagtccactctttgcatagtgacacaaagaacaagaaaaatcatacaggtatggaagtgacatgttgcttgagaggcaaggaacaacgacaaggtttcagatgaagaagaaaacgttctcagaataaaagtattttaagtatatactctgaggaaaagtgtcagatcagaatgttcgtctttcttcgttcattttcattattataagttttgttttttatattgaagatttatttagagagagggaagtgtcagtataatttcacttttatattttatatttgggagttgtctttatgagtggtggtaatagaaaaaggtagaatgatgagtgtatgtgtgtgtagtgtagtgtagttgagtactagtacttagtaaggtgagctattggtataaaaaaatgccaaaggcaagctgtcaaatttcttggatgtttgtggcagagctggaatgatttcagcaaagatgccaacaccaatgtacatatgcctttttggactttttagaacatttagaaaatttctgggcgactttagaattattgcttttaggtggggt

SEQ ID NO: 76348 - protein, 375 aa, Arabidopsis thaliana
  peptide (1)..(375): Ceres Seq. ID no. 7107645
  misc_feature (206)..(299): Pfam Name: Protein of unknown function, DUF593 Pfam Description: Protein of unknown function, DUF593
  misc_feature (4)..(351): Homolog of NCBI NO: 25406071 NR Description: unknown protein F5A18.7 [imported] - Arabidopsis
  misc_feature (101)..(351): Homolog of NCBI NO: 18409667 NR Description: expressed protein; protein id: At1g70750.1,
  misc_feature (101)..(375): Homolog of NCBI NO: 4101564 NR Description: IFA-binding protein [Arabidopsis thaliana]
  misc_feature (8)..(348): Homolog of NCBI NO: 11357812 NR Description: hypothetical protein F5E19_60 - Arabidopsis >gi|9755724|emb|CAC01836.1| putative protein [Arabidopsis
  misc_feature (8)..(348): Homolog of NCBI NO: 30685989 NR Description: expressed protein [Arabidopsis thaliana]
  misc_feature (12)..(339): Homolog of NCBI NO: 13702818 NR Description: unknown protein [Oryza sativa]
  misc_feature (201)..(306): Homolog of NCBI NO: 37534334 NR Description: putative RNA-binding protein [Oryza sativa
  misc_feature (67)..(352): Homolog of NCBI NO: 34897178 NR Description: unknown protein [Oryza sativa (japonica
  misc_feature (201)..(302): Homolog of NCBI NO: 34909998 NR Description: P0490D09.23 [Oryza sativa (japonica
  misc_feature (6)..(317): Homolog of NCBI NO: 15224552 NR Description: unknown protein; protein id: At2g30690.1
REREREREREDLPIEVETAESAPKNLEFYIDEEDCHLIPVEFYKPSEEVREISDINGDFILDFGVEHDFTAAAETEEISDFASPGESKPEDAETNLVASEMENDDEETDAEVSIGTEIPDHEQIGDIPSHQLIPHHDDDDHEEETLEFKTVTIETKMPVLNINEERILEAQGSMESSHSSLHNAMFHLEQRVSVDGIECPEGVLTVDKLKFELQEERKALHALYEELEVERNASAVAASETMAMINRLHEEKAAMQMEALQYQRMMEEQAEFDQEALQLLNELMVNREKENAELEKELEVYRKRMEEYEAKEKMGMLRRRLRDSSVDSYRNNGDSDENSNGELQFKNVKGLRIGNIERMRWRIRRWMLYFVLMSV

SEQ ID NO: 76349 - protein, 275 aa, Arabidopsis thaliana
  peptide (1)..(275): Ceres Seq. ID no. 7107646
  misc_feature (106)..(199): Pfam Name: Protein of unknown function, DUF593 Pfam Description: Protein of unknown function, DUF593
  misc_feature (1)..(251): Homolog of NCBI NO: 25406071 NR Description: unknown protein F5A18.7 [imported] - Arabidopsis
  misc_feature (1)..(251): Homolog of NCBI NO: 18409667 NR Description: expressed protein; protein id: At1g70750.1,
  misc_feature (1)..(275): Homolog of NCBI NO: 4101564 NR Description: IFA-binding protein [Arabidopsis thaliana]
  misc_feature (1)..(248): Homolog of NCBI NO: 11357812 NR Description: hypothetical protein F5E19_60 - Arabidopsis >gi|9755724|emb|CAC01836.1| putative protein [Arabidopsis
  misc_feature (1)..(248): Homolog of NCBI NO: 30685989 NR Description: expressed protein [Arabidopsis thaliana]
  misc_feature (1)..(239): Homolog of NCBI NO: 13702818 NR Description: unknown protein [Oryza sativa]
  misc_feature (101)..(206): Homolog of NCBI NO: 37534334 NR Description: putative RNA-binding protein [Oryza sativa
  misc_feature (1)..(252): Homolog of NCBI NO: 34897178 NR Description: unknown protein [Oryza sativa (japonica
  misc_feature (101)..(202): Homolog of NCBI NO: 34909998 NR Description: P0490D09.23 [Oryza sativa (japonica
  misc_feature (1)..(217): Homolog of NCBI NO: 15224552 NR Description: unknown protein; protein id: At2g30690.1
MENDDEETDAEVSIGTEIPDHEQIGDIPSHQLIPHHDDDDHEEETLEFKTVTIETKMPVLNINEERILEAQGSMESSHSSLHNAMFHLEQRVSVDGIECPEGVLTVDKLKFELQEERKALHALYEELEVERNASAVAASETMAMINRLHEEKAAMQMEALQYQRMMEEQAEFDQEALQLLNELMVNREKENAELEKELEVYRKRMEEYEAKEKMGMLRRRLRDSSVDSYRNNGDSDENSNGELQFKNVKGLRIGNIERMRWRIRRWMLYFVLMSV

SEQ ID NO: 76350 - protein, 219 aa, Arabidopsis thaliana
  peptide (1)..(219): Ceres Seq. ID no. 7107647
  misc_feature (50)..(143): Pfam Name: Protein of unknown function, DUF593 Pfam Description: Protein of unknown function, DUF593
  misc_feature (1)..(195): Homolog of NCBI NO: 25406071 NR Description: unknown protein F5A18.7 [imported] - Arabidopsis
  misc_feature (1)..(195): Homolog of NCBI NO: 18409667 NR Description: expressed protein; protein id: At1g70750.1,
  misc_feature (1)..(219): Homolog of NCBI NO: 4101564 NR Description: IFA-binding protein [Arabidopsis thaliana]
  misc_feature (1)..(192): Homolog of NCBI NO: 11357812 NR Description: hypothetical protein F5E19_60 - Arabidopsis >gi|9755724|emb|CAC01836.1| putative protein [Arabidopsis
  misc_feature (1)..(192): Homolog of NCBI NO: 30685989 NR Description: expressed protein [Arabidopsis thaliana]
  misc_feature (1)..(183): Homolog of NCBI NO: 13702818 NR Description: unknown protein [Oryza sativa]
  misc_feature (45)..(150): Homolog of NCBI NO: 37534334 NR Description: putative RNA-binding protein [Oryza sativa
  misc_feature (1)..(196): Homolog of NCBI NO: 34897178 NR Description: unknown protein [Oryza sativa (japonica
  misc_feature (45)..(146): Homolog of NCBI NO: 34909998 NR Description: P0490D09.23 [Oryza sativa (japonica
  misc_feature (1)..(161): Homolog of NCBI NO: 15224552 NR Description: unknown protein; protein id: At2g30690.1
MPVLNINEERILEAQGSMESSHSSLHNAMFHLEQRVSVDGIECPEGVLTVDKLKFELQEERKALHALYEELEVERNASAVAASETMAMINRLHEEKAAMQMEALQYQRMMEEQAEFDQEALQLLNELMVNREKENAELEKELEVYRKRMEEYEAKEKMGMLRRRLRDSSVDSYRNNGDSDENSNGELQFKNVKGLRIGNIERMRWRIRRWMLYFVLMSV

SEQ ID NO: 76351 - DNA, 1276 bp, Arabidopsis thaliana
  misc_feature (1)..(1276): Ceres Seq. ID no. 7107680
  misc_feature: MA Experiment ID: 108435 Result: Down-regulated in Transcription
  misc_feature: MA Experiment 108435 PARAMETER Experiment Name: At_stm_Mutants_cDNA_P Parameter: Plant Line Value: wt Landsburg vs stm
  misc_feature: MA Experiment 108435 PARAMETER Experiment Name: At_stm_Mutants_cDNA_P Parameter: Tissue Value: Shoot Apical Meristem Region
  misc_feature: MA Experiment ID: 108461 Result: Up-regulated in Transcription
  misc_feature: MA Experiment 108461 PARAMETER Experiment Name: At_Germinating_Seeds_cDNA_P Parameter: Age (day) Value: 1 vs. 0
  misc_feature: MA Experiment 108461 PARAMETER Experiment Name: At_Germinating_Seeds_cDNA_P Parameter: Tissue Value: Germinating Seeds
  misc_feature: MA Experiment ID: 108462 Result: Up-regulated in Transcription
  misc_feature: MA Experiment 108462 PARAMETER Experiment Name: At_Germinating_Seeds_cDNA_P Parameter: Age (day) Value: 2 vs. 0
  misc_feature: MA Experiment 108462 PARAMETER Experiment Name: At_Germinating_Seeds_cDNA_P Parameter: Tissue Value: Germinating Seeds
  misc_feature: MA Experiment ID: 108463 Result: Up-regulated in Transcription
  misc_feature: MA Experiment 108463 PARAMETER Experiment Name: At_Germinating_Seeds_cDNA_P Parameter: Age (day) Value: 3 vs. 0
  misc_feature: MA Experiment 108463 PARAMETER Experiment Name: At_Germinating_Seeds_cDNA_P Parameter: Tissue Value: Germinating Seeds
  misc_feature: MA Experiment ID: 108464 Result: Up-regulated in Transcription
  misc_feature: MA Experiment 108464 PARAMETER Experiment Name: At_Germinating_Seeds_cDNA_P Parameter: Age (day) Value: 4 vs. 0
  misc_feature: MA Experiment 108464 PARAMETER Experiment Name: At_Germinating_Seeds_cDNA_P Parameter: Tissue Value: Germinating Seeds
  misc_feature: MA Experiment ID: 108488 Result: Up-regulated in Transcription
  misc_feature: MA Experiment ID: 108577 Result: Up-regulated in Transcription
  misc_feature: MA Experiment 108577 PARAMETER Experiment Name: At_42deg_Heat_cDNA_P Parameter: Temperature (deg C) Value: 42 vs. 22
  misc_feature: MA Experiment 108577 PARAMETER Experiment Name: At_42deg_Heat_cDNA_P Parameter: Timepoint (hr) Value: 6
  misc_feature: MA Experiment 108577 PARAMETER Experiment Name: At_42deg_Heat_cDNA_P Parameter: Tissue Value: Aerial
  misc_feature: MA Experiment ID: 108595 Result: Down-regulated in Transcription
  misc_feature: MA Experiment 108595 PARAMETER Experiment Name: At_Ler-pi_Ovule_cDNA_P Parameter: Plant Line Value: null
  misc_feature: MA Experiment ID: 20000069 Result: Down-regulated in Transcription
  misc_feature: MA Experiment 20000069 PARAMETER Experiment Name: At_100uM_ABA_Mutants_cDNA_P Parameter: Plant Line Value: CS23
  misc_feature: MA Experiment 20000069 PARAMETER Experiment Name: At_100uM_ABA_Mutants_cDNA_P Parameter: Timepoint (hr) Value: 6
  misc_feature: MA Experiment 20000069 PARAMETER Experiment Name: At_100uM_ABA_Mutants_cDNA_P Parameter: Tissue Value: Aerial
  misc_feature: MA Experiment 20000069 PARAMETER Experiment Name: At_100uM_ABA_Mutants_cDNA_P Parameter: Treatment Value: 100uM ABA vs. No Treatment
  misc_feature: MA Experiment ID: 20000070 Result: Down-regulated in Transcription
  misc_feature: MA Experiment 20000070 PARAMETER Experiment Name: At_100uM_ABA_Mutants_cDNA_P Parameter: Plant Line Value: CS24
  misc_feature: MA Experiment 20000070 PARAMETER Experiment Name: At_100uM_ABA_Mutants_cDNA_P Parameter: Timepoint (hr) Value: 6
  misc_feature: MA Experiment 20000070 PARAMETER Experiment Name: At_100uM_ABA_Mutants_cDNA_P Parameter: Tissue Value: Aerial
  misc_feature: MA Experiment 20000070 PARAMETER Experiment Name: At_100uM_ABA_Mutants_cDNA_P Parameter: Treatment Value: 100uM ABA vs. No Treatment
  misc_feature: MA Experiment ID: 20000071 Result: Down-regulated in Transcription
  misc_feature: MA Experiment 20000071 PARAMETER Experiment Name: At_100uM_ABA_Mutants_cDNA_P Parameter: Plant Line Value: CS8104
  misc_feature: MA Experiment 20000071 PARAMETER Experiment Name: At_100uM_ABA_Mutants_cDNA_P Parameter: Timepoint (hr) Value: 6
  misc_feature: MA Experiment 20000071 PARAMETER Experiment Name: At_100uM_ABA_Mutants_cDNA_P Parameter: Tissue Value: Aerial
  misc_feature: MA Experiment 20000071 PARAMETER Experiment Name: At_100uM_ABA_Mutants_cDNA_P Parameter: Treatment Value: 100uM ABA vs. No Treatment
  misc_feature: MA Experiment ID: 20000072 Result: Down-regulated in Transcription
  misc_feature: MA Experiment 20000072 PARAMETER Experiment Name: At_100uM_ABA_Mutants_cDNA_P Parameter: Plant Line Value: CS8105
  misc_feature: MA Experiment 20000072 PARAMETER Experiment Name: At_100uM_ABA_Mutants_cDNA_P Parameter: Timepoint (hr) Value: 6
  misc_feature: MA Experiment 20000072 PARAMETER Experiment Name: At_100uM_ABA_Mutants_cDNA_P Parameter: Tissue Value: Aerial
  misc_feature: MA Experiment 20000072 PARAMETER Experiment Name: At_100uM_ABA_Mutants_cDNA_P Parameter: Treatment Value: 100uM ABA vs. No Treatment
  misc_feature: MA Experiment ID: 20000086 Result: Down-regulated in Transcription
  misc_feature: MA Experiment 20000086 PARAMETER Experiment Name: At_100uM_ABA_Mutants_cDNA_P Parameter: Plant Line Value: CS22
  misc_feature: MA Experiment 20000086 PARAMETER Experiment Name: At_100uM_ABA_Mutants_cDNA_P Parameter: Timepoint (hr) Value: 6
  misc_feature: MA Experiment 20000086 PARAMETER Experiment Name: At_100uM_ABA_Mutants_cDNA_P Parameter: Tissue Value: Aerial
  misc_feature: MA Experiment 20000086 PARAMETER Experiment Name: At_100uM_ABA_Mutants_cDNA_P Parameter: Treatment Value: 100uM ABA vs. No Treatment
  misc_feature: MA Experiment ID: 20000087 Result: Down-regulated in Transcription
  misc_feature: MA Experiment 20000087 PARAMETER Experiment Name: At_100uM_ABA_Mutants_cDNA_P Parameter: Plant Line Value: WS
  misc_feature: MA Experiment 20000087 PARAMETER Experiment Name: At_100uM_ABA_Mutants_cDNA_P Parameter: Timepoint (hr) Value: 6
  misc_feature: MA Experiment 20000087 PARAMETER Experiment Name: At_100uM_ABA_Mutants_cDNA_P Parameter: Tissue Value: Aerial
  misc_feature: MA Experiment 20000087 PARAMETER Experiment Name: At_100uM_ABA_Mutants_cDNA_P Parameter: Treatment Value: 100uM ABA vs. No Treatment
  misc_feature: MA Experiment ID: 20000088 Result: Down-regulated in Transcription
  misc_feature: MA Experiment 20000088 PARAMETER Experiment Name: At_100uM_ABA_Mutants_cDNA_P Parameter: Plant Line Value: Landsberg
  misc_feature: MA Experiment 20000088 PARAMETER Experiment Name: At_100uM_ABA_Mutants_cDNA_P Parameter: Timepoint (hr) Value: 6
  misc_feature: MA Experiment 20000088 PARAMETER Experiment Name: At_100uM_ABA_Mutants_cDNA_P Parameter: Tissue Value: Aerial
  misc_feature: MA Experiment 20000088 PARAMETER Experiment Name: At_100uM_ABA_Mutants_cDNA_P Parameter: Treatment Value: 100uM ABA vs. No Treatment
  misc_feature: MA Experiment ID: 20000089 Result: Down-regulated in Transcription
  misc_feature: MA Experiment ID: 20000090 Result: Down-regulated in Transcription
  misc_feature: MA Experiment ID: 20000117 Result: Down-regulated in Transcription
  misc_feature: MA Experiment 20000117 PARAMETER Experiment Name: At_100uM_ABA_Mutants_cDNA_P Parameter: Plant Line Value: Columbia
  misc_feature: MA Experiment 20000117 PARAMETER Experiment Name: At_100uM_ABA_Mutants_cDNA_P Parameter: Timepoint (hr) Value: 6
  misc_feature: MA Experiment 20000117 PARAMETER Experiment Name: At_100uM_ABA_Mutants_cDNA_P Parameter: Tissue Value: Aerial
  misc_feature: MA Experiment 20000117 PARAMETER Experiment Name: At_100uM_ABA_Mutants_cDNA_P Parameter: Treatment Value: 100uM ABA vs. No Treatment
  misc_feature: MA Experiment ID: 20000173 Result: Up-regulated in Transcription
  misc_feature: MA Experiment 20000173 PARAMETER Experiment Name: At_42deg_Heat_P Parameter: Age (day) Value: 14
  misc_feature: MA Experiment 20000173 PARAMETER Experiment Name: At_42deg_Heat_P Parameter: Organism Value: A. thaliana
  misc_feature: MA Experiment 20000173 PARAMETER Experiment Name: At_42deg_Heat_P Parameter: Plant Line Value: WS
  misc_feature: MA Experiment 20000173 PARAMETER Experiment Name: At_42deg_Heat_P Parameter: Temperature (deg C) Value: 42 vs. 22
  misc_feature: MA Experiment 20000173 PARAMETER Experiment Name: At_42deg_Heat_P Parameter: Timepoint (hr) Value: 6
  misc_feature: MA Experiment 20000173 PARAMETER Experiment Name: At_42deg_Heat_P Parameter: Tissue Value: Aerial
  misc_feature: MA Experiment ID: 20000179 Result: Up-regulated in Transcription
  misc_feature: MA Experiment 20000179 PARAMETER Experiment Name: At_Germinating_Seeds_P Parameter: Age (hr) Value: 6 vs. 0
  misc_feature: MA Experiment 20000179 PARAMETER Experiment Name: At_Germinating_Seeds_P Parameter: Tissue Value: Germinating Seeds
  misc_feature: MA Experiment ID: 20000180 Result: Up-regulated in Transcription
  misc_feature: MA Experiment 20000180 PARAMETER Experiment Name: At_Germinating_Seeds_P Parameter: Age (hr) Value: 24 vs. 0
  misc_feature: MA Experiment 20000180 PARAMETER Experiment Name: At_Germinating_Seeds_P Parameter: Tissue Value: Germinating Seeds
  misc_feature: MA Experiment ID: 20000184 Result: Up-regulated in Transcription
  misc_feature: MA Experiment 20000184 PARAMETER Experiment Name: At_Shoots__P Parameter: Age (day) Value: 7
  misc_feature: MA Experiment 20000184 PARAMETER Experiment Name: At_Shoots__P Parameter: Tissue Value: Shoots vs. Whole Plant
  misc_feature: MA Experiment ID: 20000185 Result: Down-regulated in Transcription
  misc_feature: MA Experiment 20000185 PARAMETER Experiment Name: At_Roots__P Parameter: Age (day) Value: 7 vs. 21
  misc_feature: MA Experiment 20000185 PARAMETER Experiment Name: At_Roots__P Parameter: Organism Value: A. thaliana
  misc_feature: MA Experiment 20000185 PARAMETER Experiment Name: At_Roots__P Parameter: Tissue Value: Roots vs. Whole Plant
  misc_feature: MA Experiment ID: 20000214 Result: Up-regulated in Transcription
  misc_feature: MA Experiment 20000214 PARAMETER Experiment Name: At_4deg_Cold_P Parameter: Timepoint (hr) Value: 6
  misc_feature: MA Experiment ID: 20000437 Result: Down-regulated in Transcription
  misc_feature: MA Experiment 20000437 PARAMETER Experiment Name: At_Drought_P Parameter: Age (day) Value: 8
  misc_feature: MA Experiment 20000437 PARAMETER Experiment Name: At_Drought_P Parameter: Organism Value: A. thaliana
  misc_feature: MA Experiment 20000437 PARAMETER Experiment Name: At_Drought_P Parameter: Plant Line Value: WS
  misc_feature: MA Experiment 20000437 PARAMETER Experiment Name: At_Drought_P Parameter: Timepoint (hr) Value: 24
  misc_feature: MA Experiment 20000437 PARAMETER Experiment Name: At_Drought_P Parameter: Tissue Value: Whole Plant
  misc_feature: MA Experiment 20000437 PARAMETER Experiment Name: At_Drought_P Parameter: Treatment Value: Drought vs. No Drought
  misc_feature: MA Experiment ID: 20000438 Result: Up-regulated in Transcription
  misc_feature: MA Experiment 20000438 PARAMETER Experiment Name: At_Shoots__P Parameter: Age (day) Value: 14
  misc_feature: MA Experiment 20000438 PARAMETER Experiment Name: At_Shoots__P Parameter: Tissue Value: Shoots vs. Whole Plant
  misc_feature: MA Experiment ID: 20000439 Result: Down-regulated in Transcription
  misc_feature: MA Experiment 20000439 PARAMETER Experiment Name: At_Roots__P Parameter: Age (day) Value: 14 vs. 21
  misc_feature: MA Experiment 20000439 PARAMETER Experiment Name: At_Roots__P Parameter: Organism Value: A. thaliana
  misc_feature: MA Experiment 20000439 PARAMETER Experiment Name: At_Roots__P Parameter: Tissue Value: Roots vs. Whole Plant
  misc_feature: MA Experiment ID: 20000794 Result: Down-regulated in Transcription
  misc_feature: MA Experiment 20000794 PARAMETER Experiment Name: At_Petals_P Parameter: Age (day) Value: 23-25 days
  misc_feature: MA Experiment 20000794 PARAMETER Experiment Name: At_Petals_P Parameter: Plant Line Value: WS
  misc_feature: MA Experiment 20000794 PARAMETER Experiment Name: At_Petals_P Parameter: Tissue Value: Petals vs. Whole plant
  misc_feature: MA Experiment ID: 20001247 Result: Up-regulated in Transcription
  misc_feature: MA Experiment 20001247 PARAMETER Experiment Name: At_Far-red-induction_P Parameter: Age (day) Value: 7
  misc_feature: MA Experiment 20001247 PARAMETER Experiment Name: At_Far-red-induction_P Parameter: Light Value: Far-red vs. White
  misc_feature: MA Experiment 20001247 PARAMETER Experiment Name: At_Far-red-induction_P Parameter: Organism Value: A. thaliana
  misc_feature: MA Experiment 20001247 PARAMETER Experiment Name: At_Far-red-induction_P Parameter: Plant Line Value: Columbia
  misc_feature: MA Experiment 20001247 PARAMETER Experiment Name: At_Far-red-induction_P Parameter: Timepoint (hr) Value: 1
  misc_feature: MA Experiment 20001247 PARAMETER Experiment Name: At_Far-red-induction_P Parameter: Tissue Value: Whole Plant
  misc_feature: MA Experiment ID: 20001248 Result: Down-regulated in Transcription
  misc_feature: MA Experiment 20001248 PARAMETER Experiment Name: At_Far-red-induction_P Parameter: Age (day) Value: 7
  misc_feature: MA Experiment 20001248 PARAMETER Experiment Name: At_Far-red-induction_P Parameter: Light Value: Far-red vs. White
  misc_feature: MA Experiment 20001248 PARAMETER Experiment Name: At_Far-red-induction_P Parameter: Organism Value: A. thaliana
  misc_feature: MA Experiment 20001248 PARAMETER Experiment Name: At_Far-red-induction_P Parameter: Plant Line Value: Columbia
  misc_feature: MA Experiment 20001248 PARAMETER Experiment Name: At_Far-red-induction_P Parameter: Timepoint (hr) Value: 4
  misc_feature: MA Experiment 20001248 PARAMETER Experiment Name: At_Far-red-induction_P Parameter: Tissue Value: Whole Plant
  misc_feature: MA Experiment ID: 20001450 Result: Down-regulated in Transcription
  misc_feature: MA Experiment 20001450 PARAMETER Experiment Name: At_Far-red-induction_P Parameter: Age (day) Value: 7
  misc_feature: MA Experiment 20001450 PARAMETER Experiment Name: At_Far-red-induction_P Parameter: Light Value: Far-red vs. White
  misc_feature: MA Experiment 20001450 PARAMETER Experiment Name: At_Far-red-induction_P Parameter: Organism Value: A. thaliana
  misc_feature: MA Experiment 20001450 PARAMETER Experiment Name: At_Far-red-induction_P Parameter: Plant Line Value: Columbia
  misc_feature: MA Experiment 20001450 PARAMETER Experiment Name: At_Far-red-induction_P Parameter: Timepoint (hr) Value: 8
  misc_feature: MA Experiment 20001450 PARAMETER Experiment Name: At_Far-red-induction_P Parameter: Tissue Value: Whole Plant
  misc_feature: MA Experiment ID: 20001555 Result: Down-regulated in Transcription
  misc_feature: MA Experiment 20001555 PARAMETER Experiment Name: At_Drought_Soil_Dry_P Parameter: Age (day) Value: 24
  misc_feature: MA Experiment 20001555 PARAMETER Experiment Name: At_Drought_Soil_Dry_P Parameter: Organism Value: A. thaliana
  misc_feature: MA Experiment 20001555 PARAMETER Experiment Name: At_Drought_Soil_Dry_P Parameter: Plant Line Value: WS
  misc_feature: MA Experiment 20001555 PARAMETER Experiment Name: At_Drought_Soil_Dry_P Parameter: Post Timepoint (hr) Value: None
  misc_feature: MA Experiment 20001555 PARAMETER Experiment Name: At_Drought_Soil_Dry_P Parameter: Post-Treatment Value: None
  misc_feature: MA Experiment 20001555 PARAMETER Experiment Name: At_Drought_Soil_Dry_P Parameter: Timepoint (day) Value: 10
  misc_feature: MA Experiment 20001555 PARAMETER Experiment Name: At_Drought_Soil_Dry_P Parameter: Treatment Value: Drought vs. No Drought
  misc_feature: MA Experiment ID: 20001559 Result: Down-regulated in Transcription
  misc_feature: MA Experiment 20001559 PARAMETER Experiment Name: At_Drought_Soil_Dry_P Parameter: Age (day) Value: 28
  misc_feature: MA Experiment 20001559 PARAMETER Experiment Name: At_Drought_Soil_Dry_P Parameter: Organism Value: A. thaliana
  misc_feature: MA Experiment 20001559 PARAMETER Experiment Name: At_Drought_Soil_Dry_P Parameter: Plant Line Value: WS
  misc_feature: MA Experiment 20001559 PARAMETER Experiment Name: At_Drought_Soil_Dry_P Parameter: Post Timepoint (hr) Value: 29
  misc_feature: MA Experiment 20001559 PARAMETER Experiment Name: At_Drought_Soil_Dry_P Parameter: Post-Treatment Value: Re-Water vs. No Drought
  misc_feature: MA Experiment 20001559 PARAMETER Experiment Name: At_Drought_Soil_Dry_P Parameter: Timepoint (day) Value: 14
  misc_feature: MA Experiment 20001559 PARAMETER Experiment Name: At_Drought_Soil_Dry_P Parameter: Treatment Value: Drought vs. No Drought
  misc_feature: MA Experiment ID: 20001757 Result: Up-regulated in Transcription
  misc_feature: MA Experiment 20001757 PARAMETER Experiment Name: At_50mM_NH4NO3_L-to-H_P Parameter: Timepoint (hr) Value: 6
  misc_feature: MA Experiment 20001757 PARAMETER Experiment Name: At_50mM_NH4NO3_L-to-H_P Parameter: Tissue Value: Leaf
  misc_feature: MA Experiment 20001757 PARAMETER Experiment Name: At_50mM_NH4NO3_L-to-H_P Parameter: Treatment Value: 50mM NH4NO3 vs 100mM Mannitol
  misc_feature: MA Experiment ID: 20001904 Result: Down-regulated in Transcription
  misc_feature: MA Experiment 20001904 PARAMETER Experiment Name: At_Drought_Reproduction_P Parameter: Age (day) Value: 37
  misc_feature: MA Experiment 20001904 PARAMETER Experiment Name: At_Drought_Reproduction_P Parameter: Organism Value: A. thaliana
  misc_feature: MA Experiment 20001904 PARAMETER Experiment Name: At_Drought_Reproduction_P Parameter: Plant Line Value: WS
  misc_feature: MA Experiment 20001904 PARAMETER Experiment Name: At_Drought_Reproduction_P Parameter: Timepoint (day) Value: 7
  misc_feature: MA Experiment 20001904 PARAMETER Experiment Name: At_Drought_Reproduction_P Parameter: Tissue Value: Rosettes
  misc_feature: MA Experiment 20001904 PARAMETER Experiment Name: At_Drought_Reproduction_P Parameter: Treatment Value: Drought vs. No Drought
  misc_feature: MA Experiment ID: 20001906 Result: Down-regulated in Transcription
  misc_feature: MA Experiment 20001906 PARAMETER Experiment Name: At_Drought_Reproduction_P Parameter: Age (day) Value: 35
  misc_feature: MA Experiment 20001906 PARAMETER Experiment Name: At_Drought_Reproduction_P Parameter: Organism Value: A. thaliana
  misc_feature: MA Experiment 20001906 PARAMETER Experiment Name: At_Drought_Reproduction_P Parameter: Plant Line Value: WS
  misc_feature: MA Experiment 20001906 PARAMETER Experiment Name: At_Drought_Reproduction_P Parameter: Timepoint (day) Value: 5
  misc_feature: MA Experiment 20001906 PARAMETER Experiment Name: At_Drought_Reproduction_P Parameter: Tissue Value: Siliques
  misc_feature: MA Experiment 20001906 PARAMETER Experiment Name: At_Drought_Reproduction_P Parameter: Treatment Value: Drought vs. No Drought
  misc_feature: MA Experiment ID: 20001911 Result: Down-regulated in Transcription
  misc_feature: MA Experiment 20001911 PARAMETER Experiment Name: At_Drought_Reproduction_P Parameter: Age (day) Value: 40
  misc_feature: MA Experiment 20001911 PARAMETER Experiment Name: At_Drought_Reproduction_P Parameter: Organism Value: A. thaliana
  misc_feature: MA Experiment 20001911 PARAMETER Experiment Name: At_Drought_Reproduction_P Parameter: Plant Line Value: WS
  misc_feature: MA Experiment 20001911 PARAMETER Experiment Name: At_Drought_Reproduction_P Parameter: Timepoint (day) Value: 10
  misc_feature: MA Experiment 20001911 PARAMETER Experiment Name: At_Drought_Reproduction_P Parameter: Tissue Value: Flowers
  misc_feature: MA Experiment 20001911 PARAMETER Experiment Name: At_Drought_Reproduction_P Parameter: Treatment Value: Drought vs. No Drought
gaattcccgggtcgacccacgcgtccggatgatgttgcaacagcatcagccttctttctctctccttacttcttctctgtctgacttcaatggcgctaagctccatttacaagtccagtacaagaggaaggttcatcagccaaaaggagcactctatgtttcagcgtcgagcgaaaagaagattctgataatgggtggtactcgattcattggtctgttcttgtccaggatccttgtcaaagagggacatcaggttacattgttcacaaggggtaaatctcctattgccaaacaattgcccggtgaatctgaccaagactttgctgatttctcttctaagattcttcacttgaaaggagacagaaaggactatgactttgtgaagtcaagtctttcagcagaaggcttcgatgttgtttatgatatcaacgggagggaggccgaagaagttgagcccatactagaagcactacccaaactagagcagtacatctactgttcttcagctggtgtttatctgaaatctgatatcttgccacattgtgaggaggatgcagttgatccgaagagcaggcacaaggggaagctggagactgagagcttactgcaatcaaaaggtgtaaactggacttctatacgtcctgtctacatctacggtccattgaattacaaccccgtcgaagaatggtttttccaccgtctaaaggcaggtcgcccaatcccggttccaaactctgggatacagatctcacaactcggtcacgttaaggacttggcaacagcctttctcaacgtgcttggtaacgagaaagccagcagagagatattcaacatctcgggggagaaatatgttacctttgatgggttagcaaaagcttgcgcaaaggccggtgggtttccggagccagagattgttcattacaacccgaaagagttcgactttgggaagaagaaggcattccctttccgtgatcagcatttctttgcatcggtggagaaagcaaagcatgtcctcggatggaaaccggagttcgacttagtggagggtctcactgactcatacaaccttgatttcggtcgcggaacattccggaaagaagcggatttcaccactgacgacatgattctgagcaagaaacttgttcttcaataatcgaaatcctaagagttgctcattcttggcttgtatgattctgatcacccggttctcttaaagttctgaactttattgtcatctcacgtatgttatggtccggattttgttcgacttttctct

SEQ ID NO: 76352 - protein, 383 aa, Arabidopsis thaliana
  peptide (1)..(383): Ceres Seq. ID no. 7107681
  misc_feature (61)..(353): Pfam Name: NAD dependent epimerase/dehydratase family Pfam Description: NAD dependent epimerase/dehydratase family
  misc_feature (10)..(383): Homolog of NCBI NO: 15217485 NR Description: putative RNA-binding protein; protein id: supported by cDNA: 37028., supported by cDNA: gi_13358232, by cDNA: gi_14334753, supported by cDNA: gi_16226246, supported
  misc_feature (10)..(383): Homolog of NCBI NO: 25456171 NR Description: probable RNA binding protein [imported] - thaliana >gi|3850621|emb|CAA75602.1| putative RNA binding protein
  misc_feature (10)..(383): Homolog of NCBI NO: 17064988 NR Description: g5bf protein [Arabidopsis thaliana]
  misc_feature (10)..(383): Homolog of NCBI NO: 21593201 NR Description: putative RNA-binding protein [Arabidopsis
  misc_feature (10)..(383): Homolog of NCBI NO: 25454619 NR Description: hypothetical protein g5bf [imported] -
  misc_feature (52)..(379): Homolog of NCBI NO: 34398360 NR Description: 38 kDa ribosome-associated protein precursor
  misc_feature (60)..(376): Homolog of NCBI NO: 17232323 NR Description: mRNA-binding protein [Nostoc sp. PCC 7120]
  misc_feature (60)..(376): Homolog of NCBI NO: 23040971 NR Description: hypothetical protein [Trichodesmium erythraeum
  misc_feature (60)..(376): Homolog of NCBI NO: 23128166 NR Description: hypothetical protein [Nostoc punctiforme]
  misc_feature (60)..(377): Homolog of NCBI NO: 16330056 NR Description: hypothetical protein [Synechocystis sp. PCC 6803]
NSRVDPRVRMMLQQHQPSFSLLTSSLSDFNGAKLHLQVQYKRKVHQPKGALYVSASSEKKILIMGGTRFIGLFLSRILVKEGHQVTLFTRGKSPIAKQLPGESDQDFADFSSKILHLKGDRKDYDFVKSSLSAEGFDVVYDINGREAEEVEPILEALPKLEQYIYCSSAGVYLKSDILPHCEEDAVDPKSRHKGKLETESLLQSKGVNWTSIRPVYIYGPLNYNPVEEWFFHRLKAGRPIPVPNSGIQISQLGHVKDLATAFLNVLGNEKASREIFNISGEKYVTFDGLAKACAKAGGFPEPEIVHYNPKEFDFGKKKAFPFRDQHFFASVEKAKHVLGWKPEFDLVEGLTDSYNLDFGRGTFRKEADFTTDDMILSKKLVLQ

SEQ ID NO: 76353 - protein, 374 aa, Arabidopsis thaliana
  peptide (1)..(374): Ceres Seq. ID no. 7107682
  misc_feature (52)..(344): Pfam Name: NAD dependent epimerase/dehydratase family Pfam Description: NAD dependent epimerase/dehydratase family
  misc_feature (1)..(374): Homolog of NCBI NO: 15217485 NR Description: putative RNA-binding protein; protein id: supported by cDNA: 37028., supported by cDNA: gi_13358232, by cDNA: gi_14334753, supported by cDNA: gi_16226246, supported
  misc_feature (1)..(374): Homolog of NCBI NO: 25456171 NR Description: probable RNA binding protein [imported] - thaliana >gi|3850621|emb|CAA75602.1| putative RNA binding protein
  misc_feature (1)..(374): Homolog of NCBI NO: 17064988 NR Description: g5bf protein [Arabidopsis thaliana]
  misc_feature (1)..(374): Homolog of NCBI NO: 21593201 NR Description: putative RNA-binding protein [Arabidopsis
  misc_feature (1)..(374): Homolog of NCBI NO: 25454619 NR Description: hypothetical protein g5bf [imported] -
  misc_feature (43)..(370): Homolog of NCBI NO: 34398360 NR Description: 38 kDa ribosome-associated protein precursor
  misc_feature (51)..(367): Homolog of NCBI NO: 17232323 NR Description: mRNA-binding protein [Nostoc sp. PCC 7120]
  misc_feature (51)..(367): Homolog of NCBI NO: 23040971 NR Description: hypothetical protein [Trichodesmium erythraeum
  misc_feature (51)..(367): Homolog of NCBI NO: 23128166 NR Description: hypothetical protein [Nostoc punctiforme]
  misc_feature (51)..(368): Homolog of NCBI NO: 16330056 NR Description: hypothetical protein [Synechocystis sp. PCC 6803]
MMLQQHQPSFSLLTSSLSDFNGAKLHLQVQYKRKVHQPKGALYVSASSEKKILIMGGTRFIGLFLSRILVKEGHQVTLFTRGKSPIAKQLPGESDQDFADFSSKILHLKGDRKDYDFVKSSLSAEGFDVVYDINGREAEEVEPILEALPKLEQYIYCSSAGVYLKSDILPHCEEDAVDPKSRHKGKLETESLLQSKGVNWTSIRPVYIYGPLNYNPVEEWFFHRLKAGRPIPVPNSGIQISQLGHVKDLATAFLNVLGNEKASREIFNISGEKYVTFDGLAKACAKAGGFPEPEIVHYNPKEFDFGKKKAFPFRDQHFFASVEKAKHVLGWKPEFDLVEGLTDSYNLDFGRGTFRKEADFTTDDMILSKKLVLQ

SEQ ID NO: 76354 - protein, 373 aa, Arabidopsis thaliana
  peptide (1)..(373): Ceres Seq. ID no. 7107683
  misc_feature (51)..(343): Pfam Name: NAD dependent epimerase/dehydratase family Pfam Description: NAD dependent epimerase/dehydratase family
  misc_feature (1)..(373): Homolog of NCBI NO: 15217485 NR Description: putative RNA-binding protein; protein id: supported by cDNA: 37028., supported by cDNA: gi_13358232, by cDNA: gi_14334753, supported by cDNA: gi_16226246, supported
  misc_feature (1)..(373): Homolog of NCBI NO: 25456171 NR Description: probable RNA binding protein [imported] - thaliana >gi|3850621|emb|CAA75602.1| putative RNA binding protein
  misc_feature (1)..(373): Homolog of NCBI NO: 17064988 NR Description: g5bf protein [Arabidopsis thaliana]
  misc_feature (1)..(373): Homolog of NCBI NO: 21593201 NR Description: putative RNA-binding protein [Arabidopsis
  misc_feature (1)..(373): Homolog of NCBI NO: 25454619 NR Description: hypothetical protein g5bf [imported] -
  misc_feature (42)..(369): Homolog of NCBI NO: 34398360 NR Description: 38 kDa ribosome-associated protein precursor
  misc_feature (50)..(366): Homolog of NCBI NO: 17232323 NR Description: mRNA-binding protein [Nostoc sp. PCC 7120]
  misc_feature (50)..(366): Homolog of NCBI NO: 23040971 NR Description: hypothetical protein [Trichodesmium erythraeum
  misc_feature (50)..(366): Homolog of NCBI NO: 23128166 NR Description: hypothetical protein [Nostoc punctiforme]
  misc_feature (50)..(367): Homolog of NCBI NO: 16330056 NR Description: hypothetical protein [Synechocystis sp. PCC 6803]
MLQQHQPSFSLLTSSLSDFNGAKLHLQVQYKRKVHQPKGALYVSASSEKKILIMGGTRFIGLFLSRILVKEGHQVTLFTRGKSPIAKQLPGESDQDFADFSSKILHLKGDRKDYDFVKSSLSAEGFDVVYDINGREAEEVEPILEALPKLEQYIYCSSAGVYLKSDILPHCEEDAVDPKSRHKGKLETESLLQSKGVNWTSIRPVYIYGPLNYNPVEEWFFHRLKAGRPIPVPNSGIQISQLGHVKDLATAFLNVLGNEKASREIFNISGEKYVTFDGLAKACAKAGGFPEPEIVHYNPKEFDFGKKKAFPFRDQHFFASVEKAKHVLGWKPEFDLVEGLTDSYNLDFGRGTFRKEADFTTDDMILSKKLVLQ

SEQ ID NO: 76355 - DNA, 1227 bp, Arabidopsis thaliana
  misc_feature (1)..(1227): Ceres Seq. ID no. 7107684
  misc_feature: MA Experiment ID: 20000173 Result: Down-regulated in Transcription
  misc_feature: MA Experiment 20000173 PARAMETER Experiment Name: At_42deg_Heat_P Parameter: Age (day) Value: 14
  misc_feature: MA Experiment 20000173 PARAMETER Experiment Name: At_42deg_Heat_P Parameter: Organism Value: A. thaliana
  misc_feature: MA Experiment 20000173 PARAMETER Experiment Name: At_42deg_Heat_P Parameter: Plant Line Value: WS
  misc_feature: MA Experiment 20000173 PARAMETER Experiment Name: At_42deg_Heat_P Parameter: Temperature (deg C) Value: 42 vs. 22
  misc_feature: MA Experiment 20000173 PARAMETER Experiment Name: At_42deg_Heat_P Parameter: Timepoint (hr) Value: 6
  misc_feature: MA Experiment 20000173 PARAMETER Experiment Name: At_42deg_Heat_P Parameter: Tissue Value: Aerial
  misc_feature: MA Experiment ID: 20000180 Result: Up-regulated in Transcription
  misc_feature: MA Experiment 20000180 PARAMETER Experiment Name: At_Germinating_Seeds_P Parameter: Age (hr) Value: 24 vs. 0
  misc_feature: MA Experiment 20000180 PARAMETER Experiment Name: At_Germinating_Seeds_P Parameter: Tissue Value: Germinating Seeds
  misc_feature: MA Experiment ID: 20000213 Result: Up-regulated in Transcription
  misc_feature: MA Experiment 20000213 PARAMETER Experiment Name: At_4deg_Cold_P Parameter: Timepoint (hr) Value: 2
  misc_feature: MA Experiment ID: 20000227 Result: Down-regulated in Transcription
  misc_feature: MA Experiment 20000227 PARAMETER Experiment Name: At_Root-Tips-vs-Tops_P Parameter: Tissue Value: Root Tips vs. Root Tops
  misc_feature: MA Experiment ID: 20000234 Result: Down-regulated in Transcription
  misc_feature: MA Experiment 20000234 PARAMETER Experiment Name: At_Siliques_P Parameter: Age (day) Value: 21
  misc_feature: MA Experiment 20000234 PARAMETER Experiment Name: At_Siliques_P Parameter: Organism Value: A. thaliana
  misc_feature: MA Experiment 20000234 PARAMETER Experiment Name: At_Siliques_P Parameter: Plant Line Value: WS
  misc_feature: MA Experiment 20000234 PARAMETER Experiment Name: At_Siliques_P Parameter: Tissue Value: Less Than 5mm Siliques vs. Whole Plant
  misc_feature: MA Experiment ID: 20000235 Result: Down-regulated in Transcription
  misc_feature: MA Experiment 20000235 PARAMETER Experiment Name: At_Siliques_P Parameter: Age (day) Value: 21
  misc_feature: MA Experiment 20000235 PARAMETER Experiment Name: At_Siliques_P Parameter: Organism Value: A. thaliana
  misc_feature: MA Experiment 20000235 PARAMETER Experiment Name: At_Siliques_P Parameter: Plant Line Value: WS
  misc_feature: MA Experiment 20000235 PARAMETER Experiment Name: At_Siliques_P Parameter: Tissue Value: 5-10mm Siliques vs. Whole Plant
  misc_feature: MA Experiment ID: 20000264 Result: Down-regulated in Transcription
  misc_feature: MA Experiment 20000264 PARAMETER Experiment Name: At_Open_Flower_P Parameter: Age (day) Value: 21
  misc_feature: MA Experiment 20000264 PARAMETER Experiment Name: At_Open_Flower_P Parameter: Plant Line Value: WS
  misc_feature: MA Experiment 20000264 PARAMETER Experiment Name: At_Open_Flower_P Parameter: Tissue Value: Open Flower vs. Whole Plant
  misc_feature: MA Experiment ID: 20000265 Result: Down-regulated in Transcription
  misc_feature: MA Experiment 20000265 PARAMETER Experiment Name: At_Open_Flower_P Parameter: Age (day) Value: 21
  misc_feature: MA Experiment 20000265 PARAMETER Experiment Name: At_Open_Flower_P Parameter: Plant Line Value: WS
  misc_feature: MA Experiment 20000265 PARAMETER Experiment Name: At_Open_Flower_P Parameter: Tissue Value: Closed Flower vs. Whole Plant
  misc_feature: MA Experiment ID: 20000286 Result: Down-regulated in Transcription
  misc_feature: MA Experiment 20000286 PARAMETER Experiment Name: At_Open_Flower_P Parameter: Age (day) Value: 21
  misc_feature: MA Experiment 20000286 PARAMETER Experiment Name: At_Open_Flower_P Parameter: Plant Line Value: WS
  misc_feature: MA Experiment 20000286 PARAMETER Experiment Name: At_Open_Flower_P Parameter: Tissue Value: Half Open vs. Whole Plant
  misc_feature: MA Experiment ID: 20000436 Result: Down-regulated in Transcription
  misc_feature: MA Experiment 20000436 PARAMETER Experiment Name: At_Drought_P Parameter: Age (day) Value: 7
  misc_feature: MA Experiment 20000436 PARAMETER Experiment Name: At_Drought_P Parameter: Organism Value: A. thaliana
  misc_feature: MA Experiment 20000436 PARAMETER Experiment Name: At_Drought_P Parameter: Plant Line Value: WS
  misc_feature: MA Experiment 20000436 PARAMETER Experiment Name: At_Drought_P Parameter: Timepoint (hr) Value: 12
  misc_feature: MA Experiment 20000436 PARAMETER Experiment Name: At_Drought_P Parameter: Tissue Value: Whole Plant
  misc_feature: MA Experiment 20000436 PARAMETER Experiment Name: At_Drought_P Parameter: Treatment Value: Drought vs. No Drought
  misc_feature: MA Experiment ID: 20000438 Result: Down-regulated in Transcription
  misc_feature: MA Experiment 20000438 PARAMETER Experiment Name: At_Shoots__P Parameter: Age (day) Value: 14
  misc_feature: MA Experiment 20000438 PARAMETER Experiment Name: At_Shoots__P Parameter: Tissue Value: Shoots vs. Whole Plant
  misc_feature: MA Experiment ID: 20000445 Result: Down-regulated in Transcription
  misc_feature: MA Experiment 20000445 PARAMETER Experiment Name: At_100uM_NAA__P Parameter: Age (day) Value: 14
  misc_feature: MA Experiment 20000445 PARAMETER Experiment Name: At_100uM_NAA__P Parameter: Organism Value: A. thaliana
  misc_feature: MA Experiment 20000445 PARAMETER Experiment Name: At_100uM_NAA__P Parameter: Plant Line Value: WS
  misc_feature: MA Experiment 20000445 PARAMETER Experiment Name: At_100uM_NAA__P Parameter: Timepoint (hr) Value: 6
  misc_feature: MA Experiment 20000445 PARAMETER Experiment Name: At_100uM_NAA__P Parameter: Tissue Value: Aerial
  misc_feature: MA Experiment 20000445 PARAMETER Experiment Name: At_100uM_NAA__P Parameter: Treatment Value: 100uM NAA vs. No Treatment
  misc_feature: MA Experiment ID: 20000453 Result: Down-regulated in Transcription
  misc_feature: MA Experiment 20000453 PARAMETER Experiment Name: At_100uM_ABA_P Parameter: Age (day) Value: 15
  misc_feature: MA Experiment 20000453 PARAMETER Experiment Name: At_100uM_ABA_P Parameter: Organism Value: A. thaliana
  misc_feature: MA Experiment 20000453 PARAMETER Experiment Name: At_100uM_ABA_P Parameter: Plant Line Value: WS
  misc_feature: MA Experiment 20000453 PARAMETER Experiment Name: At_100uM_ABA_P Parameter: Timepoint (hr) Value: 24
  misc_feature: MA Experiment 20000453 PARAMETER Experiment Name: At_100uM_ABA_P Parameter: Tissue Value: Aerial
  misc_feature: MA Experiment 20000453 PARAMETER Experiment Name: At_100uM_ABA_P Parameter: Treatment Value: 100uM ABA vs. No Treatment
  misc_feature: MA Experiment ID: 20000456 Result: Up-regulated in Transcription
  misc_feature: MA Experiment 20000456 PARAMETER Experiment Name: At_100uM_BA_P Parameter: Age (day) Value: 14
  misc_feature: MA Experiment 20000456 PARAMETER Experiment Name: At_100uM_BA_P Parameter: Organism Value: A. thaliana
  misc_feature: MA Experiment 20000456 PARAMETER Experiment Name: At_100uM_BA_P Parameter: Plant Line Value: WS
  misc_feature: MA Experiment 20000456 PARAMETER Experiment Name: At_100uM_BA_P Parameter: Timepoint (hr) Value: 6
  misc_feature: MA Experiment 20000456 PARAMETER Experiment Name: At_100uM_BA_P Parameter: Tissue Value: Aerial
  misc_feature: MA Experiment 20000456 PARAMETER Experiment Name: At_100uM_BA_P Parameter: Treatment Value: 100uM BA vs. No Treatment
  misc_feature: MA Experiment ID: 20000709 Result: Up-regulated in Transcription
  misc_feature: MA Experiment 20000709 PARAMETER Experiment Name: At_15mM_NH4NO3_L-to-H_P Parameter: Age (hr) Value: 14
  misc_feature: MA Experiment 20000709 PARAMETER Experiment Name: At_15mM_NH4NO3_L-to-H_P Parameter: Organism Value: A. thaliana
  misc_feature: MA Experiment 20000709 PARAMETER Experiment Name: At_15mM_NH4NO3_L-to-H_P Parameter: Plant Line Value: WS
  misc_feature: MA Experiment 20000709 PARAMETER Experiment Name: At_15mM_NH4NO3_L-to-H_P Parameter: Timepoint (hr) Value: 4
  misc_feature: MA Experiment 20000709 PARAMETER Experiment Name: At_15mM_NH4NO3_L-to-H_P Parameter: Tissue Value: Aerial
  misc_feature: MA Experiment 20000709 PARAMETER Experiment Name: At_15mM_NH4NO3_L-to-H_P Parameter: Treatment Value: 15mM NH4NO3 vs. 30mM Mannitol
  misc_feature: MA Experiment ID: 20000794 Result: Down-regulated in Transcription
  misc_feature: MA Experiment 20000794 PARAMETER Experiment Name: At_Petals_P Parameter: Age (day) Value: 23-25 days
  misc_feature: MA Experiment 20000794 PARAMETER Experiment Name: At_Petals_P Parameter: Plant Line Value: WS
  misc_feature: MA Experiment 20000794 PARAMETER Experiment Name: At_Petals_P Parameter: Tissue Value: Petals vs. Whole plant
  misc_feature: MA Experiment ID: 20001248 Result: Down-regulated in Transcription
  misc_feature: MA Experiment 20001248 PARAMETER Experiment Name: At_Far-red-induction_P Parameter: Age (day) Value: 7
  misc_feature: MA Experiment 20001248 PARAMETER Experiment Name: At_Far-red-induction_P Parameter: Light Value: Far-red vs. White
  misc_feature: MA Experiment 20001248 PARAMETER Experiment Name: At_Far-red-induction_P Parameter: Organism Value: A. thaliana
  misc_feature: MA Experiment 20001248 PARAMETER Experiment Name: At_Far-red-induction_P Parameter: Plant Line Value: Columbia
  misc_feature: MA Experiment 20001248 PARAMETER Experiment Name: At_Far-red-induction_P Parameter: Timepoint (hr) Value: 4
  misc_feature: MA Experiment 20001248 PARAMETER Experiment Name: At_Far-red-induction_P Parameter: Tissue Value: Whole Plant
  misc_feature: MA Experiment ID: 20001450 Result: Down-regulated in Transcription
  misc_feature: MA Experiment 20001450 PARAMETER Experiment Name: At_Far-red-induction_P Parameter: Age (day) Value: 7
  misc_feature: MA Experiment 20001450 PARAMETER Experiment Name: At_Far-red-induction_P Parameter: Light Value: Far-red vs. White
  misc_feature: MA Experiment 20001450 PARAMETER Experiment Name: At_Far-red-induction_P Parameter: Organism Value: A. thaliana
  misc_feature: MA Experiment 20001450 PARAMETER Experiment Name: At_Far-red-induction_P Parameter: Plant Line Value: Columbia
  misc_feature: MA Experiment 20001450 PARAMETER Experiment Name: At_Far-red-induction_P Parameter: Timepoint (hr) Value: 8
  misc_feature: MA Experiment 20001450 PARAMETER Experiment Name: At_Far-red-induction_P Parameter: Tissue Value: Whole Plant
  misc_feature: MA Experiment ID: 20001755 Result: Up-regulated in Transcription
  misc_feature: MA Experiment 20001755 PARAMETER Experiment Name: At_50mM_NH4NO3_L-to-H_P Parameter: Timepoint (hr) Value: 2
  misc_feature: MA Experiment 20001755 PARAMETER Experiment Name: At_50mM_NH4NO3_L-to-H_P Parameter: Tissue Value: Leaf
  misc_feature: MA Experiment 20001755 PARAMETER Experiment Name: At_50mM_NH4NO3_L-to-H_P Parameter: Treatment Value: 50mM NH4NO3 vs 100mM Mannitol
  misc_feature: MA Experiment ID: 20001756 Result: Up-regulated in Transcription
  misc_feature: MA Experiment 20001756 PARAMETER Experiment Name: At_50mM_NH4NO3_L-to-H_P Parameter: Timepoint (hr) Value: 4
  misc_feature: MA Experiment 20001756 PARAMETER Experiment Name: At_50mM_NH4NO3_L-to-H_P Parameter: Tissue Value: Leaf
  misc_feature: MA Experiment 20001756 PARAMETER Experiment Name: At_50mM_NH4NO3_L-to-H_P Parameter: Treatment Value: 50mM NH4NO3 vs 100mM Mannitol
  misc_feature: MA Experiment ID: 20001757 Result: Up-regulated in Transcription
  misc_feature: MA Experiment 20001757 PARAMETER Experiment Name: At_50mM_NH4NO3_L-to-H_P Parameter: Timepoint (hr) Value: 6
  misc_feature: MA Experiment 20001757 PARAMETER Experiment Name: At_50mM_NH4NO3_L-to-H_P Parameter: Tissue Value: Leaf
  misc_feature: MA Experiment 20001757 PARAMETER Experiment Name: At_50mM_NH4NO3_L-to-H_P Parameter: Treatment Value: 50mM NH4NO3 vs 100mM Mannitol
ttttcaaaataaaaattgaaaaaaccaaaaagacacactcataaaagatttattttagagaacaaaaaaatcagaaatataaaaaactgtcttaaggaagagaaaggaacaaaagaaaacagatgtgagctcttcttcttcgtcttcttctctctattttattctcatcctctcctcacagttactataagctcgtctatggccagagacggtggtgtttcttgtttacgaaggtcggagatgatgagcgtcggtggtatcggaggaattgaatctgcgccgttggatttagatgaagttcatgtcttagccgttgatgacagtctcgttgatcgtattgtcatcgagagattgcttcgtattacttcctgcaaagttacggcggtagatagtggatggcgtgctctggaatttctagggttagataatgagaaagcttctgctgaattcgatagattgaaagttgatttgatcatcactgattactgtatgcctggaatgactggttatgagcttctcaagaagattaaggaatcgtccaatttcagagaagttccggttgtaatcatgtcgtcggagaatgtattgaccagaatcgacagatgccttgaggaaggtgctcaagatttcttattgaaaccggtgaaactcgccgacgtgaaacgtctgagaagtcatttaactaaagacgttaaactttccaacggaaacaaacggaagcttccggaagattctagttccgttaactcttcgcttcctccaccgtcacctccgttgactatctcgcctgaatcgtcgccgccgttgactgtttcgactgaatcgtcggattcgtctccgccgttatctccggtggagatcttttccacctcgccactttcatctccgatagacgatgaagatgatgacgtgttgacgtcgtcgtcggaggaatcgccgattcgacggcagaagatgaggagtcccggattagattagtggaactattctgggatgccgtgtaatattatctatctccgttaacttcgtttttacctctgacggtgtttttaattgcacgttgacttgacgccgtcaaattttatagatgtccctttaatctctcgcgcctccacgtgggccttttttccttttccttaaagcttttcgaatatcttttaattattttaatttctgcacaaagttacgtttttaactaaaggatccgcggccgctctagaactagtg

SEQ ID NO: 76356 - protein, 259 aa, Arabidopsis thaliana; identical to SEQ ID NO: 46156
  peptide (1)..(259): Ceres Seq. ID no. 7107685
  misc_feature (34)..(165): Pfam Name: Response regulator receiver domain Pfam Description: Response regulator receiver domain
  misc_feature (1)..(259): Homolog of NCBI NO: 15218550 NR Description: putative response regulator 3; protein id: supported by cDNA: gi_3273195, supported by cDNA: gi_3323582, by cDNA: gi_3953596 [Arabidopsis thaliana]
  misc_feature (1)..(230): Homolog of NCBI NO: 15218957 NR Description: response regulator 3; protein id: At1g59940.1, by cDNA: gi_3953594 [Arabidopsis thaliana]
  misc_feature (24)..(235): Homolog of NCBI NO: 13173408 NR Description: response regulator protein [Dianthus caryophyllus]
  misc_feature (33)..(255): Homolog of NCBI NO: 33330864 NR Description: type-A response regulator [Catharanthus roseus]
  misc_feature (32)..(186): Homolog of NCBI NO: 15242000 NR Description: response regulator 6 (ARR6); protein id: supported by cDNA: gi_3953600 [Arabidopsis thaliana]
  misc_feature (33)..(185): Homolog of NCBI NO: 15221927 NR Description: response regulator 5, putative; protein id: supported by cDNA: gi_3953602 [Arabidopsis thaliana]
  misc_feature (12)..(186): Homolog of NCBI NO: 15228338 NR Description: response reactor 2 (ATRR2); protein id: supported by cDNA: gi_18252910, supported by cDNA: gi_3273197, by cDNA: gi_3323580, supported by cDNA: gi_3953598 [Arabidopsis
  misc_feature (12)..(163): Homolog of NCBI NO: 11358763 NR Description: response regulator 5 [imported] - Arabidopsis >gi|3953599|dbj|BAA34727.1| response regulator 5 [Arabidopsis
  misc_feature (12)..(163): Homolog of NCBI NO: 11358906 NR Description: two-component response regulator homolog
  misc_feature (33)..(213): Homolog of NCBI NO: 15222035 NR Description: response regulator 7, putative; protein id: supported by cDNA: gi_11870064 [Arabidopsis thaliana]

SEQ ID NO: 76357 - protein, 245 aa, Arabidopsis thaliana; identical to SEQ ID NO: 46157
  peptide (1)..(245): Ceres Seq. ID no. 7107686
  misc_feature (20)..(151): Pfam Name: Response regulator receiver domain Pfam Description: Response regulator receiver domain
  misc_feature (1)..(245): Homolog of NCBI NO: 15218550 NR Description: putative response regulator 3; protein id: supported by cDNA: gi_3273195, supported by cDNA: gi_3323582, by cDNA: gi_3953596 [Arabidopsis thaliana]
  misc_feature (1)..(216): Homolog of NCBI NO: 15218957 NR Description: response regulator 3; protein id: At1g59940.1, by cDNA: gi_3953594 [Arabidopsis thaliana]
  misc_feature (10)..(221): Homolog of NCBI NO: 13173408 NR Description: response regulator protein [Dianthus caryophyllus]
  misc_feature (19)..(241): Homolog of NCBI NO: 33330864 NR Description: type-A response regulator [Catharanthus roseus]
  misc_feature (18)..(172): Homolog of NCBI NO: 15242000 NR Description: response regulator 6 (ARR6); protein id: supported by cDNA: gi_3953600 [Arabidopsis thaliana]
  misc_feature (19)..(171): Homolog of NCBI NO: 15221927 NR Description: response regulator 5, putative; protein id: supported by cDNA: gi_3953602 [Arabidopsis thaliana]
  misc_feature (1)..(172): Homolog of NCBI NO: 15228338 NR Description: response reactor 2 (ATRR2); protein id: supported by cDNA: gi_18252910, supported by cDNA: gi_3273197, by cDNA: gi_3323580, supported by cDNA: gi_3953598 [Arabidopsis
  misc_feature (1)..(149): Homolog of NCBI NO: 11358763 NR Description: response regulator 5 [imported] - Arabidopsis >gi|3953599|dbj|BAA34727.1| response regulator 5 [Arabidopsis
  misc_feature (1)..(149): Homolog of NCBI NO: 11358906 NR Description: two-component response regulator homolog
  misc_feature (19)..(199): Homolog of NCBI NO: 15222035 NR Description: response regulator 7, putative; protein id: supported by cDNA: gi_11870064 [Arabidopsis thaliana]

SEQ ID NO: 76358 - protein, 244 aa, Arabidopsis thaliana
  peptide (1)..(244): Ceres Seq. ID no. 7107687
  misc_feature (19)..(150): Pfam Name: Response regulator receiver domain Pfam Description: Response regulator receiver domain
  misc_feature (1)..(244): Homolog of NCBI NO: 15218550 NR Description: putative response regulator 3; protein id: supported by cDNA: gi_3273195, supported by cDNA: gi_3323582, by cDNA: gi_3953596 [Arabidopsis thaliana]
  misc_feature (1)..(215): Homolog of NCBI NO: 15218957 NR Description: response regulator 3; protein id: At1g59940.1, by cDNA: gi_3953594 [Arabidopsis thaliana]
  misc_feature (9)..(220): Homolog of NCBI NO: 13173408 NR Description: response regulator protein [Dianthus caryophyllus]
  misc_feature (18)..(240): Homolog of NCBI NO: 33330864 NR Description: type-A response regulator [Catharanthus roseus]
  misc_feature (17)..(171): Homolog of NCBI NO: 15242000 NR Description: response regulator 6 (ARR6); protein id: supported by cDNA: gi_3953600 [Arabidopsis thaliana]
  misc_feature (18)..(170): Homolog of NCBI NO: 15221927 NR Description: response regulator 5, putative; protein id: supported by cDNA: gi_3953602 [Arabidopsis thaliana]
  misc_feature (1)..(171): Homolog of NCBI NO: 15228338 NR Description: response reactor 2 (ATRR2); protein id: supported by cDNA: gi_18252910, supported by cDNA: gi_3273197, by cDNA: gi_3323580, supported by cDNA: gi_3953598 [Arabidopsis
  misc_feature (1)..(148): Homolog of NCBI NO: 11358763 NR Description: response regulator 5 [imported] - Arabidopsis >gi|3953599|dbj|BAA34727.1| response regulator 5 [Arabidopsis
  misc_feature (1)..(148): Homolog of NCBI NO: 11358906 NR Description: two-component response regulator homolog
  misc_feature (18)..(198): Homolog of NCBI NO: 15222035 NR Description: response regulator 7, putative; protein id: supported by cDNA: gi_11870064 [Arabidopsis thaliana]
MSVGGIGGIESAPLDLDEVHVLAVDDSLVDRIVIERLLRITSCKVTAVDSGWRALEFLGLDNEKASAEFDRLKVDLIITDYCMPGMTGYELLKKIKESSNFREVPVVIMSSENVLTRIDRCLEEGAQDFLLKPVKLADVKRLRSHLTKDVKLSNGNKRKLPEDSSSVNSSLPPPSPPLTISPESSPPLTVSTESSDSSPPLSPVEIFSTSPLSSPIDDEDDDVLTSSSEESPIRRQKMRSPGLD

SEQ ID NO: 76359 - DNA, 937 bp, Arabidopsis thaliana
  misc_feature (1)..(937): Ceres Seq. ID no. 7107688
  misc_feature: MA Experiment ID: 108569 Result: Up-regulated in Transcription
  misc_feature: MA Experiment 108569 PARAMETER Experiment Name: At_0.001%_MeJA__cDNA_P Parameter: Timepoint (hr) Value: 6
  misc_feature: MA Experiment 108569 PARAMETER Experiment Name: At_0.001%_MeJA__cDNA_P Parameter: Tissue Value: Aerial
  misc_feature: MA Experiment 108569 PARAMETER Experiment Name: At_0.001%_MeJA__cDNA_P Parameter: Treatment Value: 0.001% MeJA vs. No Treatment
  misc_feature: MA Experiment ID: 108573 Result: Up-regulated in Transcription
  misc_feature: MA Experiment 108573 PARAMETER Experiment Name: At_Drought_cDNA_P Parameter: Timepoint (hr) Value: 6
  misc_feature: MA Experiment 108573 PARAMETER Experiment Name: At_Drought_cDNA_P Parameter: Tissue Value: Aerial
  misc_feature: MA Experiment 108573 PARAMETER Experiment Name: At_Drought_cDNA_P Parameter: Treatment Value: Drought vs. No Drought
  misc_feature: MA Experiment ID: 108574 Result: Up-regulated in Transcription
  misc_feature: MA Experiment 108574 PARAMETER Experiment Name: At_Wounding__cDNA_P Parameter: Timepoint (hr) Value: 1
  misc_feature: MA Experiment 108574 PARAMETER Experiment Name: At_Wounding__cDNA_P Parameter: Tissue Value: Aerial
  misc_feature: MA Experiment 108574 PARAMETER Experiment Name: At_Wounding__cDNA_P Parameter: Treatment Value: Wounding vs. No Wounding
  misc_feature: MA Experiment ID: 108579 Result: Up-regulated in Transcription
  misc_feature: MA Experiment 108579 PARAMETER Experiment Name: At_4deg_Cold_cDNA_P Parameter: Temperature (deg C) Value: 4 vs. 22
  misc_feature: MA Experiment 108579 PARAMETER Experiment Name: At_4deg_Cold_cDNA_P Parameter: Timepoint (hr) Value: 6
  misc_feature: MA Experiment 108579 PARAMETER Experiment Name: At_4deg_Cold_cDNA_P Parameter: Tissue Value: Aerial
  misc_feature: MA Experiment ID: 108595 Result: Up-regulated in Transcription
  misc_feature: MA Experiment 108595 PARAMETER Experiment Name: At_Ler-pi_Ovule_cDNA_P Parameter: Plant Line Value: null
  misc_feature: MA Experiment ID: 20000069 Result: Up-regulated in Transcription
  misc_feature: MA Experiment 20000069 PARAMETER Experiment Name: At_100uM_ABA_Mutants_cDNA_P Parameter: Plant Line Value: CS23
  misc_feature: MA Experiment 20000069 PARAMETER Experiment Name: At_100uM_ABA_Mutants_cDNA_P Parameter: Timepoint (hr) Value: 6
  misc_feature: MA Experiment 20000069 PARAMETER Experiment Name: At_100uM_ABA_Mutants_cDNA_P Parameter: Tissue Value: Aerial
  misc_feature: MA Experiment 20000069 PARAMETER Experiment Name: At_100uM_ABA_Mutants_cDNA_P Parameter: Treatment Value: 100uM ABA vs. No Treatment
  misc_feature: MA Experiment ID: 20000071 Result: Up-regulated in Transcription
  misc_feature: MA Experiment 20000071 PARAMETER Experiment Name: At_100uM_ABA_Mutants_cDNA_P Parameter: Plant Line Value: CS8104
  misc_feature: MA Experiment 20000071 PARAMETER Experiment Name: At_100uM_ABA_Mutants_cDNA_P Parameter: Timepoint (hr) Value: 6
  misc_feature: MA Experiment 20000071 PARAMETER Experiment Name: At_100uM_ABA_Mutants_cDNA_P Parameter: Tissue Value: Aerial
  misc_feature: MA Experiment 20000071 PARAMETER Experiment Name: At_100uM_ABA_Mutants_cDNA_P Parameter: Treatment Value: 100uM ABA vs. No Treatment
  misc_feature: MA Experiment ID: 20000089 Result: Down-regulated in Transcription
  misc_feature: MA Experiment ID: 20000185 Result: Down-regulated in Transcription
  misc_feature: MA Experiment 20000185 PARAMETER Experiment Name: At_Roots__P Parameter: Age (day) Value: 7 vs. 21
  misc_feature: MA Experiment 20000185 PARAMETER Experiment Name: At_Roots__P Parameter: Organism Value: A. thaliana
  misc_feature: MA Experiment 20000185 PARAMETER Experiment Name: At_Roots__P Parameter: Tissue Value: Roots vs. Whole Plant
  misc_feature: MA Experiment ID: 20000224 Result: Down-regulated in Transcription
  misc_feature: MA Experiment ID: 20000227 Result: Down-regulated in Transcription
  misc_feature: MA Experiment 20000227 PARAMETER Experiment Name: At_Root-Tips-vs-Tops_P Parameter: Tissue Value: Root Tips vs. Root Tops
  misc_feature: MA Experiment ID: 20000234 Result: Down-regulated in Transcription
  misc_feature: MA Experiment 20000234 PARAMETER Experiment Name: At_Siliques_P Parameter: Age (day) Value: 21
  misc_feature: MA Experiment 20000234 PARAMETER Experiment Name: At_Siliques_P Parameter: Organism Value: A. thaliana
  misc_feature: MA Experiment 20000234 PARAMETER Experiment Name: At_Siliques_P Parameter: Plant Line Value: WS
  misc_feature: MA Experiment 20000234 PARAMETER Experiment Name: At_Siliques_P Parameter: Tissue Value: Less Than 5mm Siliques vs. Whole Plant
  misc_feature: MA Experiment ID: 20000235 Result: Down-regulated in Transcription
  misc_feature: MA Experiment 20000235 PARAMETER Experiment Name: At_Siliques_P Parameter: Age (day) Value: 21
  misc_feature: MA Experiment 20000235 PARAMETER Experiment Name: At_Siliques_P Parameter: Organism Value: A. thaliana
  misc_feature: MA Experiment 20000235 PARAMETER Experiment Name: At_Siliques_P Parameter: Plant Line Value: WS
  misc_feature: MA Experiment 20000235 PARAMETER Experiment Name: At_Siliques_P Parameter: Tissue Value: 5-10mm Siliques vs. Whole Plant
  misc_feature: MA Experiment ID: 20000264 Result: Down-regulated in Transcription
  misc_feature: MA Experiment 20000264 PARAMETER Experiment Name: At_Open_Flower_P Parameter: Age (day) Value: 21
  misc_feature: MA Experiment 20000264 PARAMETER Experiment Name: At_Open_Flower_P Parameter: Plant Line Value: WS
  misc_feature: MA Experiment 20000264 PARAMETER Experiment Name: At_Open_Flower_P Parameter: Tissue Value: Open Flower vs. Whole Plant
  misc_feature: MA Experiment ID: 20000265 Result: Down-regulated in Transcription
  misc_feature: MA Experiment 20000265 PARAMETER Experiment Name: At_Open_Flower_P Parameter: Age (day) Value: 21
  misc_feature: MA Experiment 20000265 PARAMETER Experiment Name: At_Open_Flower_P Parameter: Plant Line Value: WS
  misc_feature: MA Experiment 20000265 PARAMETER Experiment Name: At_Open_Flower_P Parameter: Tissue Value: Closed Flower vs. Whole Plant
  misc_feature: MA Experiment ID: 20000286 Result: Down-regulated in Transcription
  misc_feature: MA Experiment 20000286 PARAMETER Experiment Name: At_Open_Flower_P Parameter: Age (day) Value: 21
  misc_feature: MA Experiment 20000286 PARAMETER Experiment Name: At_Open_Flower_P Parameter: Plant Line Value: WS
  misc_feature: MA Experiment 20000286 PARAMETER Experiment Name: At_Open_Flower_P Parameter: Tissue Value: Half Open vs. Whole Plant
  misc_feature: MA Experiment ID: 20000436 Result: Up-regulated in Transcription
  misc_feature: MA Experiment 20000436 PARAMETER Experiment Name: At_Drought_P Parameter: Age (day) Value: 7
  misc_feature: MA Experiment 20000436 PARAMETER Experiment Name: At_Drought_P Parameter: Organism Value: A. thaliana
  misc_feature: MA Experiment 20000436 PARAMETER Experiment Name: At_Drought_P Parameter: Plant Line Value: WS
  misc_feature: MA Experiment 20000436 PARAMETER Experiment Name: At_Drought_P Parameter: Timepoint (hr) Value: 12
  misc_feature: MA Experiment 20000436 PARAMETER Experiment Name: At_Drought_P Parameter: Tissue Value: Whole Plant
  misc_feature: MA Experiment 20000436 PARAMETER Experiment Name: At_Drought_P Parameter: Treatment Value: Drought vs. No Drought
  misc_feature: MA Experiment ID: 20000438 Result: Down-regulated in Transcription
  misc_feature: MA Experiment 20000438 PARAMETER Experiment Name: At_Shoots__P Parameter: Age (day) Value: 14
  misc_feature: MA Experiment 20000438 PARAMETER Experiment Name: At_Shoots__P Parameter: Tissue Value: Shoots vs. Whole Plant
  misc_feature: MA Experiment ID: 20000441 Result: Up-regulated in Transcription
  misc_feature: MA Experiment 20000441 PARAMETER Experiment Name: At_1uM_BR-BRZ__P Parameter: Tissue Value: Shoot Apices
  misc_feature: MA Experiment 20000441 PARAMETER Experiment Name: At_1uM_BR-BRZ__P Parameter: Treatment Value: 1uM BR vs. No Treatment
  misc_feature: MA Experiment ID: 20000495 Result: Down-regulated in Transcription
  misc_feature: MA Experiment 20000495 PARAMETER Experiment Name: At_Guard_Cells_P Parameter: Harvest Date Value: 8/2/2002
  misc_feature: MA Experiment 20000495 PARAMETER Experiment Name: At_Guard_Cells_P Parameter: Organism Value: A. thaliana
  misc_feature: MA Experiment 20000495 PARAMETER Experiment Name: At_Guard_Cells_P Parameter: Tissue Value: Guard Cells vs. Leaves
  misc_feature: MA Experiment ID: 20000574 Result: Down-regulated in Transcription
  misc_feature: MA Experiment 20000574 PARAMETER Experiment Name: At_100uM_ABA_Mutants__P Parameter: Organism Value: A. thaliana
  misc_feature: MA Experiment 20000574 PARAMETER Experiment Name: At_100uM_ABA_Mutants__P Parameter: Plant Line Value: CS23 vs. Ler wt
  misc_feature: MA Experiment 20000574 PARAMETER Experiment Name: At_100uM_ABA_Mutants__P Parameter: Timepoint (hr) Value: N/A
  misc_feature: MA Experiment 20000574 PARAMETER Experiment Name: At_100uM_ABA_Mutants__P Parameter: Tissue Value: Whole Plant
  misc_feature: MA Experiment 20000574 PARAMETER Experiment Name: At_100uM_ABA_Mutants__P Parameter: Treatment Value: None
  misc_feature: MA Experiment ID: 20000794 Result: Down-regulated in Transcription
  misc_feature: MA Experiment 20000794 PARAMETER Experiment Name: At_Petals_P Parameter: Age (day) Value: 23-25 days
  misc_feature: MA Experiment 20000794 PARAMETER Experiment Name: At_Petals_P Parameter: Plant Line Value: WS
  misc_feature: MA Experiment 20000794 PARAMETER Experiment Name: At_Petals_P Parameter: Tissue Value: Petals vs. Whole plant
  misc_feature: MA Experiment ID: 20001247 Result: Up-regulated in Transcription
  misc_feature: MA Experiment 20001247 PARAMETER Experiment Name: At_Far-red-induction_P Parameter: Age (day) Value: 7
  misc_feature: MA Experiment 20001247 PARAMETER Experiment Name: At_Far-red-induction_P Parameter: Light Value: Far-red vs. White
  misc_feature: MA Experiment 20001247 PARAMETER Experiment Name: At_Far-red-induction_P Parameter: Organism Value: A. thaliana
  misc_feature: MA Experiment 20001247 PARAMETER Experiment Name: At_Far-red-induction_P Parameter: Plant Line Value: Columbia
  misc_feature: MA Experiment 20001247 PARAMETER Experiment Name: At_Far-red-induction_P Parameter: Timepoint (hr) Value: 1
  misc_feature: MA Experiment 20001247 PARAMETER Experiment Name: At_Far-red-induction_P Parameter: Tissue Value: Whole Plant
gtcgacccacgcgtccgactctctctctaatctatctatccgagaatggccaagatgggcttgaaacccgacccggctactactaaccagacccacaataatgccaaggagattcgttacagaggcgttaggaagcgtccttggggccgttatgccgccgagatccgagatccgggcaagaaaacccgcgtctggcttggcactttcgatacggctgaagaggcggcgcgtgcttacgatacggcggcgcgtgattttcgtggtgctaaggctaagaccaatttcccaacttttctcgagctgagtgaccagaaggtccctaccggtttcgcgcgtagccctagccagagcagcacgctcgactgtgcttctcctccgacgttagttgtgccttcagcgacggctgggaatgttcccccgcagctcgagcttagtctcggcggaggaggcggcggctcgtgttatcagatcccgatgtcgcgtcctgtctactttttggacctgatggggatcggtaacgtaggtcgtggtcagcctcctcctgtgacatcggcgtttagatcgccggtggtgcatgttgcgacgaagatggcttgtggtgcccaaagcgactctgattcgtcatcggtcgttgatttcgaaggtgggatggagaagagatctcagactgttagatctagatcttaatttgcctcctccatcggaacaggcctgagcttttaacggtgtcgtttcaattcgaagcgcatgcgtttcttcttctttttgagctgtgaaaattcgttttctcatagtttttcctctctctctctctcagtctaaatttattaccagtttttagaaagaaaaaacagattaaatctgagagagaaaaatataattttagctgacatggatcgttatgtacatattattacataaccggagatctgaactg

SEQ ID NO: 76360 - protein, 213 aa, Arabidopsis thaliana
  peptide (1)..(213): Ceres Seq. ID no. 7107689
  misc_feature (22)..(86): Pfam Name: AP2 domain Pfam Description: AP2 domain
  misc_feature (1)..(207): Homolog of NCBI NO: 15232526 NR Description: ethylene responsive element binding factor 4 protein id: At3g15210.1, supported by cDNA: 22775., supported by gi_2281634, supported by cDNA: gi_3434972 [Arabidopsis thaliana]
  misc_feature (1)..(213): Homolog of NCBI NO: 2281635 NR Description: AP2 domain containing protein RAP2.5 [Arabidopsis
  misc_feature (1)..(153): Homolog of NCBI NO: 20340233 NR Description: ethylene responsive element binding factor 4-like
  misc_feature (179)..(205): Homolog of NCBI NO: 20340233 NR Description: ethylene responsive element binding factor 4-like
  misc_feature (4)..(113): Homolog of NCBI NO: 15219215 NR Description: ethylene responsive element binding factor 8; id: At1g53170.1, supported by cDNA: gi_10567107 [Arabidopsis
  misc_feature (151)..(206): Homolog of NCBI NO: 15219215 NR Description: ethylene responsive element binding factor 8; id: At1g53170.1, supported by cDNA: gi_10567107 [Arabidopsis
  misc_feature (20)..(198): Homolog of NCBI NO: 30526297 NR Description: ethylene response factor 2 [Lycopersicon
  misc_feature (3)..(198): Homolog of NCBI NO: 28274832 NR Description: ethylene response factor 3 [Lycopersicon
  misc_feature (21)..(147): Homolog of NCBI NO: 4099921 NR Description: EREBP-3 homolog [Stylosanthes hamata]
  misc_feature (25)..(197): Homolog of NCBI NO: 34908900 NR Description: ethylene-responsive element binding factor 3
MAKMGLKPDPATTNQTHNNAKEIRYRGVRKRPWGRYAAEIRDPGKKTRVWLGTFDTAEEAARAYDTAARDFRGAKAKTNFPTFLELSDQKVPTGFARSPSQSSTLDCASPPTLVVPSATAGNVPPQLELSLGGGGGGSCYQIPMSRPVYFLDLMGIGNVGRGQPPPVTSAFRSPVVHVATKMACGAQSDSDSSSVVDFEGGMEKRSQTVRSRS

SEQ ID NO: 76361 - protein, 210 aa, Arabidopsis thaliana
  peptide (1)..(210): Ceres Seq. ID no. 7107690
  misc_feature (19)..(83): Pfam Name: AP2 domain Pfam Description: AP2 domain
  misc_feature (1)..(204): Homolog of NCBI NO: 15232526 NR Description: ethylene responsive element binding factor 4 protein id: At3g15210.1, supported by cDNA: 22775., supported by gi_2281634, supported by cDNA: gi_3434972 [Arabidopsis thaliana]
  misc_feature (1)..(210): Homolog of NCBI NO: 2281635 NR Description: AP2 domain containing protein RAP2.5 [Arabidopsis
  misc_feature (1)..(150): Homolog of NCBI NO: 20340233 NR Description: ethylene responsive element binding factor 4-like
  misc_feature (176)..(202): Homolog of NCBI NO: 20340233 NR Description: ethylene responsive element binding factor 4-like
  misc_feature (1)..(110): Homolog of NCBI NO: 15219215 NR Description: ethylene responsive element binding factor 8; id: At1g53170.1, supported by cDNA: gi_10567107 [Arabidopsis
  misc_feature (148)..(203): Homolog of NCBI NO: 15219215 NR Description: ethylene responsive element binding factor 8; id: At1g53170.1, supported by cDNA: gi_10567107 [Arabidopsis
  misc_feature (17)..(195): Homolog of NCBI NO: 30526297 NR Description: ethylene response factor 2 [Lycopersicon
  misc_feature (1)..(195): Homolog of NCBI NO: 28274832 NR Description: ethylene response factor 3 [Lycopersicon
  misc_feature (18)..(144): Homolog of NCBI NO: 4099921 NR Description: EREBP-3 homolog [Stylosanthes hamata]
  misc_feature (22)..(194): Homolog of NCBI NO: 34908900 NR Description: ethylene-responsive element binding factor 3
MGLKPDPATTNQTHNNAKEIRYRGVRKRPWGRYAAEIRDPGKKTRVWLGTFDTAEEAARAYDTAARDFRGAKAKTNFPTFLELSDQKVPTGFARSPSQSSTLDCASPPTLVVPSATAGNVPPQLELSLGGGGGGSCYQIPMSRPVYFLDLMGIGNVGRGQPPPVTSAFRSPVVHVATKMACGAQSDSDSSSVVDFEGGMEKRSQTVRSRS

SEQ ID NO: 76362 - DNA, 835 bp, Arabidopsis thaliana
  misc_feature (1)..(835): Ceres Seq. ID no. 7107698
  misc_feature: MA Experiment ID: 108435 Result: Down-regulated in Transcription
  misc_feature: MA Experiment 108435 PARAMETER Experiment Name: At_stm_Mutants_cDNA_P Parameter: Plant Line Value: wt Landsburg vs stm
  misc_feature: MA Experiment 108435 PARAMETER Experiment Name: At_stm_Mutants_cDNA_P Parameter: Tissue Value: Shoot Apical Meristem Region
  misc_feature: MA Experiment ID: 108463 Result: Down-regulated in Transcription
  misc_feature: MA Experiment 108463 PARAMETER Experiment Name: At_Germinating_Seeds_cDNA_P Parameter: Age (day) Value: 3 vs. 0
  misc_feature: MA Experiment 108463 PARAMETER Experiment Name: At_Germinating_Seeds_cDNA_P Parameter: Tissue Value: Germinating Seeds
  misc_feature: MA Experiment ID: 108488 Result: Up-regulated in Transcription
  misc_feature: MA Experiment ID: 108573 Result: Up-regulated in Transcription
  misc_feature: MA Experiment 108573 PARAMETER Experiment Name: At_Drought_cDNA_P Parameter: Timepoint (hr) Value: 6
  misc_feature: MA Experiment 108573 PARAMETER Experiment Name: At_Drought_cDNA_P Parameter: Tissue Value: Aerial
  misc_feature: MA Experiment 108573 PARAMETER Experiment Name: At_Drought_cDNA_P Parameter: Treatment Value: Drought vs. No Drought
  misc_feature: MA Experiment ID: 20000068 Result: Down-regulated in Transcription
  misc_feature: MA Experiment ID: 20000071 Result: Down-regulated in Transcription
  misc_feature: MA Experiment 20000071 PARAMETER Experiment Name: At_100uM_ABA_Mutants_cDNA_P Parameter: Plant Line Value: CS8104
  misc_feature: MA Experiment 20000071 PARAMETER Experiment Name: At_100uM_ABA_Mutants_cDNA_P Parameter: Timepoint (hr) Value: 6
  misc_feature: MA Experiment 20000071 PARAMETER Experiment Name: At_100uM_ABA_Mutants_cDNA_P Parameter: Tissue Value: Aerial
  misc_feature: MA Experiment 20000071 PARAMETER Experiment Name: At_100uM_ABA_Mutants_cDNA_P Parameter: Treatment Value: 100uM ABA vs. No Treatment
  misc_feature: MA Experiment ID: 20000072 Result: Down-regulated in Transcription
  misc_feature: MA Experiment 20000072 PARAMETER Experiment Name: At_100uM_ABA_Mutants_cDNA_P Parameter: Plant Line Value: CS8105
  misc_feature: MA Experiment 20000072 PARAMETER Experiment Name: At_100uM_ABA_Mutants_cDNA_P Parameter: Timepoint (hr) Value: 6
  misc_feature: MA Experiment 20000072 PARAMETER Experiment Name: At_100uM_ABA_Mutants_cDNA_P Parameter: Tissue Value: Aerial
  misc_feature: MA Experiment 20000072 PARAMETER Experiment Name: At_100uM_ABA_Mutants_cDNA_P Parameter: Treatment Value: 100uM ABA vs. No Treatment
  misc_feature: MA Experiment ID: 20000117 Result: Down-regulated in Transcription
  misc_feature: MA Experiment 20000117 PARAMETER Experiment Name: At_100uM_ABA_Mutants_cDNA_P Parameter: Plant Line Value: Columbia
  misc_feature: MA Experiment 20000117 PARAMETER Experiment Name: At_100uM_ABA_Mutants_cDNA_P Parameter: Timepoint (hr) Value: 6
  misc_feature: MA Experiment 20000117 PARAMETER Experiment Name: At_100uM_ABA_Mutants_cDNA_P Parameter: Tissue Value: Aerial
  misc_feature: MA Experiment 20000117 PARAMETER Experiment Name: At_100uM_ABA_Mutants_cDNA_P Parameter: Treatment Value: 100uM ABA vs. No Treatment
  misc_feature: MA Experiment ID: 20000180 Result: Up-regulated in Transcription
  misc_feature: MA Experiment 20000180 PARAMETER Experiment Name: At_Germinating_Seeds_P Parameter: Age (hr) Value: 24 vs. 0
  misc_feature: MA Experiment 20000180 PARAMETER Experiment Name: At_Germinating_Seeds_P Parameter: Tissue Value: Germinating Seeds
  misc_feature: MA Experiment ID: 20000184 Result: Up-regulated in Transcription
  misc_feature: MA Experiment 20000184 PARAMETER Experiment Name: At_Shoots__P Parameter: Age (day) Value: 7
  misc_feature: MA Experiment 20000184 PARAMETER Experiment Name: At_Shoots__P Parameter: Tissue Value: Shoots vs. Whole Plant
  misc_feature: MA Experiment ID: 20000185 Result: Down-regulated in Transcription
  misc_feature: MA Experiment 20000185 PARAMETER Experiment Name: At_Roots__P Parameter: Age (day) Value: 7 vs. 21
  misc_feature: MA Experiment 20000185 PARAMETER Experiment Name: At_Roots__P Parameter: Organism Value: A. thaliana
  misc_feature: MA Experiment 20000185 PARAMETER Experiment Name: At_Roots__P Parameter: Tissue Value: Roots vs. Whole Plant
  misc_feature: MA Experiment ID: 20000264 Result: Down-regulated in Transcription
  misc_feature: MA Experiment 20000264 PARAMETER Experiment Name: At_Open_Flower_P Parameter: Age (day) Value: 21
  misc_feature: MA Experiment 20000264 PARAMETER Experiment Name: At_Open_Flower_P Parameter: Plant Line Value: WS
  misc_feature: MA Experiment 20000264 PARAMETER Experiment Name: At_Open_Flower_P Parameter: Tissue Value: Open Flower vs. Whole Plant
  misc_feature: MA Experiment ID: 20000269 Result: Up-regulated in Transcription
  misc_feature: MA Experiment 20000269 PARAMETER Experiment Name: At_1mM_KNO3_L-vs-H_Roots_P Parameter: Age (day) Value: 7,10,12
  misc_feature: MA Experiment 20000269 PARAMETER Experiment Name: At_1mM_KNO3_L-vs-H_Roots_P Parameter: Organism Value: A. thaliana
  misc_feature: MA Experiment 20000269 PARAMETER Experiment Name: At_1mM_KNO3_L-vs-H_Roots_P Parameter: Plant Line Value: WS
  misc_feature: MA Experiment 20000269 PARAMETER Experiment Name: At_1mM_KNO3_L-vs-H_Roots_P Parameter: Timepoint (day) Value: 7,10,12
  misc_feature: MA Experiment 20000269 PARAMETER Experiment Name: At_1mM_KNO3_L-vs-H_Roots_P Parameter: Tissue Value: Roots
  misc_feature: MA Experiment 20000269 PARAMETER Experiment Name: At_1mM_KNO3_L-vs-H_Roots_P Parameter: Treatment Value: 1mM KNO3 vs. 50mM KNO3
  misc_feature: MA Experiment ID: 20000286 Result: Down-regulated in Transcription
  misc_feature: MA Experiment 20000286 PARAMETER Experiment Name: At_Open_Flower_P Parameter: Age (day) Value: 21
  misc_feature: MA Experiment 20000286 PARAMETER Experiment Name: At_Open_Flower_P Parameter: Plant Line Value: WS
  misc_feature: MA Experiment 20000286 PARAMETER Experiment Name: At_Open_Flower_P Parameter: Tissue Value: Half Open vs. Whole Plant
  misc_feature: MA Experiment ID: 20000436 Result: Down-regulated in Transcription
  misc_feature: MA Experiment 20000436 PARAMETER Experiment Name: At_Drought_P Parameter: Age (day) Value: 7
  misc_feature: MA Experiment 20000436 PARAMETER Experiment Name: At_Drought_P Parameter: Organism Value: A. thaliana
  misc_feature: MA Experiment 20000436 PARAMETER Experiment Name: At_Drought_P Parameter: Plant Line Value: WS
  misc_feature: MA Experiment 20000436 PARAMETER Experiment Name: At_Drought_P Parameter: Timepoint (hr) Value: 12
  misc_feature: MA Experiment 20000436 PARAMETER Experiment Name: At_Drought_P Parameter: Tissue Value: Whole Plant
  misc_feature: MA Experiment 20000436 PARAMETER Experiment Name: At_Drought_P Parameter: Treatment Value: Drought vs. No Drought
  misc_feature: MA Experiment ID: 20000437 Result: Down-regulated in Transcription
  misc_feature: MA Experiment 20000437 PARAMETER Experiment Name: At_Drought_P Parameter: Age (day) Value: 8
  misc_feature: MA Experiment 20000437 PARAMETER Experiment Name: At_Drought_P Parameter: Organism Value: A. thaliana
  misc_feature: MA Experiment 20000437 PARAMETER Experiment Name: At_Drought_P Parameter: Plant Line Value: WS
  misc_feature: MA Experiment 20000437 PARAMETER Experiment Name: At_Drought_P Parameter: Timepoint (hr) Value: 24
  misc_feature: MA Experiment 20000437 PARAMETER Experiment Name: At_Drought_P Parameter: Tissue Value: Whole Plant
  misc_feature: MA Experiment 20000437 PARAMETER Experiment Name: At_Drought_P Parameter: Treatment Value: Drought vs. No Drought
  misc_feature: MA Experiment ID: 20000439 Result: Down-regulated in Transcription
  misc_feature: MA Experiment 20000439 PARAMETER Experiment Name: At_Roots__P Parameter: Age (day) Value: 14 vs. 21
  misc_feature: MA Experiment 20000439 PARAMETER Experiment Name: At_Roots__P Parameter: Organism Value: A. thaliana
  misc_feature: MA Experiment 20000439 PARAMETER Experiment Name: At_Roots__P Parameter: Tissue Value: Roots vs. Whole Plant
  misc_feature: MA Experiment ID: 20000445 Result: Down-regulated in Transcription
  misc_feature: MA Experiment 20000445 PARAMETER Experiment Name: At_100uM_NAA__P Parameter: Age (day) Value: 14
  misc_feature: MA Experiment 20000445 PARAMETER Experiment Name: At_100uM_NAA__P Parameter: Organism Value: A. thaliana
  misc_feature: MA Experiment 20000445 PARAMETER Experiment Name: At_100uM_NAA__P Parameter: Plant Line Value: WS
  misc_feature: MA Experiment 20000445 PARAMETER Experiment Name: At_100uM_NAA__P Parameter: Timepoint (hr) Value: 6
  misc_feature: MA Experiment 20000445 PARAMETER Experiment Name: At_100uM_NAA__P Parameter: Tissue Value: Aerial
  misc_feature: MA Experiment 20000445 PARAMETER Experiment Name: At_100uM_NAA__P Parameter: Treatment Value: 100uM NAA vs. No Treatment
  misc_feature: MA Experiment ID: 20000527 Result: Up-regulated in Transcription
  misc_feature: MA Experiment 20000527 PARAMETER Experiment Name: At_10percent_PEG_P Parameter: Age (day) Value: 20
  misc_feature: MA Experiment 20000527 PARAMETER Experiment Name: At_10percent_PEG_P Parameter: Organism Value: A. thaliana
  misc_feature: MA Experiment 20000527 PARAMETER Experiment Name: At_10percent_PEG_P Parameter: Plant Line Value: WS
  misc_feature: MA Experiment 20000527 PARAMETER Experiment Name: At_10percent_PEG_P Parameter: Timepoint (day) Value: 20
  misc_feature: MA Experiment 20000527 PARAMETER Experiment Name: At_10percent_PEG_P Parameter: Tissue Value: Whole Plant
  misc_feature: MA Experiment 20000527 PARAMETER Experiment Name: At_10percent_PEG_P Parameter: Treatment Value: 10percent PEG vs. No Treatment
  misc_feature: MA Experiment ID: 20000574 Result: Up-regulated in Transcription
  misc_feature: MA Experiment 20000574 PARAMETER Experiment Name: At_100uM_ABA_Mutants__P Parameter: Organism Value: A. thaliana
  misc_feature: MA Experiment 20000574 PARAMETER Experiment Name: At_100uM_ABA_Mutants__P Parameter: Plant Line Value: CS23 vs. Ler wt
  misc_feature: MA Experiment 20000574 PARAMETER Experiment Name: At_100uM_ABA_Mutants__P Parameter: Timepoint (hr) Value: N/A
  misc_feature: MA Experiment 20000574 PARAMETER Experiment Name: At_100uM_ABA_Mutants__P Parameter: Tissue Value: Whole Plant
  misc_feature: MA Experiment 20000574 PARAMETER Experiment Name: At_100uM_ABA_Mutants__P Parameter: Treatment Value: None
  misc_feature: MA Experiment ID: 20000576 Result: Up-regulated in Transcription
  misc_feature: MA Experiment 20000576 PARAMETER Experiment Name: At_100uM_ABA_Mutants__P Parameter: Organism Value: A. thaliana
  misc_feature: MA Experiment 20000576 PARAMETER Experiment Name: At_100uM_ABA_Mutants__P Parameter: Plant Line Value: CS23
  misc_feature: MA Experiment 20000576 PARAMETER Experiment Name: At_100uM_ABA_Mutants__P Parameter: Timepoint (hr) Value: 6
  misc_feature: MA Experiment 20000576 PARAMETER Experiment Name: At_100uM_ABA_Mutants__P Parameter: Tissue Value: Whole Plant
  misc_feature: MA Experiment 20000576 PARAMETER Experiment Name: At_100uM_ABA_Mutants__P Parameter: Treatment Value: 1uM ABA vs. No Treatment
  misc_feature: MA Experiment ID: 20000794 Result: Down-regulated in Transcription
  misc_feature: MA Experiment 20000794 PARAMETER Experiment Name: At_Petals_P Parameter: Age (day) Value: 23-25 days
  misc_feature: MA Experiment 20000794 PARAMETER Experiment Name: At_Petals_P Parameter: Plant Line Value: WS
  misc_feature: MA Experiment 20000794 PARAMETER Experiment Name: At_Petals_P Parameter: Tissue Value: Petals vs. Whole plant
  misc_feature: MA Experiment ID: 20001553 Result: Down-regulated in Transcription
  misc_feature: MA Experiment 20001553 PARAMETER Experiment Name: At_Drought_Soil_Dry_P Parameter: Age (day) Value: 19
  misc_feature: MA Experiment 20001553 PARAMETER Experiment Name: At_Drought_Soil_Dry_P Parameter: Organism Value: A. thaliana
  misc_feature: MA Experiment 20001553 PARAMETER Experiment Name: At_Drought_Soil_Dry_P Parameter: Plant Line Value: WS
  misc_feature: MA Experiment 20001553 PARAMETER Experiment Name: At_Drought_Soil_Dry_P Parameter: Post Timepoint (hr) Value: None
  misc_feature: MA Experiment 20001553 PARAMETER Experiment Name: At_Drought_Soil_Dry_P Parameter: Post-Treatment Value: None
  misc_feature: MA Experiment 20001553 PARAMETER Experiment Name: At_Drought_Soil_Dry_P Parameter: Timepoint (day) Value: 5
  misc_feature: MA Experiment 20001553 PARAMETER Experiment Name: At_Drought_Soil_Dry_P Parameter: Treatment Value: Drought vs. No Drought
  misc_feature: MA Experiment ID: 20001560 Result: Up-regulated in Transcription
  misc_feature: MA Experiment 20001560 PARAMETER Experiment Name: At_Drought_Soil_Dry_P Parameter: Age (day) Value: 28
  misc_feature: MA Experiment 20001560 PARAMETER Experiment Name: At_Drought_Soil_Dry_P Parameter: Organism Value: A. thaliana
  misc_feature: MA Experiment 20001560 PARAMETER Experiment Name: At_Drought_Soil_Dry_P Parameter: Plant Line Value: WS
  misc_feature: MA Experiment 20001560 PARAMETER Experiment Name: At_Drought_Soil_Dry_P Parameter: Post Timepoint (hr) Value: None
  misc_feature: MA Experiment 20001560 PARAMETER Experiment Name: At_Drought_Soil_Dry_P Parameter: Post-Treatment Value: None
  misc_feature: MA Experiment 20001560 PARAMETER Experiment Name: At_Drought_Soil_Dry_P Parameter: Timepoint (day) Value: 14
  misc_feature: MA Experiment 20001560 PARAMETER Experiment Name: At_Drought_Soil_Dry_P Parameter: Treatment Value: Drought vs. No Drought
  misc_feature: MA Experiment ID: 20001757 Result: Up-regulated in Transcription
  misc_feature: MA Experiment 20001757 PARAMETER Experiment Name: At_50mM_NH4NO3_L-to-H_P Parameter: Timepoint (hr) Value: 6
  misc_feature: MA Experiment 20001757 PARAMETER Experiment Name: At_50mM_NH4NO3_L-to-H_P Parameter: Tissue Value: Leaf
  misc_feature: MA Experiment 20001757 PARAMETER Experiment Name: At_50mM_NH4NO3_L-to-H_P Parameter: Treatment Value: 50mM NH4NO3 vs 100mM Mannitol
ccacgcgtccgctcatttcctccaaacgtcaaacatagcagcagccatggctgccaccaacacaatcctcgcattctcatctccttctcgtcttctcattcctccttcctccaatccttcaactctccgttcctctttcagcggcgtctctctcaacaacaacaatctccaccgtctccaatctgtttccttcgccgttaaagctccgtcgaaagcgttgacagttgtttccgcggcgaagaaggctgttgcagtgcttaaaggtacttctgatgtcgaaggagttgttactttgacccaagatgactcaggtcctacaactgtgaatgttcgtatcactggtctcactccagggcctcatggatttcatctccatgagtttggtgatacaactaatggatgtatctcaacaggaccacatttcaaccctaacaacatgacacacggagctccagaagatgagtgccgtcatgcgggtgacctgggaaacataaatgccaatgccgatggcgtggcagaaacaacaatagtggacaatcagattcctctgactggtcctaattctgttgttggaagagcctttgtggttcacgagcttaaggatgacctcggaaagggtggccatgarcttagtctgaccactggaaacgcaggcgggagattggcatgtggtgtgattggcttgacgccgctctaagtcagarggctaagcaagtactcttatgtctactgtgttgatcttgtctgtttgaacagatgtaagaatcttagcaaataatgtttggcttaataaactttgatgtttatgttcattgcatcaatttttctctttttg

SEQ ID NO: 76363 - protein, 231 aa, Arabidopsis thaliana
  peptide (1)..(231): Ceres Seq. ID no. 7107699
  misc_feature (79)..(230): Pfam Name: Copper/zinc superoxide dismutase (SODC) Pfam Description: Copper/zinc superoxide dismutase (SODC)
  misc_feature (16)..(231): Homolog of NCBI NO: 11358868 NR Description: superoxide dismutase (EC 1.15.1.1) (Cu-Zn)
  misc_feature (16)..(231): Homolog of NCBI NO: 18401659 NR Description: copper/zinc superoxide dismutase (CSD2); protein At2g28190.1, supported by cDNA: 39796., supported by cDNA:
  misc_feature (16)..(231): Homolog of NCBI NO: 5689611 NR Description: copper/zinc superoxide dismutase [Arabidopsis
  misc_feature (16)..(229): Homolog of NCBI NO: 25285791 NR Description: probable copper/zinc superoxide dismutase
  misc_feature (18)..(231): Homolog of NCBI NO: 3914999 NR Description: Superoxide dismutase [Cu-Zn], chloroplast
  misc_feature (29)..(231): Homolog of NCBI NO: 20900 NR Description: Cu/Zn superoxide dismutase II [Pisum sativum]
  misc_feature (29)..(231): Homolog of NCBI NO: 134683 NR Description: Superoxide dismutase [Cu-Zn], chloroplast
  misc_feature (18)..(231): Homolog of NCBI NO: 134686 NR Description: Superoxide dismutase [Cu-Zn], chloroplast
  misc_feature (16)..(231): Homolog of NCBI NO: 134682 NR Description: Superoxide dismutase [Cu-Zn], chloroplast
  misc_feature (16)..(231): Homolog of NCBI NO: 33327349 NR Description: superoxidase dismutase [Lycopersicon esculentum]
  misc_feature (209)..(209): Xaa is any aa, unknown or other
HASAHFLQTSNIAAAMAATNTILAFSSPSRLLIPPSSNPSTLRSSFSGVSLNNNNLHRLQSVSFAVKAPSKALTVVSAAKKAVAVLKGTSDVEGVVTLTQDDSGPTTVNVRITGLTPGPHGFHLHEFGDTTNGCISTGPHFNPNNMTHGAPEDECRHAGDLGNINANADGVAETTIVDNQIPLTGPNSVVGRAFVVHELKDDLGKGGHXLSLTTGNAGGRLACGVIGLTPL

SEQ ID NO: 76364 - protein, 216 aa, Arabidopsis thaliana
  peptide (1)..(216): Ceres Seq. ID no. 7107700
  misc_feature (64)..(215): Pfam Name: Copper/zinc superoxide dismutase (SODC) Pfam Description: Copper/zinc superoxide dismutase (SODC)
  misc_feature (1)..(216): Homolog of NCBI NO: 11358868 NR Description: superoxide dismutase (EC 1.15.1.1) (Cu-Zn)
  misc_feature (1)..(216): Homolog of NCBI NO: 18401659 NR Description: copper/zinc superoxide dismutase (CSD2); protein At2g28190.1, supported by cDNA: 39796., supported by cDNA:
  misc_feature (1)..(216): Homolog of NCBI NO: 5689611 NR Description: copper/zinc superoxide dismutase [Arabidopsis
  misc_feature (1)..(214): Homolog of NCBI NO: 25285791 NR Description: probable copper/zinc superoxide dismutase
  misc_feature (3)..(216): Homolog of NCBI NO: 3914999 NR Description: Superoxide dismutase [Cu-Zn], chloroplast
  misc_feature (14)..(216): Homolog of NCBI NO: 20900 NR Description: Cu/Zn superoxide dismutase II [Pisum sativum]
  misc_feature (14)..(216): Homolog of NCBI NO: 134683 NR Description: Superoxide dismutase [Cu-Zn], chloroplast
  misc_feature (3)..(216): Homolog of NCBI NO: 134686 NR Description: Superoxide dismutase [Cu-Zn], chloroplast
  misc_feature (1)..(216): Homolog of NCBI NO: 134682 NR Description: Superoxide dismutase [Cu-Zn], chloroplast
  misc_feature (1)..(216): Homolog of NCBI NO: 33327349 NR Description: superoxidase dismutase [Lycopersicon esculentum]
  misc_feature (194)..(194): Xaa is any aa, unknown or other
MAATNTILAFSSPSRLLIPPSSNPSTLRSSFSGVSLNNNNLHRLQSVSFAVKAPSKALTVVSAAKKAVAVLKGTSDVEGVVTLTQDDSGPTTVNVRITGLTPGPHGFHLHEFGDTTNGCISTGPHFNPNNMTHGAPEDECRHAGDLGNINANADGVAETTIVDNQIPLTGPNSVVGRAFVVHELKDDLGKGGHXLSLTTGNAGGRLACGVIGLTPL

SEQ ID NO: 76365 - DNA, 1275 bp, Arabidopsis thaliana
  misc_feature (1)..(1275): Ceres Seq. ID no. 7107701
  misc_feature: MA Experiment ID: 108433 Result: Down-regulated in Transcription
  misc_feature: MA Experiment 108433 PARAMETER Experiment Name: At_rhl_Mutant2_cDNA_P Parameter: Age (day) Value: 7
  misc_feature: MA Experiment 108433 PARAMETER Experiment Name: At_rhl_Mutant2_cDNA_P Parameter: Organism Value: A. thaliana
  misc_feature: MA Experiment 108433 PARAMETER Experiment Name: At_rhl_Mutant2_cDNA_P Parameter: Plant Line Value: rhl Mutant vs. wt landsburg
  misc_feature: MA Experiment 108433 PARAMETER Experiment Name: At_rhl_Mutant2_cDNA_P Parameter: Tissue Value: Roots
  misc_feature: MA Experiment ID: 108434 Result: Down-regulated in Transcription
  misc_feature: MA Experiment 108434 PARAMETER Experiment Name: At_Root_Tips_cDNA_P Parameter: Tissue Value: Root Tips
  misc_feature: MA Experiment ID: 108461 Result: Up-regulated in Transcription
  misc_feature: MA Experiment 108461 PARAMETER Experiment Name: At_Germinating_Seeds_cDNA_P Parameter: Age (day) Value: 1 vs. 0
  misc_feature: MA Experiment 108461 PARAMETER Experiment Name: At_Germinating_Seeds_cDNA_P Parameter: Tissue Value: Germinating Seeds
  misc_feature: MA Experiment ID: 108462 Result: Up-regulated in Transcription
  misc_feature: MA Experiment 108462 PARAMETER Experiment Name: At_Germinating_Seeds_cDNA_P Parameter: Age (day) Value: 2 vs. 0
  misc_feature: MA Experiment 108462 PARAMETER Experiment Name: At_Germinating_Seeds_cDNA_P Parameter: Tissue Value: Germinating Seeds
  misc_feature: MA Experiment ID: 108464 Result: Up-regulated in Transcription
  misc_feature: MA Experiment 108464 PARAMETER Experiment Name: At_Germinating_Seeds_cDNA_P Parameter: Age (day) Value: 4 vs. 0
  misc_feature: MA Experiment 108464 PARAMETER Experiment Name: At_Germinating_Seeds_cDNA_P Parameter: Tissue Value: Germinating Seeds
  misc_feature: MA Experiment ID: 108488 Result: Up-regulated in Transcription
  misc_feature: MA Experiment ID: 108594 Result: Down-regulated in Transcription
  misc_feature: MA Experiment 108594 PARAMETER Experiment Name: At_Ler-rhl_Root_cDNA_P Parameter: Plant Line Value: null
  misc_feature: MA Experiment ID: 20000185 Result: Down-regulated in Transcription
  misc_feature: MA Experiment 20000185 PARAMETER Experiment Name: At_Roots__P Parameter: Age (day) Value: 7 vs. 21
  misc_feature: MA Experiment 20000185 PARAMETER Experiment Name: At_Roots__P Parameter: Organism Value: A. thaliana
  misc_feature: MA Experiment 20000185 PARAMETER Experiment Name: At_Roots__P Parameter: Tissue Value: Roots vs. Whole Plant
  misc_feature: MA Experiment ID: 20000227 Result: Down-regulated in Transcription
  misc_feature: MA Experiment 20000227 PARAMETER Experiment Name: At_Root-Tips-vs-Tops_P Parameter: Tissue Value: Root Tips vs. Root Tops
  misc_feature: MA Experiment ID: 20000234 Result: Down-regulated in Transcription
  misc_feature: MA Experiment 20000234 PARAMETER Experiment Name: At_Siliques_P Parameter: Age (day) Value: 21
  misc_feature: MA Experiment 20000234 PARAMETER Experiment Name: At_Siliques_P Parameter: Organism Value: A. thaliana
  misc_feature: MA Experiment 20000234 PARAMETER Experiment Name: At_Siliques_P Parameter: Plant Line Value: WS
  misc_feature: MA Experiment 20000234 PARAMETER Experiment Name: At_Siliques_P Parameter: Tissue Value: Less Than 5mm Siliques vs. Whole Plant
  misc_feature: MA Experiment ID: 20000264 Result: Down-regulated in Transcription
  misc_feature: MA Experiment 20000264 PARAMETER Experiment Name: At_Open_Flower_P Parameter: Age (day) Value: 21
  misc_feature: MA Experiment 20000264 PARAMETER Experiment Name: At_Open_Flower_P Parameter: Plant Line Value: WS
  misc_feature: MA Experiment 20000264 PARAMETER Experiment Name: At_Open_Flower_P Parameter: Tissue Value: Open Flower vs. Whole Plant
  misc_feature: MA Experiment ID: 20000265 Result: Down-regulated in Transcription
  misc_feature: MA Experiment 20000265 PARAMETER Experiment Name: At_Open_Flower_P Parameter: Age (day) Value: 21
  misc_feature: MA Experiment 20000265 PARAMETER Experiment Name: At_Open_Flower_P Parameter: Plant Line Value: WS
  misc_feature: MA Experiment 20000265 PARAMETER Experiment Name: At_Open_Flower_P Parameter: Tissue Value: Closed Flower vs. Whole Plant
  misc_feature: MA Experiment ID: 20000286 Result: Down-regulated in Transcription
  misc_feature: MA Experiment 20000286 PARAMETER Experiment Name: At_Open_Flower_P Parameter: Age (day) Value: 21
  misc_feature: MA Experiment 20000286 PARAMETER Experiment Name: At_Open_Flower_P Parameter: Plant Line Value: WS
  misc_feature: MA Experiment 20000286 PARAMETER Experiment Name: At_Open_Flower_P Parameter: Tissue Value: Half Open vs. Whole Plant
  misc_feature: MA Experiment ID: 20000439 Result: Down-regulated in Transcription
  misc_feature: MA Experiment 20000439 PARAMETER Experiment Name: At_Roots__P Parameter: Age (day) Value: 14 vs. 21
  misc_feature: MA Experiment 20000439 PARAMETER Experiment Name: At_Roots__P Parameter: Organism Value: A. thaliana
  misc_feature: MA Experiment 20000439 PARAMETER Experiment Name: At_Roots__P Parameter: Tissue Value: Roots vs. Whole Plant
  misc_feature: MA Experiment ID: 20000794 Result: Down-regulated in Transcription
  misc_feature: MA Experiment 20000794 PARAMETER Experiment Name: At_Petals_P Parameter: Age (day) Value: 23-25 days
  misc_feature: MA Experiment 20000794 PARAMETER Experiment Name: At_Petals_P Parameter: Plant Line Value: WS
  misc_feature: MA Experiment 20000794 PARAMETER Experiment Name: At_Petals_P Parameter: Tissue Value: Petals vs. Whole plant
  misc_feature: MA Experiment ID: 20001904 Result: Down-regulated in Transcription
  misc_feature: MA Experiment 20001904 PARAMETER Experiment Name: At_Drought_Reproduction_P Parameter: Age (day) Value: 37
  misc_feature: MA Experiment 20001904 PARAMETER Experiment Name: At_Drought_Reproduction_P Parameter: Organism Value: A. thaliana
  misc_feature: MA Experiment 20001904 PARAMETER Experiment Name: At_Drought_Reproduction_P Parameter: Plant Line Value: WS
  misc_feature: MA Experiment 20001904 PARAMETER Experiment Name: At_Drought_Reproduction_P Parameter: Timepoint (day) Value: 7
  misc_feature: MA Experiment 20001904 PARAMETER Experiment Name: At_Drought_Reproduction_P Parameter: Tissue Value: Rosettes
  misc_feature: MA Experiment 20001904 PARAMETER Experiment Name: At_Drought_Reproduction_P Parameter: Treatment Value: Drought vs. No Drought
  misc_feature: MA Experiment ID: 20001905 Result: Down-regulated in Transcription
  misc_feature: MA Experiment 20001905 PARAMETER Experiment Name: At_Drought_Reproduction_P Parameter: Age (day) Value: 40
  misc_feature: MA Experiment 20001905 PARAMETER Experiment Name: At_Drought_Reproduction_P Parameter: Organism Value: A. thaliana
  misc_feature: MA Experiment 20001905 PARAMETER Experiment Name: At_Drought_Reproduction_P Parameter: Plant Line Value: WS
  misc_feature: MA Experiment 20001905 PARAMETER Experiment Name: At_Drought_Reproduction_P Parameter: Timepoint (day) Value: 10
  misc_feature: MA Experiment 20001905 PARAMETER Experiment Name: At_Drought_Reproduction_P Parameter: Tissue Value: Rosettes
  misc_feature: MA Experiment 20001905 PARAMETER Experiment Name: At_Drought_Reproduction_P Parameter: Treatment Value: Drought vs. No Drought
ctacgtcaggggaaaaacaaaatggctgccatagcttctactctctctctttcttcaaccaaacctcagagacttttcgattcttccttccatggctcagccatctccgcagctcctatctccatcggtctcaaaccacgatctttctccgttcgcgccacaaccgctggttacgacttgaacgctttcacgttcgacccgatcaaggaatcgatcgtgtcacgtgagatgacgagaaggtacatgacggatatgatcacttatgctgagactgatgtcgtcgtcgttggtgctggatctgctggtttatctgctgcttatgagatcagtaagaaccctaatgttcaagttgccattattgagcaatctgttagtcctggtggtggtgcttggctcggtggtcagcttttctccgccatgattgttcgcaaaccagctcacttgttccttgacgagattggtgtggcttacgatgagcaagacacctacgttgtggttaagcacgcggctctgttcacatcaaccatcatgagcaagcttttggctcgtcctaatgtgaagctcttcaacgctgtggctgctgaggatttgattgtgaaaggaaacagagttggtggtgtggtgactaactgggctcttgtggctcagaaccaccacacacaatcgtgtatggaccctaatgttatggaagcgaagattgtggttagctcttgtggtcatgatggtccttttggagctactggtgttaagaggttgaagagtattgggatgattgatcatgttcctgggatgaaagctttggacatgaacactgctgaggacgctattgtgaggttgaccagagaggttgttcctggtatgattgttaccggtatggaagttgctgagatcgatggtgcaccgagaatgggaccaacttttggtgctatgatgatatcgggacaaaaggcgggacaacttgctcttaaggctttggggctaccgaatgctattgacggaactctcgttggaaacctaagcccggagctggtcttagccgcagcagattcagctgaaaccgtagatgcttaaaatcaaaaggttttaacgttaagaaaagtttcccttgatcttcggatgttgaaggagtgcaataaaaggagtttaggtgtttaatatgtcttgaacttttctggtgtctttgtttctctcttctgaacttctgtgtaaaatatcgtatccgttcattcgtaatgcgtatgttctcgttaaaaaaaaaccctgacgtagctcgag

SEQ ID NO: 76366 - protein, 356 aa, Arabidopsis thaliana
  peptide (1)..(356): Ceres Seq. ID no. 7107702
  misc_feature (64)..(307): Pfam Name: Thi4 family Pfam Description: Thi4 family
  misc_feature (8)..(356): Homolog of NCBI NO: 15239735 NR Description: thiazole biosynthetic enzyme precursor (ARA6) (sp protein id: At5g54770.1, supported by cDNA: gi_1113782, supported cDNA: gi_15809896, supported by cDNA: gi_16226383, supported by
  misc_feature (8)..(356): Homolog of NCBI NO: 6094476 NR Description: Thiazole biosynthetic enzyme, chloroplast
  misc_feature (11)..(356): Homolog of NCBI NO: 2501187 NR Description: Thiazole biosynthetic enzyme, chloroplast (AG6) >gi|1289204|emb|CAA66064.1| thaizole biosynthetic enzmye
  misc_feature (8)..(356): Homolog of NCBI NO: 30013665 NR Description: putative chloroplast thiazole biosynthetic
LRQGKNKMAAIASTLSLSSTKPQRLFDSSFHGSAISAAPISIGLKPRSFSVRATTAGYDLNAFTFDPIKESIVSREMTRRYMTDMITYAETDVVVVGAGSAGLSAAYEISKNPNVQVAIIEQSVSPGGGAWLGGQLFSAMIVRKPAHLFLDEIGVAYDEQDTYVVVKHAALFTSTIMSKLLARPNVKLFNAVAAEDLIVKGNRVGGVVTNWALVAQNHHTQSCMDPNVMEAKIVVSSCGHDGPFGATGVKRLKSIGMIDHVPGMKALDMNTAEDAIVRLTREVVPGMIVTGMEVAEIDGAPRMGPTFGAMMISGQKAGQLALKALGLPNAIDGTLVGNLSPELVLAAADSAETVDA

SEQ ID NO: 76367 - protein, 349 aa, Arabidopsis thaliana
  peptide (1)..(349): Ceres Seq. ID no. 7107703
  misc_feature (57)..(300): Pfam Name: Thi4 family Pfam Description: Thi4 family
  misc_feature (1)..(349): Homolog of NCBI NO: 15239735 NR Description: thiazole biosynthetic enzyme precursor (ARA6) (sp protein id: At5g54770.1, supported by cDNA: gi_1113782, supported cDNA: gi_15809896, supported by cDNA: gi_16226383, supported by
  misc_feature (1)..(349): Homolog of NCBI NO: 6094476 NR Description: Thiazole biosynthetic enzyme, chloroplast
  misc_feature (4)..(349): Homolog of NCBI NO: 2501187 NR Description: Thiazole biosynthetic enzyme, chloroplast (AG6) >gi|1289204|emb|CAA66064.1| thaizole biosynthetic enzmye
  misc_feature (1)..(349): Homolog of NCBI NO: 30013665 NR Description: putative chloroplast thiazole biosynthetic
MAAIASTLSLSSTKPQRLFDSSFHGSAISAAPISIGLKPRSFSVRATTAGYDLNAFTFDPIKESIVSREMTRRYMTDMITYAETDVVVVGAGSAGLSAAYEISKNPNVQVAIIEQSVSPGGGAWLGGQLFSAMIVRKPAHLFLDEIGVAYDEQDTYVVVKHAALFTSTIMSKLLARPNVKLFNAVAAEDLIVKGNRVGGVVTNWALVAQNHHTQSCMDPNVMEAKIVVSSCGHDGPFGATGVKRLKSIGMIDHVPGMKALDMNTAEDAIVRLTREVVPGMIVTGMEVAEIDGAPRMGPTFGAMMISGQKAGQLALKALGLPNAIDGTLVGNLSPELVLAAADSAETVDA

SEQ ID NO: 76368 - protein, 280 aa, Arabidopsis thaliana
  peptide (1)..(280): Ceres Seq. ID no. 7107704
  misc_feature (1)..(231): Pfam Name: Thi4 family Pfam Description: Thi4 family
  misc_feature (1)..(280): Homolog of NCBI NO: 15239735 NR Description: thiazole biosynthetic enzyme precursor (ARA6) (sp protein id: At5g54770.1, supported by cDNA: gi_1113782, supported cDNA: gi_15809896, supported by cDNA: gi_16226383, supported by
  misc_feature (1)..(280): Homolog of NCBI NO: 6094476 NR Description: Thiazole biosynthetic enzyme, chloroplast
  misc_feature (1)..(280): Homolog of NCBI NO: 2501187 NR Description: Thiazole biosynthetic enzyme, chloroplast (AG6) >gi|1289204|emb|CAA66064.1| thaizole biosynthetic enzmye
  misc_feature (1)..(280): Homolog of NCBI NO: 30013665 NR Description: putative chloroplast thiazole biosynthetic
MTRRYMTDMITYAETDVVVVGAGSAGLSAAYEISKNPNVQVAIIEQSVSPGGGAWLGGQLFSAMIVRKPAHLFLDEIGVAYDEQDTYVVVKHAALFTSTIMSKLLARPNVKLFNAVAAEDLIVKGNRVGGVVTNWALVAQNHHTQSCMDPNVMEAKIVVSSCGHDGPFGATGVKRLKSIGMIDHVPGMKALDMNTAEDAIVRLTREVVPGMIVTGMEVAEIDGAPRMGPTFGAMMISGQKAGQLALKALGLPNAIDGTLVGNLSPELVLAAADSAETVDA

SEQ ID NO: 76369 - DNA, 907 bp, Arabidopsis thaliana
  misc_feature (1)..(907): Ceres Seq. ID no. 7107745
  misc_feature: MA Experiment ID: 108434 Result: Up-regulated in Transcription
  misc_feature: MA Experiment 108434 PARAMETER Experiment Name: At_Root_Tips_cDNA_P Parameter: Tissue Value: Root Tips
  misc_feature: MA Experiment ID: 108461 Result: Up-regulated in Transcription
  misc_feature: MA Experiment 108461 PARAMETER Experiment Name: At_Germinating_Seeds_cDNA_P Parameter: Age (day) Value: 1 vs. 0
  misc_feature: MA Experiment 108461 PARAMETER Experiment Name: At_Germinating_Seeds_cDNA_P Parameter: Tissue Value: Germinating Seeds
  misc_feature: MA Experiment ID: 108488 Result: Up-regulated in Transcription
  misc_feature: MA Experiment ID: 20000069 Result: Up-regulated in Transcription
  misc_feature: MA Experiment 20000069 PARAMETER Experiment Name: At_100uM_ABA_Mutants_cDNA_P Parameter: Plant Line Value: CS23
  misc_feature: MA Experiment 20000069 PARAMETER Experiment Name: At_100uM_ABA_Mutants_cDNA_P Parameter: Timepoint (hr) Value: 6
  misc_feature: MA Experiment 20000069 PARAMETER Experiment Name: At_100uM_ABA_Mutants_cDNA_P Parameter: Tissue Value: Aerial
  misc_feature: MA Experiment 20000069 PARAMETER Experiment Name: At_100uM_ABA_Mutants_cDNA_P Parameter: Treatment Value: 100uM ABA vs. No Treatment
  misc_feature: MA Experiment ID: 20000072 Result: Up-regulated in Transcription
  misc_feature: MA Experiment 20000072 PARAMETER Experiment Name: At_100uM_ABA_Mutants_cDNA_P Parameter: Plant Line Value: CS8105
  misc_feature: MA Experiment 20000072 PARAMETER Experiment Name: At_100uM_ABA_Mutants_cDNA_P Parameter: Timepoint (hr) Value: 6
  misc_feature: MA Experiment 20000072 PARAMETER Experiment Name: At_100uM_ABA_Mutants_cDNA_P Parameter: Tissue Value: Aerial
  misc_feature: MA Experiment 20000072 PARAMETER Experiment Name: At_100uM_ABA_Mutants_cDNA_P Parameter: Treatment Value: 100uM ABA vs. No Treatment
  misc_feature: MA Experiment ID: 20000086 Result: Up-regulated in Transcription
  misc_feature: MA Experiment 20000086 PARAMETER Experiment Name: At_100uM_ABA_Mutants_cDNA_P Parameter: Plant Line Value: CS22
  misc_feature: MA Experiment 20000086 PARAMETER Experiment Name: At_100uM_ABA_Mutants_cDNA_P Parameter: Timepoint (hr) Value: 6
  misc_feature: MA Experiment 20000086 PARAMETER Experiment Name: At_100uM_ABA_Mutants_cDNA_P Parameter: Tissue Value: Aerial
  misc_feature: MA Experiment 20000086 PARAMETER Experiment Name: At_100uM_ABA_Mutants_cDNA_P Parameter: Treatment Value: 100uM ABA vs. No Treatment
  misc_feature: MA Experiment ID: 20000087 Result: Up-regulated in Transcription
  misc_feature: MA Experiment 20000087 PARAMETER Experiment Name: At_100uM_ABA_Mutants_cDNA_P Parameter: Plant Line Value: WS
  misc_feature: MA Experiment 20000087 PARAMETER Experiment Name: At_100uM_ABA_Mutants_cDNA_P Parameter: Timepoint (hr) Value: 6
  misc_feature: MA Experiment 20000087 PARAMETER Experiment Name: At_100uM_ABA_Mutants_cDNA_P Parameter: Tissue Value: Aerial
  misc_feature: MA Experiment 20000087 PARAMETER Experiment Name: At_100uM_ABA_Mutants_cDNA_P Parameter: Treatment Value: 100uM ABA vs. No Treatment
  misc_feature: MA Experiment ID: 20000089 Result: Up-regulated in Transcription
  misc_feature: MA Experiment ID: 20000090 Result: Up-regulated in Transcription
  misc_feature: MA Experiment ID: 20000117 Result: Up-regulated in Transcription
  misc_feature: MA Experiment 20000117 PARAMETER Experiment Name: At_100uM_ABA_Mutants_cDNA_P Parameter: Plant Line Value: Columbia
  misc_feature: MA Experiment 20000117 PARAMETER Experiment Name: At_100uM_ABA_Mutants_cDNA_P Parameter: Timepoint (hr) Value: 6
  misc_feature: MA Experiment 20000117 PARAMETER Experiment Name: At_100uM_ABA_Mutants_cDNA_P Parameter: Tissue Value: Aerial
  misc_feature: MA Experiment 20000117 PARAMETER Experiment Name: At_100uM_ABA_Mutants_cDNA_P Parameter: Treatment Value: 100uM ABA vs. No Treatment
  misc_feature: MA Experiment ID: 20000173 Result: Down-regulated in Transcription
  misc_feature: MA Experiment 20000173 PARAMETER Experiment Name: At_42deg_Heat_P Parameter: Age (day) Value: 14
  misc_feature: MA Experiment 20000173 PARAMETER Experiment Name: At_42deg_Heat_P Parameter: Organism Value: A. thaliana
  misc_feature: MA Experiment 20000173 PARAMETER Experiment Name: At_42deg_Heat_P Parameter: Plant Line Value: WS
  misc_feature: MA Experiment 20000173 PARAMETER Experiment Name: At_42deg_Heat_P Parameter: Temperature (deg C) Value: 42 vs. 22
  misc_feature: MA Experiment 20000173 PARAMETER Experiment Name: At_42deg_Heat_P Parameter: Timepoint (hr) Value: 6
  misc_feature: MA Experiment 20000173 PARAMETER Experiment Name: At_42deg_Heat_P Parameter: Tissue Value: Aerial
  misc_feature: MA Experiment ID: 20000439 Result: Up-regulated in Transcription
  misc_feature: MA Experiment 20000439 PARAMETER Experiment Name: At_Roots__P Parameter: Age (day) Value: 14 vs. 21
  misc_feature: MA Experiment 20000439 PARAMETER Experiment Name: At_Roots__P Parameter: Organism Value: A. thaliana
  misc_feature: MA Experiment 20000439 PARAMETER Experiment Name: At_Roots__P Parameter: Tissue Value: Roots vs. Whole Plant
  misc_feature: MA Experiment ID: 20000794 Result: Down-regulated in Transcription
  misc_feature: MA Experiment 20000794 PARAMETER Experiment Name: At_Petals_P Parameter: Age (day) Value: 23-25 days
  misc_feature: MA Experiment 20000794 PARAMETER Experiment Name: At_Petals_P Parameter: Plant Line Value: WS
  misc_feature: MA Experiment 20000794 PARAMETER Experiment Name: At_Petals_P Parameter: Tissue Value: Petals vs. Whole plant
  misc_feature: MA Experiment ID: 20001905 Result: Down-regulated in Transcription
  misc_feature: MA Experiment 20001905 PARAMETER Experiment Name: At_Drought_Reproduction_P Parameter: Age (day) Value: 40
  misc_feature: MA Experiment 20001905 PARAMETER Experiment Name: At_Drought_Reproduction_P Parameter: Organism Value: A. thaliana
  misc_feature: MA Experiment 20001905 PARAMETER Experiment Name: At_Drought_Reproduction_P Parameter: Plant Line Value: WS
  misc_feature: MA Experiment 20001905 PARAMETER Experiment Name: At_Drought_Reproduction_P Parameter: Timepoint (day) Value: 10
  misc_feature: MA Experiment 20001905 PARAMETER Experiment Name: At_Drought_Reproduction_P Parameter: Tissue Value: Rosettes
  misc_feature: MA Experiment 20001905 PARAMETER Experiment Name: At_Drought_Reproduction_P Parameter: Treatment Value: Drought vs. No Drought
  misc_feature: MA Experiment ID: 20001911 Result: Down-regulated in Transcription
  misc_feature: MA Experiment 20001911 PARAMETER Experiment Name: At_Drought_Reproduction_P Parameter: Age (day) Value: 40
  misc_feature: MA Experiment 20001911 PARAMETER Experiment Name: At_Drought_Reproduction_P Parameter: Organism Value: A. thaliana
  misc_feature: MA Experiment 20001911 PARAMETER Experiment Name: At_Drought_Reproduction_P Parameter: Plant Line Value: WS
  misc_feature: MA Experiment 20001911 PARAMETER Experiment Name: At_Drought_Reproduction_P Parameter: Timepoint (day) Value: 10
  misc_feature: MA Experiment 20001911 PARAMETER Experiment Name: At_Drought_Reproduction_P Parameter: Tissue Value: Flowers
  misc_feature: MA Experiment 20001911 PARAMETER Experiment Name: At_Drought_Reproduction_P Parameter: Treatment Value: Drought vs. No Drought
cagtgtgagtaatttaggttgaccagaaaaacacacagagaaaggagaaaaacatggaggagttggcgcatccgtacgttccgagagatctgaacctacccggatacgtaccaatctcaatgtcaatgtcctccatcgtctctatctacctcggttcttccctccttgttgtctccctcgtctggcttctcttcgggaggaagaaagctaaacttgataagttgcttatgtgttggtggacattcactggtctcactcatgttattctcgagggctatttcgttttctcccctgagtttttcaaggacaacacttctgcttatcttgctgaagtttggaaagaatatagcaaaggtgattcgagatacgtaggtagagattctgcagttgtatctgttgaagggatcactgctgttatcgttggcccagcttctctcctagctatttatgccattgctaaggagaagtcgtatagctacgtgcttcagcttgcgatttcggtttgccagctctacggatgtttggtttatttcattactgctatcttggaaggagacaactttgccacaaactctttctactattactcctactacatcggggctaactgttggtgggtcttgataccttcactcatttctttccgttgctggaaaaagatttgtgcagctgctgccattgccaacaacaacgtcgagacaaagacgaagaagaaaacccgttgaagcaaggatcaaactctcttttatctcttcaggttactgctgctatagcaaatgaacatgagtctccttttgcggataatttatccattttaaaaactttagctatgttgtctgtctctcttacagcaataaacttgtgaggataatttatccatttttcatatgatatttgcgcttttgtt

SEQ ID NO: 76370 - protein, 223 aa, Arabidopsis thaliana
  peptide (1)..(223): Ceres Seq. ID no. 7107746
  misc_feature (20)..(214): Pfam Name: Emopamil binding protein Pfam Description: Emopamil binding protein
  misc_feature (1)..(223): Homolog of NCBI NO: 15223758 NR Description: C-8,7 sterol isomerase; protein id: At1g20050.1, by cDNA: 2121., supported by cDNA: gi_12248038, supported by gi_2772933, supported by cDNA: gi_4098988 [Arabidopsis thaliana]
  misc_feature (1)..(223): Homolog of NCBI NO: 4098989 NR Description: phenylalkylamine binding protein homolog
  misc_feature (1)..(223): Homolog of NCBI NO: 21554213 NR Description: C-8,7 sterol isomerase [Arabidopsis thaliana]
  misc_feature (6)..(217): Homolog of NCBI NO: 34894044 NR Description: putative C-8,7 sterol isomerase [Oryza sativa
  misc_feature (6)..(221): Homolog of NCBI NO: 33417065 NR Description: Unknown (protein for MGC:68833) [Xenopus laevis]
  misc_feature (1)..(221): Homolog of NCBI NO: 16923992 NR Description: phenylalkylamine Ca2+ antagonist (emopamil)
  misc_feature (6)..(221): Homolog of NCBI NO: 6681255 NR Description: phenylalkylamine Ca2+ antagonist (emopamil)
  misc_feature (6)..(220): Homolog of NCBI NO: 18202586 NR Description: 3-beta-hydroxysteroid-delta(8),delta(7)-isomerase
  misc_feature (6)..(195): Homolog of NCBI NO: 12848900 NR Description: unnamed protein product [Mus musculus]
  misc_feature (6)..(221): Homolog of NCBI NO: 5729810 NR Description: emopamil-binding protein (sterol isomerase);
MEELAHPYVPRDLNLPGYVPISMSMSSIVSIYLGSSLLVVSLVWLLFGRKKAKLDKLLMCWWTFTGLTHVILEGYFVFSPEFFKDNTSAYLAEVWKEYSKGDSRYVGRDSAVVSVEGITAVIVGPASLLAIYAIAKEKSYSYVLQLAISVCQLYGCLVYFITAILEGDNFATNSFYYYSYYIGANCWWVLIPSLISFRCWKKICAAAAIANNNVETKTKKKTR

SEQ ID NO: 76371 - protein, 201 aa, Arabidopsis thaliana; identical to SEQ ID NO: 26204
  peptide (1)..(201): Ceres Seq. ID no. 7107747
  misc_feature (1)..(192): Pfam Name: Emopamil binding protein Pfam Description: Emopamil binding protein
  misc_feature (1)..(201): Homolog of NCBI NO: 15223758 NR Description: C-8,7 sterol isomerase; protein id: At1g20050.1, by cDNA: 2121., supported by cDNA: gi_12248038, supported by gi_2772933, supported by cDNA: gi_4098988 [Arabidopsis thaliana]
  misc_feature (1)..(201): Homolog of NCBI NO: 4098989 NR Description: phenylalkylamine binding protein homolog
  misc_feature (1)..(201): Homolog of NCBI NO: 21554213 NR Description: C-8,7 sterol isomerase [Arabidopsis thaliana]
  misc_feature (1)..(195): Homolog of NCBI NO: 34894044 NR Description: putative C-8,7 sterol isomerase [Oryza sativa
  misc_feature (1)..(199): Homolog of NCBI NO: 33417065 NR Description: Unknown (protein for MGC:68833) [Xenopus laevis]
  misc_feature (1)..(199): Homolog of NCBI NO: 16923992 NR Description: phenylalkylamine Ca2+ antagonist (emopamil)
  misc_feature (1)..(199): Homolog of NCBI NO: 6681255 NR Description: phenylalkylamine Ca2+ antagonist (emopamil)
  misc_feature (1)..(198): Homolog of NCBI NO: 18202586 NR Description: 3-beta-hydroxysteroid-delta(8),delta(7)-isomerase
  misc_feature (1)..(173): Homolog of NCBI NO: 12848900 NR Description: unnamed protein product [Mus musculus]
  misc_feature (1)..(199): Homolog of NCBI NO: 5729810 NR Description: emopamil-binding protein (sterol isomerase);

SEQ ID NO: 76372 - protein, 199 aa, Arabidopsis thaliana; identical to SEQ ID NO: 26205
  peptide (1)..(199): Ceres Seq. ID no. 7107748
  misc_feature (1)..(190): Pfam Name: Emopamil binding protein Pfam Description: Emopamil binding protein
  misc_feature (1)..(199): Homolog of NCBI NO: 15223758 NR Description: C-8,7 sterol isomerase; protein id: At1g20050.1, by cDNA: 2121., supported by cDNA: gi_12248038, supported by gi_2772933, supported by cDNA: gi_4098988 [Arabidopsis thaliana]
  misc_feature (1)..(199): Homolog of NCBI NO: 4098989 NR Description: phenylalkylamine binding protein homolog
  misc_feature (1)..(199): Homolog of NCBI NO: 21554213 NR Description: C-8,7 sterol isomerase [Arabidopsis thaliana]
  misc_feature (1)..(193): Homolog of NCBI NO: 34894044 NR Description: putative C-8,7 sterol isomerase [Oryza sativa
  misc_feature (1)..(197): Homolog of NCBI NO: 33417065 NR Description: Unknown (protein for MGC:68833) [Xenopus laevis]
  misc_feature (1)..(197): Homolog of NCBI NO: 16923992 NR Description: phenylalkylamine Ca2+ antagonist (emopamil)
  misc_feature (1)..(197): Homolog of NCBI NO: 6681255 NR Description: phenylalkylamine Ca2+ antagonist (emopamil)
  misc_feature (1)..(196): Homolog of NCBI NO: 18202586 NR Description: 3-beta-hydroxysteroid-delta(8),delta(7)-isomerase
  misc_feature (1)..(171): Homolog of NCBI NO: 12848900 NR Description: unnamed protein product [Mus musculus]
  misc_feature (1)..(197): Homolog of NCBI NO: 5729810 NR Description: emopamil-binding protein (sterol isomerase);

SEQ ID NO: 76373 - DNA, 1003 bp, Arabidopsis thaliana
  misc_feature (1)..(1003): Ceres Seq. ID no. 7107770
  misc_feature: MA Experiment ID: 108434 Result: Down-regulated in Transcription
  misc_feature: MA Experiment 108434 PARAMETER Experiment Name: At_Root_Tips_cDNA_P Parameter: Tissue Value: Root Tips
  misc_feature: MA Experiment ID: 108464 Result: Up-regulated in Transcription
  misc_feature: MA Experiment 108464 PARAMETER Experiment Name: At_Germinating_Seeds_cDNA_P Parameter: Age (day) Value: 4 vs. 0
  misc_feature: MA Experiment 108464 PARAMETER Experiment Name: At_Germinating_Seeds_cDNA_P Parameter: Tissue Value: Germinating Seeds
  misc_feature: MA Experiment ID: 108573 Result: Down-regulated in Transcription
  misc_feature: MA Experiment 108573 PARAMETER Experiment Name: At_Drought_cDNA_P Parameter: Timepoint (hr) Value: 6
  misc_feature: MA Experiment 108573 PARAMETER Experiment Name: At_Drought_cDNA_P Parameter: Tissue Value: Aerial
  misc_feature: MA Experiment 108573 PARAMETER Experiment Name: At_Drought_cDNA_P Parameter: Treatment Value: Drought vs. No Drought
  misc_feature: MA Experiment ID: 108594 Result: Down-regulated in Transcription
  misc_feature: MA Experiment 108594 PARAMETER Experiment Name: At_Ler-rhl_Root_cDNA_P Parameter: Plant Line Value: null
  misc_feature: MA Experiment ID: 20000071 Result: Down-regulated in Transcription
  misc_feature: MA Experiment 20000071 PARAMETER Experiment Name: At_100uM_ABA_Mutants_cDNA_P Parameter: Plant Line Value: CS8104
  misc_feature: MA Experiment 20000071 PARAMETER Experiment Name: At_100uM_ABA_Mutants_cDNA_P Parameter: Timepoint (hr) Value: 6
  misc_feature: MA Experiment 20000071 PARAMETER Experiment Name: At_100uM_ABA_Mutants_cDNA_P Parameter: Tissue Value: Aerial
  misc_feature: MA Experiment 20000071 PARAMETER Experiment Name: At_100uM_ABA_Mutants_cDNA_P Parameter: Treatment Value: 100uM ABA vs. No Treatment
  misc_feature: MA Experiment ID: 20000072 Result: Down-regulated in Transcription
  misc_feature: MA Experiment 20000072 PARAMETER Experiment Name: At_100uM_ABA_Mutants_cDNA_P Parameter: Plant Line Value: CS8105
  misc_feature: MA Experiment 20000072 PARAMETER Experiment Name: At_100uM_ABA_Mutants_cDNA_P Parameter: Timepoint (hr) Value: 6
  misc_feature: MA Experiment 20000072 PARAMETER Experiment Name: At_100uM_ABA_Mutants_cDNA_P Parameter: Tissue Value: Aerial
  misc_feature: MA Experiment 20000072 PARAMETER Experiment Name: At_100uM_ABA_Mutants_cDNA_P Parameter: Treatment Value: 100uM ABA vs. No Treatment
  misc_feature: MA Experiment ID: 20000090 Result: Down-regulated in Transcription
  misc_feature: MA Experiment ID: 20000113 Result: Down-regulated in Transcription
  misc_feature: MA Experiment 20000113 PARAMETER Experiment Name: At_42deg_Heat_cDNA_P Parameter: Temperature (deg C) Value: 42 vs. 22
  misc_feature: MA Experiment 20000113 PARAMETER Experiment Name: At_42deg_Heat_cDNA_P Parameter: Timepoint (hr) Value: 8
  misc_feature: MA Experiment 20000113 PARAMETER Experiment Name: At_42deg_Heat_cDNA_P Parameter: Tissue Value: Aerial
  misc_feature: MA Experiment ID: 20000117 Result: Down-regulated in Transcription
  misc_feature: MA Experiment 20000117 PARAMETER Experiment Name: At_100uM_ABA_Mutants_cDNA_P Parameter: Plant Line Value: Columbia
  misc_feature: MA Experiment 20000117 PARAMETER Experiment Name: At_100uM_ABA_Mutants_cDNA_P Parameter: Timepoint (hr) Value: 6
  misc_feature: MA Experiment 20000117 PARAMETER Experiment Name: At_100uM_ABA_Mutants_cDNA_P Parameter: Tissue Value: Aerial
  misc_feature: MA Experiment 20000117 PARAMETER Experiment Name: At_100uM_ABA_Mutants_cDNA_P Parameter: Treatment Value: 100uM ABA vs. No Treatment
  misc_feature: MA Experiment ID: 20000180 Result: Up-regulated in Transcription
  misc_feature: MA Experiment 20000180 PARAMETER Experiment Name: At_Germinating_Seeds_P Parameter: Age (hr) Value: 24 vs. 0
  misc_feature: MA Experiment 20000180 PARAMETER Experiment Name: At_Germinating_Seeds_P Parameter: Tissue Value: Germinating Seeds
  misc_feature: MA Experiment ID: 20000184 Result: Down-regulated in Transcription
  misc_feature: MA Experiment 20000184 PARAMETER Experiment Name: At_Shoots__P Parameter: Age (day) Value: 7
  misc_feature: MA Experiment 20000184 PARAMETER Experiment Name: At_Shoots__P Parameter: Tissue Value: Shoots vs. Whole Plant
  misc_feature: MA Experiment ID: 20000185 Result: Up-regulated in Transcription
  misc_feature: MA Experiment 20000185 PARAMETER Experiment Name: At_Roots__P Parameter: Age (day) Value: 7 vs. 21
  misc_feature: MA Experiment 20000185 PARAMETER Experiment Name: At_Roots__P Parameter: Organism Value: A. thaliana
  misc_feature: MA Experiment 20000185 PARAMETER Experiment Name: At_Roots__P Parameter: Tissue Value: Roots vs. Whole Plant
  misc_feature: MA Experiment ID: 20000213 Result: Up-regulated in Transcription
  misc_feature: MA Experiment 20000213 PARAMETER Experiment Name: At_4deg_Cold_P Parameter: Timepoint (hr) Value: 2
  misc_feature: MA Experiment ID: 20000224 Result: Up-regulated in Transcription
  misc_feature: MA Experiment ID: 20000235 Result: Up-regulated in Transcription
  misc_feature: MA Experiment 20000235 PARAMETER Experiment Name: At_Siliques_P Parameter: Age (day) Value: 21
  misc_feature: MA Experiment 20000235 PARAMETER Experiment Name: At_Siliques_P Parameter: Organism Value: A. thaliana
  misc_feature: MA Experiment 20000235 PARAMETER Experiment Name: At_Siliques_P Parameter: Plant Line Value: WS
  misc_feature: MA Experiment 20000235 PARAMETER Experiment Name: At_Siliques_P Parameter: Tissue Value: 5-10mm Siliques vs. Whole Plant
  misc_feature: MA Experiment ID: 20000437 Result: Down-regulated in Transcription
  misc_feature: MA Experiment 20000437 PARAMETER Experiment Name: At_Drought_P Parameter: Age (day) Value: 8
  misc_feature: MA Experiment 20000437 PARAMETER Experiment Name: At_Drought_P Parameter: Organism Value: A. thaliana
  misc_feature: MA Experiment 20000437 PARAMETER Experiment Name: At_Drought_P Parameter: Plant Line Value: WS
  misc_feature: MA Experiment 20000437 PARAMETER Experiment Name: At_Drought_P Parameter: Timepoint (hr) Value: 24
  misc_feature: MA Experiment 20000437 PARAMETER Experiment Name: At_Drought_P Parameter: Tissue Value: Whole Plant
  misc_feature: MA Experiment 20000437 PARAMETER Experiment Name: At_Drought_P Parameter: Treatment Value: Drought vs. No Drought
  misc_feature: MA Experiment ID: 20000438 Result: Down-regulated in Transcription
  misc_feature: MA Experiment 20000438 PARAMETER Experiment Name: At_Shoots__P Parameter: Age (day) Value: 14
  misc_feature: MA Experiment 20000438 PARAMETER Experiment Name: At_Shoots__P Parameter: Tissue Value: Shoots vs. Whole Plant
  misc_feature: MA Experiment ID: 20000439 Result: Up-regulated in Transcription
  misc_feature: MA Experiment 20000439 PARAMETER Experiment Name: At_Roots__P Parameter: Age (day) Value: 14 vs. 21
  misc_feature: MA Experiment 20000439 PARAMETER Experiment Name: At_Roots__P Parameter: Organism Value: A. thaliana
  misc_feature: MA Experiment 20000439 PARAMETER Experiment Name: At_Roots__P Parameter: Tissue Value: Roots vs. Whole Plant
  misc_feature: MA Experiment ID: 20000452 Result: Up-regulated in Transcription
  misc_feature: MA Experiment 20000452 PARAMETER Experiment Name: At_CS6879_Shoots-Roots_P Parameter: Age (day) Value: 14
  misc_feature: MA Experiment 20000452 PARAMETER Experiment Name: At_CS6879_Shoots-Roots_P Parameter: Organism Value: A. thaliana
  misc_feature: MA Experiment 20000452 PARAMETER Experiment Name: At_CS6879_Shoots-Roots_P Parameter: Plant Line Value: CS6879 vs. WS
  misc_feature: MA Experiment 20000452 PARAMETER Experiment Name: At_CS6879_Shoots-Roots_P Parameter: Tissue Value: Shoots
  misc_feature: MA Experiment ID: 20000794 Result: Up-regulated in Transcription
  misc_feature: MA Experiment 20000794 PARAMETER Experiment Name: At_Petals_P Parameter: Age (day) Value: 23-25 days
  misc_feature: MA Experiment 20000794 PARAMETER Experiment Name: At_Petals_P Parameter: Plant Line Value: WS
  misc_feature: MA Experiment 20000794 PARAMETER Experiment Name: At_Petals_P Parameter: Tissue Value: Petals vs. Whole plant
  misc_feature: MA Experiment ID: 20001248 Result: Down-regulated in Transcription
  misc_feature: MA Experiment 20001248 PARAMETER Experiment Name: At_Far-red-induction_P Parameter: Age (day) Value: 7
  misc_feature: MA Experiment 20001248 PARAMETER Experiment Name: At_Far-red-induction_P Parameter: Light Value: Far-red vs. White
  misc_feature: MA Experiment 20001248 PARAMETER Experiment Name: At_Far-red-induction_P Parameter: Organism Value: A. thaliana
  misc_feature: MA Experiment 20001248 PARAMETER Experiment Name: At_Far-red-induction_P Parameter: Plant Line Value: Columbia
  misc_feature: MA Experiment 20001248 PARAMETER Experiment Name: At_Far-red-induction_P Parameter: Timepoint (hr) Value: 4
  misc_feature: MA Experiment 20001248 PARAMETER Experiment Name: At_Far-red-induction_P Parameter: Tissue Value: Whole Plant
  misc_feature: MA Experiment ID: 20001450 Result: Down-regulated in Transcription
  misc_feature: MA Experiment 20001450 PARAMETER Experiment Name: At_Far-red-induction_P Parameter: Age (day) Value: 7
  misc_feature: MA Experiment 20001450 PARAMETER Experiment Name: At_Far-red-induction_P Parameter: Light Value: Far-red vs. White
  misc_feature: MA Experiment 20001450 PARAMETER Experiment Name: At_Far-red-induction_P Parameter: Organism Value: A. thaliana
  misc_feature: MA Experiment 20001450 PARAMETER Experiment Name: At_Far-red-induction_P Parameter: Plant Line Value: Columbia
  misc_feature: MA Experiment 20001450 PARAMETER Experiment Name: At_Far-red-induction_P Parameter: Timepoint (hr) Value: 8
  misc_feature: MA Experiment 20001450 PARAMETER Experiment Name: At_Far-red-induction_P Parameter: Tissue Value: Whole Plant
  misc_feature: MA Experiment ID: 20001905 Result: Down-regulated in Transcription
  misc_feature: MA Experiment 20001905 PARAMETER Experiment Name: At_Drought_Reproduction_P Parameter: Age (day) Value: 40
  misc_feature: MA Experiment 20001905 PARAMETER Experiment Name: At_Drought_Reproduction_P Parameter: Organism Value: A. thaliana
  misc_feature: MA Experiment 20001905 PARAMETER Experiment Name: At_Drought_Reproduction_P Parameter: Plant Line Value: WS
  misc_feature: MA Experiment 20001905 PARAMETER Experiment Name: At_Drought_Reproduction_P Parameter: Timepoint (day) Value: 10
  misc_feature: MA Experiment 20001905 PARAMETER Experiment Name: At_Drought_Reproduction_P Parameter: Tissue Value: Rosettes
  misc_feature: MA Experiment 20001905 PARAMETER Experiment Name: At_Drought_Reproduction_P Parameter: Treatment Value: Drought vs. No Drought
ccacgcgtccgcccacgcgtccgagtaaacataaaagtatgggaaggtcaccgtgctgtgagaaagctcacacaaacaaaggagcatggacgaaagaagaggacgagaggctcgtcgcctacattaaagctcatggagaaggctgctggagatctctccccaaagccgccggacttcttcgctgtggcaagagctgccgtctccggtggatcaactatctccggcctgaccttaagcgtggaaacttcaccgaggaagaagacgaactcatcatcaagctccatagccttcttggcaacaaatggtcgcttattgccgggagattaccgggaagaacagataacgagataaagaactattggaacacgcatatacgaagaaagcttataaacagagggattgatccaacgagtcatagaccaatccaagaatcatcagcttctcaagattctaaacctatacaactagaaccagttacgagtaataccattaatatctcattcacttctgctccaaaggtcgaaacgttccatgaaagtataagctttccgggaaaatcagagaaaatctcaatgcttacgttcaaagaagaaaaagatgagtgcccagttcaagaaaagttcccagatttgaatcttgagctcagaatcagtcttcctgatgatgttgatcgtcttcaagggcatggaaagtcaacaacgccacgttgtttcaagtgcagcttagggatgataaacggcatggagtgcagatgcggaagaatgagatgcgatgtagtcggaggtagcagcaaggggagtgacatgagcaatggatttgattttttagggttggcaaagaaagagaccacttctcttttgggctttcgaagcttggagatgaaataatattgtcaaattttaggcgtaactgtacaaaacttttgcctagataatttgaaagtatatcttcaacttgtatgagaaatttaactggtgaattataatatatagaatttgttttt

SEQ ID NO: 76374 - protein, 294 aa, Arabidopsis thaliana
  peptide (1)..(294): Ceres Seq. ID no. 7107771
  misc_feature (26)..(73): Pfam Name: Myb-like DNA-binding domain Pfam Description: Myb-like DNA-binding domain
  misc_feature (13)..(294): Homolog of NCBI NO: 11273985 NR Description: myb-related transcription factor MYB4 [imported] Arabidopsis thaliana >gi|3941412|gb|AAC83582.1| putative
  misc_feature (13)..(294): Homolog of NCBI NO: 15233968 NR Description: putative transcription factor (MYB4); protein id:
  misc_feature (155)..(294): Homolog of NCBI NO: 13346194 NR Description: GHMYB9 [Gossypium hirsutum]
  misc_feature (13)..(149): Homolog of NCBI NO: 13346194 NR Description: GHMYB9 [Gossypium hirsutum]
  misc_feature (13)..(294): Homolog of NCBI NO: 31980095 NR Description: MYB transcription factor R2R3 type [Populus
  misc_feature (13)..(294): Homolog of NCBI NO: 2129933 NR Description: myb-related protein TMH27 - tomato
  misc_feature (13)..(294): Homolog of NCBI NO: 15236236 NR Description: myb family transcription factor; protein id:
  misc_feature (13)..(294): Homolog of NCBI NO: 6467223 NR Description: DNA-binding protein [Arabidopsis thaliana]
  misc_feature (13)..(294): Homolog of NCBI NO: 15227288 NR Description: myb DNA-binding protein; protein id: At2g16720.1, by cDNA: gi_1020156 [Arabidopsis thaliana]
  misc_feature (13)..(251): Homolog of NCBI NO: 39725415 NR Description: MYB transcription factor [Eucalyptus gunnii]
TRPPTRPSKHKSMGRSPCCEKAHTNKGAWTKEEDERLVAYIKAHGEGCWRSLPKAAGLLRCGKSCRLRWINYLRPDLKRGNFTEEEDELIIKLHSLLGNKWSLIAGRLPGRTDNEIKNYWNTHIRRKLINRGIDPTSHRPIQESSASQDSKPIQLEPVTSNTINISFTSAPKVETFHESISFPGKSEKISMLTFKEEKDECPVQEKFPDLNLELRISLPDDVDRLQGHGKSTTPRCFKCSLGMINGMECRCGRMRCDVVGGSSKGSDMSNGFDFLGLAKKETTSLLGFRSLEMK

SEQ ID NO: 76375 - protein, 282 aa, Arabidopsis thaliana
  peptide (1)..(282): Ceres Seq. ID no. 7107772
  misc_feature (14)..(61): Pfam Name: Myb-like DNA-binding domain Pfam Description: Myb-like DNA-binding domain
  misc_feature (1)..(282): Homolog of NCBI NO: 11273985 NR Description: myb-related transcription factor MYB4 [imported] Arabidopsis thaliana >gi|3941412|gb|AAC83582.1| putative
  misc_feature (1)..(282): Homolog of NCBI NO: 15233968 NR Description: putative transcription factor (MYB4); protein id:
  misc_feature (143)..(282): Homolog of NCBI NO: 13346194 NR Description: GHMYB9 [Gossypium hirsutum]
  misc_feature (1)..(137): Homolog of NCBI NO: 13346194 NR Description: GHMYB9 [Gossypium hirsutum]
  misc_feature (1)..(282): Homolog of NCBI NO: 31980095 NR Description: MYB transcription factor R2R3 type [Populus
  misc_feature (1)..(282): Homolog of NCBI NO: 2129933 NR Description: myb-related protein TMH27 - tomato
  misc_feature (1)..(282): Homolog of NCBI NO: 15236236 NR Description: myb family transcription factor; protein id:
  misc_feature (1)..(282): Homolog of NCBI NO: 6467223 NR Description: DNA-binding protein [Arabidopsis thaliana]
  misc_feature (1)..(282): Homolog of NCBI NO: 15227288 NR Description: myb DNA-binding protein; protein id: At2g16720.1, by cDNA: gi_1020156 [Arabidopsis thaliana]
  misc_feature (1)..(239): Homolog of NCBI NO: 39725415 NR Description: MYB transcription factor [Eucalyptus gunnii]
MGRSPCCEKAHTNKGAWTKEEDERLVAYIKAHGEGCWRSLPKAAGLLRCGKSCRLRWINYLRPDLKRGNFTEEEDELIIKLHSLLGNKWSLIAGRLPGRTDNEIKNYWNTHIRRKLINRGIDPTSHRPIQESSASQDSKPIQLEPVTSNTINISFTSAPKVETFHESISFPGKSEKISMLTFKEEKDECPVQEKFPDLNLELRISLPDDVDRLQGHGKSTTPRCFKCSLGMINGMECRCGRMRCDVVGGSSKGSDMSNGFDFLGLAKKETTSLLGFRSLEMK

SEQ ID NO: 76376 - DNA, 2208 bp, Arabidopsis thaliana
  misc_feature (1)..(2208): Ceres Seq. ID no. 7107781
  misc_feature: MA Experiment ID: 20000171 Result: Down-regulated in Transcription
  misc_feature: MA Experiment 20000171 PARAMETER Experiment Name: At_42deg_Heat_P Parameter: Age (day) Value: 14
  misc_feature: MA Experiment 20000171 PARAMETER Experiment Name: At_42deg_Heat_P Parameter: Organism Value: A. thaliana
  misc_feature: MA Experiment 20000171 PARAMETER Experiment Name: At_42deg_Heat_P Parameter: Plant Line Value: WS
  misc_feature: MA Experiment 20000171 PARAMETER Experiment Name: At_42deg_Heat_P Parameter: Temperature (deg C) Value: 42 vs. 22
  misc_feature: MA Experiment 20000171 PARAMETER Experiment Name: At_42deg_Heat_P Parameter: Timepoint (hr) Value: 1
  misc_feature: MA Experiment 20000171 PARAMETER Experiment Name: At_42deg_Heat_P Parameter: Tissue Value: Aerial
  misc_feature: MA Experiment ID: 20000173 Result: Down-regulated in Transcription
  misc_feature: MA Experiment 20000173 PARAMETER Experiment Name: At_42deg_Heat_P Parameter: Age (day) Value: 14
  misc_feature: MA Experiment 20000173 PARAMETER Experiment Name: At_42deg_Heat_P Parameter: Organism Value: A. thaliana
  misc_feature: MA Experiment 20000173 PARAMETER Experiment Name: At_42deg_Heat_P Parameter: Plant Line Value: WS
  misc_feature: MA Experiment 20000173 PARAMETER Experiment Name: At_42deg_Heat_P Parameter: Temperature (deg C) Value: 42 vs. 22
  misc_feature: MA Experiment 20000173 PARAMETER Experiment Name: At_42deg_Heat_P Parameter: Timepoint (hr) Value: 6
  misc_feature: MA Experiment 20000173 PARAMETER Experiment Name: At_42deg_Heat_P Parameter: Tissue Value: Aerial
  misc_feature: MA Experiment ID: 20000182 Result: Up-regulated in Transcription
  misc_feature: MA Experiment 20000182 PARAMETER Experiment Name: At_2mM_SA_P Parameter: Age (day) Value: 14
  misc_feature: MA Experiment 20000182 PARAMETER Experiment Name: At_2mM_SA_P Parameter: Organism Value: A. thaliana
  misc_feature: MA Experiment 20000182 PARAMETER Experiment Name: At_2mM_SA_P Parameter: Plant Line Value: WS
  misc_feature: MA Experiment 20000182 PARAMETER Experiment Name: At_2mM_SA_P Parameter: Timepoint (hr) Value: 6
  misc_feature: MA Experiment 20000182 PARAMETER Experiment Name: At_2mM_SA_P Parameter: Tissue Value: Aerial
  misc_feature: MA Experiment 20000182 PARAMETER Experiment Name: At_2mM_SA_P Parameter: Treatment Value: 2mM SA vs. No Treatment
  misc_feature: MA Experiment ID: 20000184 Result: Down-regulated in Transcription
  misc_feature: MA Experiment 20000184 PARAMETER Experiment Name: At_Shoots__P Parameter: Age (day) Value: 7
  misc_feature: MA Experiment 20000184 PARAMETER Experiment Name: At_Shoots__P Parameter: Tissue Value: Shoots vs. Whole Plant
  misc_feature: MA Experiment ID: 20000185 Result: Down-regulated in Transcription
  misc_feature: MA Experiment 20000185 PARAMETER Experiment Name: At_Roots__P Parameter: Age (day) Value: 7 vs. 21
  misc_feature: MA Experiment 20000185 PARAMETER Experiment Name: At_Roots__P Parameter: Organism Value: A. thaliana
  misc_feature: MA Experiment 20000185 PARAMETER Experiment Name: At_Roots__P Parameter: Tissue Value: Roots vs. Whole Plant
  misc_feature: MA Experiment ID: 20000213 Result: Up-regulated in Transcription
  misc_feature: MA Experiment 20000213 PARAMETER Experiment Name: At_4deg_Cold_P Parameter: Timepoint (hr) Value: 2
  misc_feature: MA Experiment ID: 20000234 Result: Down-regulated in Transcription
  misc_feature: MA Experiment 20000234 PARAMETER Experiment Name: At_Siliques_P Parameter: Age (day) Value: 21
  misc_feature: MA Experiment 20000234 PARAMETER Experiment Name: At_Siliques_P Parameter: Organism Value: A. thaliana
  misc_feature: MA Experiment 20000234 PARAMETER Experiment Name: At_Siliques_P Parameter: Plant Line Value: WS
  misc_feature: MA Experiment 20000234 PARAMETER Experiment Name: At_Siliques_P Parameter: Tissue Value: Less Than 5mm Siliques vs. Whole Plant
  misc_feature: MA Experiment ID: 20000235 Result: Down-regulated in Transcription
  misc_feature: MA Experiment 20000235 PARAMETER Experiment Name: At_Siliques_P Parameter: Age (day) Value: 21
  misc_feature: MA Experiment 20000235 PARAMETER Experiment Name: At_Siliques_P Parameter: Organism Value: A. thaliana
  misc_feature: MA Experiment 20000235 PARAMETER Experiment Name: At_Siliques_P Parameter: Plant Line Value: WS
  misc_feature: MA Experiment 20000235 PARAMETER Experiment Name: At_Siliques_P Parameter: Tissue Value: 5-10mm Siliques vs. Whole Plant
  misc_feature: MA Experiment ID: 20000264 Result: Down-regulated in Transcription
  misc_feature: MA Experiment 20000264 PARAMETER Experiment Name: At_Open_Flower_P Parameter: Age (day) Value: 21
  misc_feature: MA Experiment 20000264 PARAMETER Experiment Name: At_Open_Flower_P Parameter: Plant Line Value: WS
  misc_feature: MA Experiment 20000264 PARAMETER Experiment Name: At_Open_Flower_P Parameter: Tissue Value: Open Flower vs. Whole Plant
  misc_feature: MA Experiment ID: 20000265 Result: Down-regulated in Transcription
  misc_feature: MA Experiment 20000265 PARAMETER Experiment Name: At_Open_Flower_P Parameter: Age (day) Value: 21
  misc_feature: MA Experiment 20000265 PARAMETER Experiment Name: At_Open_Flower_P Parameter: Plant Line Value: WS
  misc_feature: MA Experiment 20000265 PARAMETER Experiment Name: At_Open_Flower_P Parameter: Tissue Value: Closed Flower vs. Whole Plant
  misc_feature: MA Experiment ID: 20000286 Result: Down-regulated in Transcription
  misc_feature: MA Experiment 20000286 PARAMETER Experiment Name: At_Open_Flower_P Parameter: Age (day) Value: 21
  misc_feature: MA Experiment 20000286 PARAMETER Experiment Name: At_Open_Flower_P Parameter: Plant Line Value: WS
  misc_feature: MA Experiment 20000286 PARAMETER Experiment Name: At_Open_Flower_P Parameter: Tissue Value: Half Open vs. Whole Plant
  misc_feature: MA Experiment ID: 20000438 Result: Down-regulated in Transcription
  misc_feature: MA Experiment 20000438 PARAMETER Experiment Name: At_Shoots__P Parameter: Age (day) Value: 14
  misc_feature: MA Experiment 20000438 PARAMETER Experiment Name: At_Shoots__P Parameter: Tissue Value: Shoots vs. Whole Plant
  misc_feature: MA Experiment ID: 20000439 Result: Down-regulated in Transcription
  misc_feature: MA Experiment 20000439 PARAMETER Experiment Name: At_Roots__P Parameter: Age (day) Value: 14 vs. 21
  misc_feature: MA Experiment 20000439 PARAMETER Experiment Name: At_Roots__P Parameter: Organism Value: A. thaliana
  misc_feature: MA Experiment 20000439 PARAMETER Experiment Name: At_Roots__P Parameter: Tissue Value: Roots vs. Whole Plant
  misc_feature: MA Experiment ID: 20000452 Result: Up-regulated in Transcription
  misc_feature: MA Experiment 20000452 PARAMETER Experiment Name: At_CS6879_Shoots-Roots_P Parameter: Age (day) Value: 14
  misc_feature: MA Experiment 20000452 PARAMETER Experiment Name: At_CS6879_Shoots-Roots_P Parameter: Organism Value: A. thaliana
  misc_feature: MA Experiment 20000452 PARAMETER Experiment Name: At_CS6879_Shoots-Roots_P Parameter: Plant Line Value: CS6879 vs. WS
  misc_feature: MA Experiment 20000452 PARAMETER Experiment Name: At_CS6879_Shoots-Roots_P Parameter: Tissue Value: Shoots
  misc_feature: MA Experiment ID: 20000460 Result: Down-regulated in Transcription
  misc_feature: MA Experiment 20000460 PARAMETER Experiment Name: At_10percent_PEG_P Parameter: Age (day) Value: 12
  misc_feature: MA Experiment 20000460 PARAMETER Experiment Name: At_10percent_PEG_P Parameter: Organism Value: A. thaliana
  misc_feature: MA Experiment 20000460 PARAMETER Experiment Name: At_10percent_PEG_P Parameter: Plant Line Value: WS
  misc_feature: MA Experiment 20000460 PARAMETER Experiment Name: At_10percent_PEG_P Parameter: Timepoint (day) Value: 12
  misc_feature: MA Experiment 20000460 PARAMETER Experiment Name: At_10percent_PEG_P Parameter: Tissue Value: Whole Plant
  misc_feature: MA Experiment 20000460 PARAMETER Experiment Name: At_10percent_PEG_P Parameter: Treatment Value: 10percent PEG vs. No Treatment
  misc_feature: MA Experiment ID: 20000527 Result: Down-regulated in Transcription
  misc_feature: MA Experiment 20000527 PARAMETER Experiment Name: At_10percent_PEG_P Parameter: Age (day) Value: 20
  misc_feature: MA Experiment 20000527 PARAMETER Experiment Name: At_10percent_PEG_P Parameter: Organism Value: A. thaliana
  misc_feature: MA Experiment 20000527 PARAMETER Experiment Name: At_10percent_PEG_P Parameter: Plant Line Value: WS
  misc_feature: MA Experiment 20000527 PARAMETER Experiment Name: At_10percent_PEG_P Parameter: Timepoint (day) Value: 20
  misc_feature: MA Experiment 20000527 PARAMETER Experiment Name: At_10percent_PEG_P Parameter: Tissue Value: Whole Plant
  misc_feature: MA Experiment 20000527 PARAMETER Experiment Name: At_10percent_PEG_P Parameter: Treatment Value: 10percent PEG vs. No Treatment
  misc_feature: MA Experiment ID: 20000575 Result: Down-regulated in Transcription
  misc_feature: MA Experiment 20000575 PARAMETER Experiment Name: At_100uM_ABA_Mutants__P Parameter: Organism Value: A. thaliana
  misc_feature: MA Experiment 20000575 PARAMETER Experiment Name: At_100uM_ABA_Mutants__P Parameter: Plant Line Value: CS22
  misc_feature: MA Experiment 20000575 PARAMETER Experiment Name: At_100uM_ABA_Mutants__P Parameter: Timepoint (hr) Value: 6
  misc_feature: MA Experiment 20000575 PARAMETER Experiment Name: At_100uM_ABA_Mutants__P Parameter: Tissue Value: Whole Plant
  misc_feature: MA Experiment 20000575 PARAMETER Experiment Name: At_100uM_ABA_Mutants__P Parameter: Treatment Value: 1uM ABA vs. No Treatment
  misc_feature: MA Experiment ID: 20000709 Result: Down-regulated in Transcription
  misc_feature: MA Experiment 20000709 PARAMETER Experiment Name: At_15mM_NH4NO3_L-to-H_P Parameter: Age (hr) Value: 14
  misc_feature: MA Experiment 20000709 PARAMETER Experiment Name: At_15mM_NH4NO3_L-to-H_P Parameter: Organism Value: A. thaliana
  misc_feature: MA Experiment 20000709 PARAMETER Experiment Name: At_15mM_NH4NO3_L-to-H_P Parameter: Plant Line Value: WS
  misc_feature: MA Experiment 20000709 PARAMETER Experiment Name: At_15mM_NH4NO3_L-to-H_P Parameter: Timepoint (hr) Value: 4
  misc_feature: MA Experiment 20000709 PARAMETER Experiment Name: At_15mM_NH4NO3_L-to-H_P Parameter: Tissue Value: Aerial
  misc_feature: MA Experiment 20000709 PARAMETER Experiment Name: At_15mM_NH4NO3_L-to-H_P Parameter: Treatment Value: 15mM NH4NO3 vs. 30mM Mannitol
  misc_feature: MA Experiment ID: 20000794 Result: Down-regulated in Transcription
  misc_feature: MA Experiment 20000794 PARAMETER Experiment Name: At_Petals_P Parameter: Age (day) Value: 23-25 days
  misc_feature: MA Experiment 20000794 PARAMETER Experiment Name: At_Petals_P Parameter: Plant Line Value: WS
  misc_feature: MA Experiment 20000794 PARAMETER Experiment Name: At_Petals_P Parameter: Tissue Value: Petals vs. Whole plant
  misc_feature: MA Experiment ID: 20001554 Result: Down-regulated in Transcription
  misc_feature: MA Experiment 20001554 PARAMETER Experiment Name: At_Drought_Soil_Dry_P Parameter: Age (day) Value: 21
  misc_feature: MA Experiment 20001554 PARAMETER Experiment Name: At_Drought_Soil_Dry_P Parameter: Organism Value: A. thaliana
  misc_feature: MA Experiment 20001554 PARAMETER Experiment Name: At_Drought_Soil_Dry_P Parameter: Plant Line Value: WS
  misc_feature: MA Experiment 20001554 PARAMETER Experiment Name: At_Drought_Soil_Dry_P Parameter: Post Timepoint (hr) Value: None
  misc_feature: MA Experiment 20001554 PARAMETER Experiment Name: At_Drought_Soil_Dry_P Parameter: Post-Treatment Value: None
  misc_feature: MA Experiment 20001554 PARAMETER Experiment Name: At_Drought_Soil_Dry_P Parameter: Timepoint (day) Value: 7
  misc_feature: MA Experiment 20001554 PARAMETER Experiment Name: At_Drought_Soil_Dry_P Parameter: Treatment Value: Drought vs. No Drought
  misc_feature: MA Experiment ID: 20001555 Result: Down-regulated in Transcription
  misc_feature: MA Experiment 20001555 PARAMETER Experiment Name: At_Drought_Soil_Dry_P Parameter: Age (day) Value: 24
  misc_feature: MA Experiment 20001555 PARAMETER Experiment Name: At_Drought_Soil_Dry_P Parameter: Organism Value: A. thaliana
  misc_feature: MA Experiment 20001555 PARAMETER Experiment Name: At_Drought_Soil_Dry_P Parameter: Plant Line Value: WS
  misc_feature: MA Experiment 20001555 PARAMETER Experiment Name: At_Drought_Soil_Dry_P Parameter: Post Timepoint (hr) Value: None
  misc_feature: MA Experiment 20001555 PARAMETER Experiment Name: At_Drought_Soil_Dry_P Parameter: Post-Treatment Value: None
  misc_feature: MA Experiment 20001555 PARAMETER Experiment Name: At_Drought_Soil_Dry_P Parameter: Timepoint (day) Value: 10
  misc_feature: MA Experiment 20001555 PARAMETER Experiment Name: At_Drought_Soil_Dry_P Parameter: Treatment Value: Drought vs. No Drought
  misc_feature: MA Experiment ID: 20001556 Result: Down-regulated in Transcription
  misc_feature: MA Experiment 20001556 PARAMETER Experiment Name: At_Drought_Soil_Dry_P Parameter: Age (day) Value: 26
  misc_feature: MA Experiment 20001556 PARAMETER Experiment Name: At_Drought_Soil_Dry_P Parameter: Organism Value: A. thaliana
  misc_feature: MA Experiment 20001556 PARAMETER Experiment Name: At_Drought_Soil_Dry_P Parameter: Plant Line Value: WS
  misc_feature: MA Experiment 20001556 PARAMETER Experiment Name: At_Drought_Soil_Dry_P Parameter: Post Timepoint (hr) Value: None
  misc_feature: MA Experiment 20001556 PARAMETER Experiment Name: At_Drought_Soil_Dry_P Parameter: Post-Treatment Value: None
  misc_feature: MA Experiment 20001556 PARAMETER Experiment Name: At_Drought_Soil_Dry_P Parameter: Timepoint (day) Value: 12
  misc_feature: MA Experiment 20001556 PARAMETER Experiment Name: At_Drought_Soil_Dry_P Parameter: Treatment Value: Drought vs. No Drought
  misc_feature: MA Experiment ID: 20001557 Result: Down-regulated in Transcription
  misc_feature: MA Experiment 20001557 PARAMETER Experiment Name: At_Drought_Soil_Dry_P Parameter: Age (day) Value: 27
  misc_feature: MA Experiment 20001557 PARAMETER Experiment Name: At_Drought_Soil_Dry_P Parameter: Organism Value: A. thaliana
  misc_feature: MA Experiment 20001557 PARAMETER Experiment Name: At_Drought_Soil_Dry_P Parameter: Plant Line Value: WS
  misc_feature: MA Experiment 20001557 PARAMETER Experiment Name: At_Drought_Soil_Dry_P Parameter: Post Timepoint (hr) Value: 3
  misc_feature: MA Experiment 20001557 PARAMETER Experiment Name: At_Drought_Soil_Dry_P Parameter: Post-Treatment Value: Re-Water vs. No Drought
  misc_feature: MA Experiment 20001557 PARAMETER Experiment Name: At_Drought_Soil_Dry_P Parameter: Timepoint (day) Value: 13
  misc_feature: MA Experiment 20001557 PARAMETER Experiment Name: At_Drought_Soil_Dry_P Parameter: Treatment Value: Drought vs. No Drought
  misc_feature: MA Experiment ID: 20001558 Result: Down-regulated in Transcription
  misc_feature: MA Experiment 20001558 PARAMETER Experiment Name: At_Drought_Soil_Dry_P Parameter: Age (day) Value: 27
  misc_feature: MA Experiment 20001558 PARAMETER Experiment Name: At_Drought_Soil_Dry_P Parameter: Organism Value: A. thaliana
  misc_feature: MA Experiment 20001558 PARAMETER Experiment Name: At_Drought_Soil_Dry_P Parameter: Plant Line Value: WS
  misc_feature: MA Experiment 20001558 PARAMETER Experiment Name: At_Drought_Soil_Dry_P Parameter: Post Timepoint (hr) Value: 6
  misc_feature: MA Experiment 20001558 PARAMETER Experiment Name: At_Drought_Soil_Dry_P Parameter: Post-Treatment Value: Re-Water vs. No Drought
  misc_feature: MA Experiment 20001558 PARAMETER Experiment Name: At_Drought_Soil_Dry_P Parameter: Timepoint (day) Value: 13
  misc_feature: MA Experiment 20001558 PARAMETER Experiment Name: At_Drought_Soil_Dry_P Parameter: Treatment Value: Drought vs. No Drought
  misc_feature: MA Experiment ID: 20001559 Result: Down-regulated in Transcription
  misc_feature: MA Experiment 20001559 PARAMETER Experiment Name: At_Drought_Soil_Dry_P Parameter: Age (day) Value: 28
  misc_feature: MA Experiment 20001559 PARAMETER Experiment Name: At_Drought_Soil_Dry_P Parameter: Organism Value: A. thaliana
  misc_feature: MA Experiment 20001559 PARAMETER Experiment Name: At_Drought_Soil_Dry_P Parameter: Plant Line Value: WS
  misc_feature: MA Experiment 20001559 PARAMETER Experiment Name: At_Drought_Soil_Dry_P Parameter: Post Timepoint (hr) Value: 29
  misc_feature: MA Experiment 20001559 PARAMETER Experiment Name: At_Drought_Soil_Dry_P Parameter: Post-Treatment Value: Re-Water vs. No Drought
  misc_feature: MA Experiment 20001559 PARAMETER Experiment Name: At_Drought_Soil_Dry_P Parameter: Timepoint (day) Value: 14
  misc_feature: MA Experiment 20001559 PARAMETER Experiment Name: At_Drought_Soil_Dry_P Parameter: Treatment Value: Drought vs. No Drought
  misc_feature: MA Experiment ID: 20001560 Result: Down-regulated in Transcription
  misc_feature: MA Experiment 20001560 PARAMETER Experiment Name: At_Drought_Soil_Dry_P Parameter: Age (day) Value: 28
  misc_feature: MA Experiment 20001560 PARAMETER Experiment Name: At_Drought_Soil_Dry_P Parameter: Organism Value: A. thaliana
  misc_feature: MA Experiment 20001560 PARAMETER Experiment Name: At_Drought_Soil_Dry_P Parameter: Plant Line Value: WS
  misc_feature: MA Experiment 20001560 PARAMETER Experiment Name: At_Drought_Soil_Dry_P Parameter: Post Timepoint (hr) Value: None
  misc_feature: MA Experiment 20001560 PARAMETER Experiment Name: At_Drought_Soil_Dry_P Parameter: Post-Treatment Value: None
  misc_feature: MA Experiment 20001560 PARAMETER Experiment Name: At_Drought_Soil_Dry_P Parameter: Timepoint (day) Value: 14
  misc_feature: MA Experiment 20001560 PARAMETER Experiment Name: At_Drought_Soil_Dry_P Parameter: Treatment Value: Drought vs. No Drought
  misc_feature: MA Experiment ID: 20001904 Result: Down-regulated in Transcription
  misc_feature: MA Experiment 20001904 PARAMETER Experiment Name: At_Drought_Reproduction_P Parameter: Age (day) Value: 37
  misc_feature: MA Experiment 20001904 PARAMETER Experiment Name: At_Drought_Reproduction_P Parameter: Organism Value: A. thaliana
  misc_feature: MA Experiment 20001904 PARAMETER Experiment Name: At_Drought_Reproduction_P Parameter: Plant Line Value: WS
  misc_feature: MA Experiment 20001904 PARAMETER Experiment Name: At_Drought_Reproduction_P Parameter: Timepoint (day) Value: 7
  misc_feature: MA Experiment 20001904 PARAMETER Experiment Name: At_Drought_Reproduction_P Parameter: Tissue Value: Rosettes
  misc_feature: MA Experiment 20001904 PARAMETER Experiment Name: At_Drought_Reproduction_P Parameter: Treatment Value: Drought vs. No Drought
  misc_feature: MA Experiment ID: 20001905 Result: Down-regulated in Transcription
  misc_feature: MA Experiment 20001905 PARAMETER Experiment Name: At_Drought_Reproduction_P Parameter: Age (day) Value: 40
  misc_feature: MA Experiment 20001905 PARAMETER Experiment Name: At_Drought_Reproduction_P Parameter: Organism Value: A. thaliana
  misc_feature: MA Experiment 20001905 PARAMETER Experiment Name: At_Drought_Reproduction_P Parameter: Plant Line Value: WS
  misc_feature: MA Experiment 20001905 PARAMETER Experiment Name: At_Drought_Reproduction_P Parameter: Timepoint (day) Value: 10
  misc_feature: MA Experiment 20001905 PARAMETER Experiment Name: At_Drought_Reproduction_P Parameter: Tissue Value: Rosettes
  misc_feature: MA Experiment 20001905 PARAMETER Experiment Name: At_Drought_Reproduction_P Parameter: Treatment Value: Drought vs. No Drought
tgagtaatttagagaaaacaatcagcgatgatgaatccccaaagaaacaaattcgtaaggtttaatggaaatgatgatgagttttcgaccaaaactaatagaccatcagtatcttcagttatgaaaaccgttagacgaagcttcgaaaaggggtcagagaaaatcagaacctttaagcggcccttaagcgttcattcaaataagaataaagaaaataataagaagaagaagatactaagagtgatgaatccgaacgattcatatcttcaaagctggaacaagattttcttgcttctctctgttgtggctttagcctttgatcctctgtttttctatatcccctatgtgaagcccgagcgattttgtcttaatctagacaagaaactccagacaatcgcttgcgttttccgcactttcatcgacgctttctatgtggttcacatgctgtttcagtttcataccggtttcatcactccttcttctagtggtttcggcagaggagagcttaatgagaaacataaagatatcgctttaagatacctcggctcatactttctaatcgatcttctttcgattctccctattcctcaggtagttgttctagctattgttccaaggatgagacgacccgcgtcgctagtagcaaaagagctactgaaatgggtaatcttttgccaatatgttccgaggatagcgagaatctatccgcttttcaaggaagtaacaagaacttctggtttggtaactgaaactgcttgggctggtgctgctttaaacctattcctctacatgttagctagccacgtttttgggtctttttggtacttgatttcgatagaaaggaaagatagatgttggcgtgaggcgtgtgctaacatacaagattgcagtcatgaaaaactgtactgttcaccaacaggggaagacaataggttatttttaaacggttcttgtccgttgatcgatcccgaagaaatcacaaactcgacggttttcaactttggtatattcgctgatgcattgcagtctggagttgtggagtctagagatttccctaagaagtttttctactgtttctggtggggtctccgcaatcttagtgctttgggccaaaacttgaagacgagttcctttgaaggagagatcatttttgcaatagtcatttgtatttctggactagtcttgtttgctctcctcattggaaatatgcagaaatatttgcaatcaactactgtaagagttgaggaaatgagagtgaaaaggagagatgcagagcaatggatgtctcatcggatgttgccagacgatctgagaaaacgtatccgtaaatacgaacagtataaatggcaagaaaccaaaggagttgaggaagaagctcttctctctagtcttccaaaagatctcagaaaggacattaaacgccatctttgtctcaagttgctcaaaaaggtgccttggttccaagctatggatgatcggttactagatgctctatgtgctcgtctcaaaacggttctttatacagagaaaagttacattgtgcgtgaaggtgaagcagtggaggatatgttgtttataatgagaggaaatttaatcagcaccactacttatggtggcaaaactggtttcttcaattctgttgacttagttgctggtgatttctgtggagatcttctcacttgggcattagatcctctcagttcccagttccctatctctagtagaaccgttcaagcgttgacagaagtcgaaggctttgttctctcagctgatgatctcaagtttgtcgctactcagtatcgtcgcctccatagcaagcaactccgacacatgttcaggttttattcagtgcaatggcagacatgggcagcatgttttatacaagcagcatggaagagacattgtagaaggaagctctcaaaggctttacgtcaagaagaaggcggaaaactacataacactcttcagaacgatgattcaggaggcaataaacttaacttaggtgctgcgattaatgcgtcgaggtttgcttctcatgctctgaggaatctaagagcaaatgcagcagcccgaaattctagattcccacacatgttaactttgttgcctcagaaaccagccgatcctgagtttcctatggatgaaacctagttgtgtatataggccctgttcgtttgcctgtcgctggcgactgaaaccagcgacagc

SEQ ID NO: 76377 - protein, 707 aa, Arabidopsis thaliana
  peptide (1)..(707): Ceres Seq. ID no. 7107782
  misc_feature (123)..(394): Pfam Name: Ion transport protein Pfam Description: Ion transport protein
  misc_feature (14)..(704): Homolog of NCBI NO: 7484881 NR Description: cyclic nucleotide gated channel homolog F3I3.30 -
  misc_feature (6)..(704): Homolog of NCBI NO: 22328204 NR Description: cyclic nucleotide-regulated ion channel,
  misc_feature (33)..(707): Homolog of NCBI NO: 18378827 NR Description: cyclic nucleotide-regulated ion channel; protein
  misc_feature (33)..(707): Homolog of NCBI NO: 38503202 NR Description: Probable cyclic nucleotide-gated ion channel 10
  misc_feature (6)..(704): Homolog of NCBI NO: 25407074 NR Description: hypothetical protein AT4g01010 [imported] - thaliana >gi|7228242|emb|CAB45784.2| cyclic nucleotide gated (CNGC4) like protein [Arabidopsis thaliana]
  misc_feature (2)..(706): Homolog of NCBI NO: 15238657 NR Description: cyclic nucleotide-regulated ion channel (CNGC1); id: At5g53130.1, supported by cDNA: gi_13877752 [Arabidopsis
  misc_feature (80)..(664): Homolog of NCBI NO: 15225983 NR Description: cyclic nucleotide-regulated ion channel, protein id: At2g46440.1 [Arabidopsis thaliana]
  misc_feature (36)..(706): Homolog of NCBI NO: 18400426 NR Description: cyclic nucleotide-regulated ion channel (CNGC6); id: At2g23980.1, supported by cDNA: gi_14532659 [Arabidopsis
  misc_feature (33)..(705): Homolog of NCBI NO: 30696976 NR Description: cyclic nucleotide-regulated ion channel (CNGC5)
  misc_feature (36)..(707): Homolog of NCBI NO: 15234769 NR Description: cyclic nucleotide-regulated ion channel, protein id: At4g30560.1 [Arabidopsis thaliana]
MMNPQRNKFVRFNGNDDEFSTKTNRPSVSSVMKTVRRSFEKGSEKIRTFKRPLSVHSNKNKENNKKKKILRVMNPNDSYLQSWNKIFLLLSVVALAFDPLFFYIPYVKPERFCLNLDKKLQTIACVFRTFIDAFYVVHMLFQFHTGFITPSSSGFGRGELNEKHKDIALRYLGSYFLIDLLSILPIPQVVVLAIVPRMRRPASLVAKELLKWVIFCQYVPRIARIYPLFKEVTRTSGLVTETAWAGAALNLFLYMLASHVFGSFWYLISIERKDRCWREACANIQDCSHEKLYCSPTGEDNRLFLNGSCPLIDPEEITNSTVFNFGIFADALQSGVVESRDFPKKFFYCFWWGLRNLSALGQNLKTSSFEGEIIFAIVICISGLVLFALLIGNMQKYLQSTTVRVEEMRVKRRDAEQWMSHRMLPDDLRKRIRKYEQYKWQETKGVEEEALLSSLPKDLRKDIKRHLCLKLLKKVPWFQAMDDRLLDALCARLKTVLYTEKSYIVREGEAVEDMLFIMRGNLISTTTYGGKTGFFNSVDLVAGDFCGDLLTWALDPLSSQFPISSRTVQALTEVEGFVLSADDLKFVATQYRRLHSKQLRHMFRFYSVQWQTWAACFIQAAWKRHCRRKLSKALRQEEGGKLHNTLQNDDSGGNKLNLGAAINASRFASHALRNLRANAAARNSRFPHMLTLLPQKPADPEFPMDET

SEQ ID NO: 76378 - protein, 706 aa, Arabidopsis thaliana
  peptide (1)..(706): Ceres Seq. ID no. 7107783
  misc_feature (122)..(393): Pfam Name: Ion transport protein Pfam Description: Ion transport protein
  misc_feature (13)..(703): Homolog of NCBI NO: 7484881 NR Description: cyclic nucleotide gated channel homolog F3I3.30 -
  misc_feature (5)..(703): Homolog of NCBI NO: 22328204 NR Description: cyclic nucleotide-regulated ion channel,
  misc_feature (32)..(706): Homolog of NCBI NO: 18378827 NR Description: cyclic nucleotide-regulated ion channel; protein
  misc_feature (32)..(706): Homolog of NCBI NO: 38503202 NR Description: Probable cyclic nucleotide-gated ion channel 10
  misc_feature (5)..(703): Homolog of NCBI NO: 25407074 NR Description: hypothetical protein AT4g01010 [imported] - thaliana >gi|7228242|emb|CAB45784.2| cyclic nucleotide gated (CNGC4) like protein [Arabidopsis thaliana]
  misc_feature (1)..(705): Homolog of NCBI NO: 15238657 NR Description: cyclic nucleotide-regulated ion channel (CNGC1); id: At5g53130.1, supported by cDNA: gi_13877752 [Arabidopsis
  misc_feature (79)..(663): Homolog of NCBI NO: 15225983 NR Description: cyclic nucleotide-regulated ion channel, protein id: At2g46440.1 [Arabidopsis thaliana]
  misc_feature (35)..(705): Homolog of NCBI NO: 18400426 NR Description: cyclic nucleotide-regulated ion channel (CNGC6); id: At2g23980.1, supported by cDNA: gi_14532659 [Arabidopsis
  misc_feature (32)..(704): Homolog of NCBI NO: 30696976 NR Description: cyclic nucleotide-regulated ion channel (CNGC5)
  misc_feature (35)..(706): Homolog of NCBI NO: 15234769 NR Description: cyclic nucleotide-regulated ion channel, protein id: At4g30560.1 [Arabidopsis thaliana]
MNPQRNKFVRFNGNDDEFSTKTNRPSVSSVMKTVRRSFEKGSEKIRTFKRPLSVHSNKNKENNKKKKILRVMNPNDSYLQSWNKIFLLLSVVALAFDPLFFYIPYVKPERFCLNLDKKLQTIACVFRTFIDAFYVVHMLFQFHTGFITPSSSGFGRGELNEKHKDIALRYLGSYFLIDLLSILPIPQVVVLAIVPRMRRPASLVAKELLKWVIFCQYVPRIARIYPLFKEVTRTSGLVTETAWAGAALNLFLYMLASHVFGSFWYLISIERKDRCWREACANIQDCSHEKLYCSPTGEDNRLFLNGSCPLIDPEEITNSTVFNFGIFADALQSGVVESRDFPKKFFYCFWWGLRNLSALGQNLKTSSFEGEIIFAIVICISGLVLFALLIGNMQKYLQSTTVRVEEMRVKRRDAEQWMSHRMLPDDLRKRIRKYEQYKWQETKGVEEEALLSSLPKDLRKDIKRHLCLKLLKKVPWFQAMDDRLLDALCARLKTVLYTEKSYIVREGEAVEDMLFIMRGNLISTTTYGGKTGFFNSVDLVAGDFCGDLLTWALDPLSSQFPISSRTVQALTEVEGFVLSADDLKFVATQYRRLHSKQLRHMFRFYSVQWQTWAACFIQAAWKRHCRRKLSKALRQEEGGKLHNTLQNDDSGGNKLNLGAAINASRFASHALRNLRANAAARNSRFPHMLTLLPQKPADPEFPMDET

SEQ ID NO: 76379 - protein, 676 aa, Arabidopsis thaliana
  peptide (1)..(676): Ceres Seq. ID no. 7107784
  misc_feature (92)..(363): Pfam Name: Ion transport protein Pfam Description: Ion transport protein
  misc_feature (1)..(673): Homolog of NCBI NO: 7484881 NR Description: cyclic nucleotide gated channel homolog F3I3.30 -
  misc_feature (1)..(673): Homolog of NCBI NO: 22328204 NR Description: cyclic nucleotide-regulated ion channel,
  misc_feature (2)..(676): Homolog of NCBI NO: 18378827 NR Description: cyclic nucleotide-regulated ion channel; protein
  misc_feature (2)..(676): Homolog of NCBI NO: 38503202 NR Description: Probable cyclic nucleotide-gated ion channel 10
  misc_feature (1)..(673): Homolog of NCBI NO: 25407074 NR Description: hypothetical protein AT4g01010 [imported] - thaliana >gi|7228242|emb|CAB45784.2| cyclic nucleotide gated (CNGC4) like protein [Arabidopsis thaliana]
  misc_feature (1)..(675): Homolog of NCBI NO: 15238657 NR Description: cyclic nucleotide-regulated ion channel (CNGC1); id: At5g53130.1, supported by cDNA: gi_13877752 [Arabidopsis
  misc_feature (49)..(633): Homolog of NCBI NO: 15225983 NR Description: cyclic nucleotide-regulated ion channel, protein id: At2g46440.1 [Arabidopsis thaliana]
  misc_feature (5)..(675): Homolog of NCBI NO: 18400426 NR Description: cyclic nucleotide-regulated ion channel (CNGC6); id: At2g23980.1, supported by cDNA: gi_14532659 [Arabidopsis
  misc_feature (2)..(674): Homolog of NCBI NO: 30696976 NR Description: cyclic nucleotide-regulated ion channel (CNGC5)
  misc_feature (5)..(676): Homolog of NCBI NO: 15234769 NR Description: cyclic nucleotide-regulated ion channel, protein id: At4g30560.1 [Arabidopsis thaliana]
MKTVRRSFEKGSEKIRTFKRPLSVHSNKNKENNKKKKILRVMNPNDSYLQSWNKIFLLLSVVALAFDPLFFYIPYVKPERFCLNLDKKLQTIACVFRTFIDAFYVVHMLFQFHTGFITPSSSGFGRGELNEKHKDIALRYLGSYFLIDLLSILPIPQVVVLAIVPRMRRPASLVAKELLKWVIFCQYVPRIARIYPLFKEVTRTSGLVTETAWAGAALNLFLYMLASHVFGSFWYLISIERKDRCWREACANIQDCSHEKLYCSPTGEDNRLFLNGSCPLIDPEEITNSTVFNFGIFADALQSGVVESRDFPKKFFYCFWWGLRNLSALGQNLKTSSFEGEIIFAIVICISGLVLFALLIGNMQKYLQSTTVRVEEMRVKRRDAEQWMSHRMLPDDLRKRIRKYEQYKWQETKGVEEEALLSSLPKDLRKDIKRHLCLKLLKKVPWFQAMDDRLLDALCARLKTVLYTEKSYIVREGEAVEDMLFIMRGNLISTTTYGGKTGFFNSVDLVAGDFCGDLLTWALDPLSSQFPISSRTVQALTEVEGFVLSADDLKFVATQYRRLHSKQLRHMFRFYSVQWQTWAACFIQAAWKRHCRRKLSKALRQEEGGKLHNTLQNDDSGGNKLNLGAAINASRFASHALRNLRANAAARNSRFPHMLTLLPQKPADPEFPMDET

SEQ ID NO: 76380 - DNA, 2111 bp, Arabidopsis thaliana
  misc_feature (1)..(2111): Ceres Seq. ID no. 7107785
  misc_feature: MA Experiment ID: 20000184 Result: Down-regulated in Transcription
  misc_feature: MA Experiment 20000184 PARAMETER Experiment Name: At_Shoots__P Parameter: Age (day) Value: 7
  misc_feature: MA Experiment 20000184 PARAMETER Experiment Name: At_Shoots__P Parameter: Tissue Value: Shoots vs. Whole Plant
  misc_feature: MA Experiment ID: 20000235 Result: Down-regulated in Transcription
  misc_feature: MA Experiment 20000235 PARAMETER Experiment Name: At_Siliques_P Parameter: Age (day) Value: 21
  misc_feature: MA Experiment 20000235 PARAMETER Experiment Name: At_Siliques_P Parameter: Organism Value: A. thaliana
  misc_feature: MA Experiment 20000235 PARAMETER Experiment Name: At_Siliques_P Parameter: Plant Line Value: WS
  misc_feature: MA Experiment 20000235 PARAMETER Experiment Name: At_Siliques_P Parameter: Tissue Value: 5-10mm Siliques vs. Whole Plant
  misc_feature: MA Experiment ID: 20001451 Result: Down-regulated in Transcription
  misc_feature: MA Experiment 20001451 PARAMETER Experiment Name: At_Far-red-induction_P Parameter: Age (day) Value: 7
  misc_feature: MA Experiment 20001451 PARAMETER Experiment Name: At_Far-red-induction_P Parameter: Light Value: Far-red vs. White
  misc_feature: MA Experiment 20001451 PARAMETER Experiment Name: At_Far-red-induction_P Parameter: Organism Value: A. thaliana
  misc_feature: MA Experiment 20001451 PARAMETER Experiment Name: At_Far-red-induction_P Parameter: Plant Line Value: Columbia
  misc_feature: MA Experiment 20001451 PARAMETER Experiment Name: At_Far-red-induction_P Parameter: Timepoint (hr) Value: 24
  misc_feature: MA Experiment 20001451 PARAMETER Experiment Name: At_Far-red-induction_P Parameter: Tissue Value: Whole Plant
aaaagcttagcaaaattcttctgaatgaataatcggcgattatgtctttgaaaaacgatgcgagtagtagccacgacggtggaagcaacagagaaagcgtaatcgatgatcatggccgccgtaaaagcacttgcggctactgtaaatccccagctcggtccagtatctctcacggtttatcagcacagactcttaccgtttatgactaccaagctcttattgaccgaggctggagaagatctggtacttatctttacaaacatgagatggataaaacgtgttgccctccttatacgatacgtttgaaagcaagtgattttgttcctactaaagagcagcagcgagtttctagaagactagaaaggttcttggatggcaaactagatgtgcagcccagggaacaaagaggtgcttcttcctctggtgatgtttcagatacaaggagaaaaacacttggagctgctaaaagtgaagagaataagaaagttgaagcagttatggatgatttgtctaaaaatattgaccaagctgtgcaattatgcatacggagtggggaattcccgtctaatatgcagataccaaaagcttcagtgaagaaggttttctgtgctagaagaaagaaactagctgaaggaacagaacaaatcttatacaccagcaacattgcttttccaatagcagctgcaataaaacgcatccagacatctgagaaagaggggataaatagtgcagaaggaaatagattatcacctgaaactatttctgagatgttgttgagtgcaatgcataaggtgggggaaactcctgatgtgtctatcaaagtctgtaagggccatatcaatttcctttcatctgccaaagattctttttctgatagagatgttgtacctaatggtaacatctcgagaggagccaattctttagatggaagtgaaacccttcacgctaagaaggattcagaaaaccatcaggcaagaaagcgaaagctggagatacatttgaaaaggtctagttttgatcctgaagaacatgagttatacaaacggtatcagctgaaagtgcacaatgataagccagggcacgttgtagaaagttcatacagaaggtttttggtcgactctcctttaatagatgttcaaccttcaggtgatgaaaaggttccgccttgtggcttcggctctttccaccaacaatatagaattgatggccgcctaattgccgtcggggttgtagacattcttcctaaatgtttgtcaagtgtatacttattctgggatccagactatgcattcttatcgctcggaaaatattctgccattcaagaaattaattgggttatagagaaccaagctcgctgcccttctcttcagtattactatcttggttattatatacattcctgcagcaagatgagatataaagcagcctatcgtccatctgagcttctatgtcctctccgtttccagtgggttccatttgaagtagcaaggccgatgcttgataaaaagccatatgtcatattgtccgatattgctatttcacataatcaatgttctttactagctggtgcttctgaaactctcgtggaaccagcagcaagtgaacatgaagacatggaacaaggggagacgaatgataactttatgggctgcagtgatgaggatgaagatgaggatgatgatgatgatgatgatgatgaggaaatgtatgagactgaatcagaggactctcatattgagtcagaccctggatccaaagataacgacattaacaacatccttatcggtctttatggatcccaatatagatacaaggaaatgcggcagatcataactcccgtaggcaggaagcaactggaaccgatgttacaaagctaccgcaaggttgtgggcgctgagctttcagagagaatggtgtatgaaatcaactgaagcttcaacaataccaagctccattgagctttggtaccattagtcattagataaaactcaaaattgtttgtattcatgtttcagttgttgtatatctatgactatgagacttgtacatggtgtctttctttaagtttgtattttctgattacctttatattgaaaaaatttctgtccaag

SEQ ID NO: 76381 - protein, 629 aa, Arabidopsis thaliana
  peptide (1)..(629): Ceres Seq. ID no. 7107786
  misc_feature (322)..(478): Pfam Name: Arginine-tRNA-protein transferase, C terminus Pfam Description: Arginine-tRNA-protein transferase, C terminus
  misc_feature (4)..(565): Homolog of NCBI NO: 15229703 NR Description: arginine-tRNA-protein transferase, putative; id: At3g11240.1, supported by cDNA: gi_13877874, supported by
  misc_feature (529)..(628): Homolog of NCBI NO: 15229703 NR Description: arginine-tRNA-protein transferase, putative; id: At3g11240.1, supported by cDNA: gi_13877874, supported by
  misc_feature (322)..(491): Homolog of NCBI NO: 31542151 NR Description: arginine-tRNA-protein transferase 1 [Mus musculus]
  misc_feature (25)..(110): Homolog of NCBI NO: 31542151 NR Description: arginine-tRNA-protein transferase 1 [Mus musculus]
  misc_feature (315)..(491): Homolog of NCBI NO: 22002033 NR Description: Arginine-tRNA-protein transferase 1
  misc_feature (13)..(165): Homolog of NCBI NO: 22002033 NR Description: Arginine-tRNA-protein transferase 1
  misc_feature (315)..(491): Homolog of NCBI NO: 3806094 NR Description: arginine-tRNA-protein transferase 1-1p; ATE1-1p
  misc_feature (31)..(165): Homolog of NCBI NO: 3806094 NR Description: arginine-tRNA-protein transferase 1-1p; ATE1-1p
  misc_feature (322)..(491): Homolog of NCBI NO: 13123998 NR Description: Arginine-tRNA-protein transferase 1
  misc_feature (25)..(110): Homolog of NCBI NO: 13123998 NR Description: Arginine-tRNA-protein transferase 1
MSLKNDASSSHDGGSNRESVIDDHGRRKSTCGYCKSPARSSISHGLSAQTLTVYDYQALIDRGWRRSGTYLYKHEMDKTCCPPYTIRLKASDFVPTKEQQRVSRRLERFLDGKLDVQPREQRGASSSGDVSDTRRKTLGAAKSEENKKVEAVMDDLSKNIDQAVQLCIRSGEFPSNMQIPKASVKKVFCARRKKLAEGTEQILYTSNIAFPIAAAIKRIQTSEKEGINSAEGNRLSPETISEMLLSAMHKVGETPDVSIKVCKGHINFLSSAKDSFSDRDVVPNGNISRGANSLDGSETLHAKKDSENHQARKRKLEIHLKRSSFDPEEHELYKRYQLKVHNDKPGHVVESSYRRFLVDSPLIDVQPSGDEKVPPCGFGSFHQQYRIDGRLIAVGVVDILPKCLSSVYLFWDPDYAFLSLGKYSAIQEINWVIENQARCPSLQYYYLGYYIHSCSKMRYKAAYRPSELLCPLRFQWVPFEVARPMLDKKPYVILSDIAISHNQCSLLAGASETLVEPAASEHEDMEQGETNDNFMGCSDEDEDEDDDDDDDDEEMYETESEDSHIESDPGSKDNDINNILIGLYGSQYRYKEMRQIITPVGRKQLEPMLQSYRKVVGAELSERMVYEIN

SEQ ID NO: 76382 - protein, 554 aa, Arabidopsis thaliana
  peptide (1)..(554): Ceres Seq. ID no. 7107787
  misc_feature (247)..(403): Pfam Name: Arginine-tRNA-protein transferase, C terminus Pfam Description: Arginine-tRNA-protein transferase, C terminus
  misc_feature (1)..(490): Homolog of NCBI NO: 15229703 NR Description: arginine-tRNA-protein transferase, putative; id: At3g11240.1, supported by cDNA: gi_13877874, supported by
  misc_feature (454)..(553): Homolog of NCBI NO: 15229703 NR Description: arginine-tRNA-protein transferase, putative; id: At3g11240.1, supported by cDNA: gi_13877874, supported by
  misc_feature (247)..(416): Homolog of NCBI NO: 31542151 NR Description: arginine-tRNA-protein transferase 1 [Mus musculus]
  misc_feature (1)..(35): Homolog of NCBI NO: 31542151 NR Description: arginine-tRNA-protein transferase 1 [Mus musculus]
  misc_feature (240)..(416): Homolog of NCBI NO: 22002033 NR Description: Arginine-tRNA-protein transferase 1
  misc_feature (1)..(90): Homolog of NCBI NO: 22002033 NR Description: Arginine-tRNA-protein transferase 1
  misc_feature (240)..(416): Homolog of NCBI NO: 3806094 NR Description: arginine-tRNA-protein transferase 1-1p; ATE1-1p
  misc_feature (1)..(90): Homolog of NCBI NO: 3806094 NR Description: arginine-tRNA-protein transferase 1-1p; ATE1-1p
  misc_feature (247)..(416): Homolog of NCBI NO: 13123998 NR Description: Arginine-tRNA-protein transferase 1
  misc_feature (1)..(35): Homolog of NCBI NO: 13123998 NR Description: Arginine-tRNA-protein transferase 1
MDKTCCPPYTIRLKASDFVPTKEQQRVSRRLERFLDGKLDVQPREQRGASSSGDVSDTRRKTLGAAKSEENKKVEAVMDDLSKNIDQAVQLCIRSGEFPSNMQIPKASVKKVFCARRKKLAEGTEQILYTSNIAFPIAAAIKRIQTSEKEGINSAEGNRLSPETISEMLLSAMHKVGETPDVSIKVCKGHINFLSSAKDSFSDRDVVPNGNISRGANSLDGSETLHAKKDSENHQARKRKLEIHLKRSSFDPEEHELYKRYQLKVHNDKPGHVVESSYRRFLVDSPLIDVQPSGDEKVPPCGFGSFHQQYRIDGRLIAVGVVDILPKCLSSVYLFWDPDYAFLSLGKYSAIQEINWVIENQARCPSLQYYYLGYYIHSCSKMRYKAAYRPSELLCPLRFQWVPFEVARPMLDKKPYVILSDIAISHNQCSLLAGASETLVEPAASEHEDMEQGETNDNFMGCSDEDEDEDDDDDDDDEEMYETESEDSHIESDPGSKDNDINNILIGLYGSQYRYKEMRQIITPVGRKQLEPMLQSYRKVVGAELSERMVYEIN

SEQ ID NO: 76383 - protein, 477 aa, Arabidopsis thaliana
  peptide (1)..(477): Ceres Seq. ID no. 7107788
  misc_feature (170)..(326): Pfam Name: Arginine-tRNA-protein transferase, C terminus Pfam Description: Arginine-tRNA-protein transferase, C terminus
  misc_feature (1)..(413): Homolog of NCBI NO: 15229703 NR Description: arginine-tRNA-protein transferase, putative; id: At3g11240.1, supported by cDNA: gi_13877874, supported by
  misc_feature (377)..(476): Homolog of NCBI NO: 15229703 NR Description: arginine-tRNA-protein transferase, putative; id: At3g11240.1, supported by cDNA: gi_13877874, supported by
  misc_feature (170)..(339): Homolog of NCBI NO: 31542151 NR Description: arginine-tRNA-protein transferase 1 [Mus musculus]
  misc_feature (163)..(339): Homolog of NCBI NO: 22002033 NR Description: Arginine-tRNA-protein transferase 1
  misc_feature (1)..(13): Homolog of NCBI NO: 22002033 NR Description: Arginine-tRNA-protein transferase 1
  misc_feature (163)..(339): Homolog of NCBI NO: 3806094 NR Description: arginine-tRNA-protein transferase 1-1p; ATE1-1p
  misc_feature (1)..(13): Homolog of NCBI NO: 3806094 NR Description: arginine-tRNA-protein transferase 1-1p; ATE1-1p
  misc_feature (170)..(339): Homolog of NCBI NO: 13123998 NR Description: Arginine-tRNA-protein transferase 1
  misc_feature (64)..(344): Homolog of NCBI NO: 24656066 NR Description: CG9204-PB [Drosophila melanogaster]
  misc_feature (64)..(344): Homolog of NCBI NO: 25012280 NR Description: LD33682p [Drosophila melanogaster]
MDDLSKNIDQAVQLCIRSGEFPSNMQIPKASVKKVFCARRKKLAEGTEQILYTSNIAFPIAAAIKRIQTSEKEGINSAEGNRLSPETISEMLLSAMHKVGETPDVSIKVCKGHINFLSSAKDSFSDRDVVPNGNISRGANSLDGSETLHAKKDSENHQARKRKLEIHLKRSSFDPEEHELYKRYQLKVHNDKPGHVVESSYRRFLVDSPLIDVQPSGDEKVPPCGFGSFHQQYRIDGRLIAVGVVDILPKCLSSVYLFWDPDYAFLSLGKYSAIQEINWVIENQARCPSLQYYYLGYYIHSCSKMRYKAAYRPSELLCPLRFQWVPFEVARPMLDKKPYVILSDIAISHNQCSLLAGASETLVEPAASEHEDMEQGETNDNFMGCSDEDEDEDDDDDDDDEEMYETESEDSHIESDPGSKDNDINNILIGLYGSQYRYKEMRQIITPVGRKQLEPMLQSYRKVVGAELSERMVYEIN

SEQ ID NO: 76384 - DNA, 702 bp, Arabidopsis thaliana
  misc_feature (1)..(702): Ceres Seq. ID no. 7107797
  misc_feature: MA Experiment ID: 108434 Result: Down-regulated in Transcription
  misc_feature: MA Experiment 108434 PARAMETER Experiment Name: At_Root_Tips_cDNA_P Parameter: Tissue Value: Root Tips
  misc_feature: MA Experiment ID: 108462 Result: Up-regulated in Transcription
  misc_feature: MA Experiment 108462 PARAMETER Experiment Name: At_Germinating_Seeds_cDNA_P Parameter: Age (day) Value: 2 vs. 0
  misc_feature: MA Experiment 108462 PARAMETER Experiment Name: At_Germinating_Seeds_cDNA_P Parameter: Tissue Value: Germinating Seeds
  misc_feature: MA Experiment ID: 108464 Result: Up-regulated in Transcription
  misc_feature: MA Experiment 108464 PARAMETER Experiment Name: At_Germinating_Seeds_cDNA_P Parameter: Age (day) Value: 4 vs. 0
  misc_feature: MA Experiment 108464 PARAMETER Experiment Name: At_Germinating_Seeds_cDNA_P Parameter: Tissue Value: Germinating Seeds
  misc_feature: MA Experiment ID: 108488 Result: Down-regulated in Transcription
  misc_feature: MA Experiment ID: 108561 Result: Up-regulated in Transcription
  misc_feature: MA Experiment 108561 PARAMETER Experiment Name: At_100uM_ABA_cDNA_P Parameter: Timepoint (hr) Value: 6
  misc_feature: MA Experiment 108561 PARAMETER Experiment Name: At_100uM_ABA_cDNA_P Parameter: Tissue Value: Aerial
  misc_feature: MA Experiment 108561 PARAMETER Experiment Name: At_100uM_ABA_cDNA_P Parameter: Treatment Value: 100uM ABA vs. No Treatment
  misc_feature: MA Experiment ID: 108573 Result: Up-regulated in Transcription
  misc_feature: MA Experiment 108573 PARAMETER Experiment Name: At_Drought_cDNA_P Parameter: Timepoint (hr) Value: 6
  misc_feature: MA Experiment 108573 PARAMETER Experiment Name: At_Drought_cDNA_P Parameter: Tissue Value: Aerial
  misc_feature: MA Experiment 108573 PARAMETER Experiment Name: At_Drought_cDNA_P Parameter: Treatment Value: Drought vs. No Drought
  misc_feature: MA Experiment ID: 108585 Result: Up-regulated in Transcription
  misc_feature: MA Experiment 108585 PARAMETER Experiment Name: At_5mM_NaNP_cDNA_P Parameter: Timepoint (hr) Value: 6
  misc_feature: MA Experiment 108585 PARAMETER Experiment Name: At_5mM_NaNP_cDNA_P Parameter: Tissue Value: Aerial
  misc_feature: MA Experiment 108585 PARAMETER Experiment Name: At_5mM_NaNP_cDNA_P Parameter: Treatment Value: null
  misc_feature: MA Experiment ID: 108594 Result: Down-regulated in Transcription
  misc_feature: MA Experiment 108594 PARAMETER Experiment Name: At_Ler-rhl_Root_cDNA_P Parameter: Plant Line Value: null
  misc_feature: MA Experiment ID: 108595 Result: Down-regulated in Transcription
  misc_feature: MA Experiment 108595 PARAMETER Experiment Name: At_Ler-pi_Ovule_cDNA_P Parameter: Plant Line Value: null
  misc_feature: MA Experiment ID: 108605 Result: Up-regulated in Transcription
  misc_feature: MA Experiment 108605 PARAMETER Experiment Name: At_100uM_ABA_cDNA_P Parameter: Timepoint (hr) Value: 6
  misc_feature: MA Experiment 108605 PARAMETER Experiment Name: At_100uM_ABA_cDNA_P Parameter: Tissue Value: Aerial
  misc_feature: MA Experiment 108605 PARAMETER Experiment Name: At_100uM_ABA_cDNA_P Parameter: Treatment Value: 100uM ABA vs. No Treatment
  misc_feature: MA Experiment ID: 108607 Result: Up-regulated in Transcription
  misc_feature: MA Experiment 108607 PARAMETER Experiment Name: At_100uM_ABA_cDNA_P Parameter: Timepoint (hr) Value: 4
  misc_feature: MA Experiment 108607 PARAMETER Experiment Name: At_100uM_ABA_cDNA_P Parameter: Tissue Value: Aerial
  misc_feature: MA Experiment 108607 PARAMETER Experiment Name: At_100uM_ABA_cDNA_P Parameter: Treatment Value: 100uM ABA vs. No Treatment
  misc_feature: MA Experiment ID: 108668 Result: Up-regulated in Transcription
  misc_feature: MA Experiment 108668 PARAMETER Experiment Name: At_2mM_SA_cDNA_P Parameter: Plant Line Value: WS
  misc_feature: MA Experiment 108668 PARAMETER Experiment Name: At_2mM_SA_cDNA_P Parameter: Timepoint (hr) Value: 6
  misc_feature: MA Experiment 108668 PARAMETER Experiment Name: At_2mM_SA_cDNA_P Parameter: Treatment Value: 2mM SA vs. No Treatment
  misc_feature: MA Experiment ID: 20000070 Result: Up-regulated in Transcription
  misc_feature: MA Experiment 20000070 PARAMETER Experiment Name: At_100uM_ABA_Mutants_cDNA_P Parameter: Plant Line Value: CS24
  misc_feature: MA Experiment 20000070 PARAMETER Experiment Name: At_100uM_ABA_Mutants_cDNA_P Parameter: Timepoint (hr) Value: 6
  misc_feature: MA Experiment 20000070 PARAMETER Experiment Name: At_100uM_ABA_Mutants_cDNA_P Parameter: Tissue Value: Aerial
  misc_feature: MA Experiment 20000070 PARAMETER Experiment Name: At_100uM_ABA_Mutants_cDNA_P Parameter: Treatment Value: 100uM ABA vs. No Treatment
  misc_feature: MA Experiment ID: 20000071 Result: Up-regulated in Transcription
  misc_feature: MA Experiment 20000071 PARAMETER Experiment Name: At_100uM_ABA_Mutants_cDNA_P Parameter: Plant Line Value: CS8104
  misc_feature: MA Experiment 20000071 PARAMETER Experiment Name: At_100uM_ABA_Mutants_cDNA_P Parameter: Timepoint (hr) Value: 6
  misc_feature: MA Experiment 20000071 PARAMETER Experiment Name: At_100uM_ABA_Mutants_cDNA_P Parameter: Tissue Value: Aerial
  misc_feature: MA Experiment 20000071 PARAMETER Experiment Name: At_100uM_ABA_Mutants_cDNA_P Parameter: Treatment Value: 100uM ABA vs. No Treatment
  misc_feature: MA Experiment ID: 20000072 Result: Up-regulated in Transcription
  misc_feature: MA Experiment 20000072 PARAMETER Experiment Name: At_100uM_ABA_Mutants_cDNA_P Parameter: Plant Line Value: CS8105
  misc_feature: MA Experiment 20000072 PARAMETER Experiment Name: At_100uM_ABA_Mutants_cDNA_P Parameter: Timepoint (hr) Value: 6
  misc_feature: MA Experiment 20000072 PARAMETER Experiment Name: At_100uM_ABA_Mutants_cDNA_P Parameter: Tissue Value: Aerial
  misc_feature: MA Experiment 20000072 PARAMETER Experiment Name: At_100uM_ABA_Mutants_cDNA_P Parameter: Treatment Value: 100uM ABA vs. No Treatment
  misc_feature: MA Experiment ID: 20000117 Result: Up-regulated in Transcription
  misc_feature: MA Experiment 20000117 PARAMETER Experiment Name: At_100uM_ABA_Mutants_cDNA_P Parameter: Plant Line Value: Columbia
  misc_feature: MA Experiment 20000117 PARAMETER Experiment Name: At_100uM_ABA_Mutants_cDNA_P Parameter: Timepoint (hr) Value: 6
  misc_feature: MA Experiment 20000117 PARAMETER Experiment Name: At_100uM_ABA_Mutants_cDNA_P Parameter: Tissue Value: Aerial
  misc_feature: MA Experiment 20000117 PARAMETER Experiment Name: At_100uM_ABA_Mutants_cDNA_P Parameter: Treatment Value: 100uM ABA vs. No Treatment
  misc_feature: MA Experiment ID: 20000169 Result: Up-regulated in Transcription
  misc_feature: MA Experiment 20000169 PARAMETER Experiment Name: At_100uM_ABA_P Parameter: Age (day) Value: 14
  misc_feature: MA Experiment 20000169 PARAMETER Experiment Name: At_100uM_ABA_P Parameter: Organism Value: A. thaliana
  misc_feature: MA Experiment 20000169 PARAMETER Experiment Name: At_100uM_ABA_P Parameter: Plant Line Value: WS
  misc_feature: MA Experiment 20000169 PARAMETER Experiment Name: At_100uM_ABA_P Parameter: Timepoint (hr) Value: 6
  misc_feature: MA Experiment 20000169 PARAMETER Experiment Name: At_100uM_ABA_P Parameter: Tissue Value: Aerial
  misc_feature: MA Experiment 20000169 PARAMETER Experiment Name: At_100uM_ABA_P Parameter: Treatment Value: 100uM ABA vs. No Treatment
  misc_feature: MA Experiment ID: 20000180 Result: Up-regulated in Transcription
  misc_feature: MA Experiment 20000180 PARAMETER Experiment Name: At_Germinating_Seeds_P Parameter: Age (hr) Value: 24 vs. 0
  misc_feature: MA Experiment 20000180 PARAMETER Experiment Name: At_Germinating_Seeds_P Parameter: Tissue Value: Germinating Seeds
  misc_feature: MA Experiment ID: 20000182 Result: Up-regulated in Transcription
  misc_feature: MA Experiment 20000182 PARAMETER Experiment Name: At_2mM_SA_P Parameter: Age (day) Value: 14
  misc_feature: MA Experiment 20000182 PARAMETER Experiment Name: At_2mM_SA_P Parameter: Organism Value: A. thaliana
  misc_feature: MA Experiment 20000182 PARAMETER Experiment Name: At_2mM_SA_P Parameter: Plant Line Value: WS
  misc_feature: MA Experiment 20000182 PARAMETER Experiment Name: At_2mM_SA_P Parameter: Timepoint (hr) Value: 6
  misc_feature: MA Experiment 20000182 PARAMETER Experiment Name: At_2mM_SA_P Parameter: Tissue Value: Aerial
  misc_feature: MA Experiment 20000182 PARAMETER Experiment Name: At_2mM_SA_P Parameter: Treatment Value: 2mM SA vs. No Treatment
  misc_feature: MA Experiment ID: 20000185 Result: Up-regulated in Transcription
  misc_feature: MA Experiment 20000185 PARAMETER Experiment Name: At_Roots__P Parameter: Age (day) Value: 7 vs. 21
  misc_feature: MA Experiment 20000185 PARAMETER Experiment Name: At_Roots__P Parameter: Organism Value: A. thaliana
  misc_feature: MA Experiment 20000185 PARAMETER Experiment Name: At_Roots__P Parameter: Tissue Value: Roots vs. Whole Plant
  misc_feature: MA Experiment ID: 20000437 Result: Up-regulated in Transcription
  misc_feature: MA Experiment 20000437 PARAMETER Experiment Name: At_Drought_P Parameter: Age (day) Value: 8
  misc_feature: MA Experiment 20000437 PARAMETER Experiment Name: At_Drought_P Parameter: Organism Value: A. thaliana
  misc_feature: MA Experiment 20000437 PARAMETER Experiment Name: At_Drought_P Parameter: Plant Line Value: WS
  misc_feature: MA Experiment 20000437 PARAMETER Experiment Name: At_Drought_P Parameter: Timepoint (hr) Value: 24
  misc_feature: MA Experiment 20000437 PARAMETER Experiment Name: At_Drought_P Parameter: Tissue Value: Whole Plant
  misc_feature: MA Experiment 20000437 PARAMETER Experiment Name: At_Drought_P Parameter: Treatment Value: Drought vs. No Drought
  misc_feature: MA Experiment ID: 20000439 Result: Up-regulated in Transcription
  misc_feature: MA Experiment 20000439 PARAMETER Experiment Name: At_Roots__P Parameter: Age (day) Value: 14 vs. 21
  misc_feature: MA Experiment 20000439 PARAMETER Experiment Name: At_Roots__P Parameter: Organism Value: A. thaliana
  misc_feature: MA Experiment 20000439 PARAMETER Experiment Name: At_Roots__P Parameter: Tissue Value: Roots vs. Whole Plant
  misc_feature: MA Experiment ID: 20000794 Result: Up-regulated in Transcription
  misc_feature: MA Experiment 20000794 PARAMETER Experiment Name: At_Petals_P Parameter: Age (day) Value: 23-25 days
  misc_feature: MA Experiment 20000794 PARAMETER Experiment Name: At_Petals_P Parameter: Plant Line Value: WS
  misc_feature: MA Experiment 20000794 PARAMETER Experiment Name: At_Petals_P Parameter: Tissue Value: Petals vs. Whole plant
  misc_feature: MA Experiment ID: 20001905 Result: Up-regulated in Transcription
  misc_feature: MA Experiment 20001905 PARAMETER Experiment Name: At_Drought_Reproduction_P Parameter: Age (day) Value: 40
  misc_feature: MA Experiment 20001905 PARAMETER Experiment Name: At_Drought_Reproduction_P Parameter: Organism Value: A. thaliana
  misc_feature: MA Experiment 20001905 PARAMETER Experiment Name: At_Drought_Reproduction_P Parameter: Plant Line Value: WS
  misc_feature: MA Experiment 20001905 PARAMETER Experiment Name: At_Drought_Reproduction_P Parameter: Timepoint (day) Value: 10
  misc_feature: MA Experiment 20001905 PARAMETER Experiment Name: At_Drought_Reproduction_P Parameter: Tissue Value: Rosettes
  misc_feature: MA Experiment 20001905 PARAMETER Experiment Name: At_Drought_Reproduction_P Parameter: Treatment Value: Drought vs. No Drought
cccacgcgtccgcagaaagagaccaacgacactgcaaatggcggatgaatctccaaagtctatctacgacttcaccgtcaaggatatcggaggtaacgatgtgagtttggaccaatacaaaggcaaaactcttttggttgtaaacgttgcttccaaatgtggtctgacggatgcgaactacaaggaactgaatgttctgtacgagaaatacaaggagcaagggttggagatattagcattcccgtgtaatcagttcttaggacaagaaccaggaaacaatgaagagattcaacaaactgtctgcaccaggttcaaagctgaattccccatctttgacaaggtggatgtgaacggtaagaacacggcaccattatacaagtacttgaaagcagagaaaggaggtttgctcattgatgctatcaaatggaacttcaccaaattcttggtttctcctgatggcaaggtcttacagagatattctcccagaacctctcctcttcaattcgagaaggacattcaaactgcgttgggacaggcctcttcttaatcaccagaagaagaagtttcaagaactttcgtttggtccaaattatgatcttagaatcatcaacattgcaaacttattttcttggaattctatcattcttgttttaaataattgatgtattggacgtcttttcatgggaggatatataatatatt

SEQ ID NO: 76385 - protein, 181 aa, Arabidopsis thaliana
  peptide (1)..(181): Ceres Seq. ID no. 7107798
  misc_feature (20)..(129): Pfam Name: Glutathione peroxidase Pfam Description: Glutathione peroxidase
  misc_feature (13)..(181): Homolog of NCBI NO: 15225103 NR Description: glutathione peroxidase, putative; protein id: supported by cDNA: 25550., supported by cDNA: gi_14994272, by cDNA: gi_16648819, supported by cDNA: gi_1946689, supported by
  misc_feature (13)..(179): Homolog of NCBI NO: 31872080 NR Description: phospholipid hydroperoxide glutathione peroxidase
  misc_feature (13)..(179): Homolog of NCBI NO: 17646156 NR Description: phospholipid hydroperoxide glutathione peroxidase
  misc_feature (13)..(173): Homolog of NCBI NO: 21068666 NR Description: putative phospholipid hydroperoxide glutathione
  misc_feature (19)..(176): Homolog of NCBI NO: 22329066 NR Description: glutathione peroxidase, putative; protein id:
  misc_feature (14)..(179): Homolog of NCBI NO: 21360380 NR Description: glutathione peroxidase 1 [Oryza sativa]
  misc_feature (12)..(177): Homolog of NCBI NO: 20138384 NR Description: Probable phospholipid hydroperoxide glutathione (PHGPx) >gi|8919668|emb|CAB96145.1| phospholipid hydroperoxide
  misc_feature (13)..(179): Homolog of NCBI NO: 232190 NR Description: Probable phospholipid hydroperoxide glutathione (PHGPx) (6P229) >gi|100291|pir||S20501 probable glutathione
  misc_feature (13)..(179): Homolog of NCBI NO: 20138338 NR Description: Probable phospholipid hydroperoxide glutathione
  misc_feature (13)..(179): Homolog of NCBI NO: 485512 NR Description: glutathione peroxidase (EC 1.11.1.9) - sweet
PRVRRKRPTTLQMADESPKSIYDFTVKDIGGNDVSLDQYKGKTLLVVNVASKCGLTDANYKELNVLYEKYKEQGLEILAFPCNQFLGQEPGNNEEIQQTVCTRFKAEFPIFDKVDVNGKNTAPLYKYLKAEKGGLLIDAIKWNFTKFLVSPDGKVLQRYSPRTSPLQFEKDIQTALGQASS

SEQ ID NO: 76386 - protein, 169 aa, Arabidopsis thaliana; identical to SEQ ID NO: 35932
  peptide (1)..(169): Ceres Seq. ID no. 7107799
  misc_feature (8)..(117): Pfam Name: Glutathione peroxidase Pfam Description: Glutathione peroxidase
  misc_feature (1)..(169): Homolog of NCBI NO: 15225103 NR Description: glutathione peroxidase, putative; protein id: supported by cDNA: 25550., supported by cDNA: gi_14994272, by cDNA: gi_16648819, supported by cDNA: gi_1946689, supported by
  misc_feature (1)..(167): Homolog of NCBI NO: 31872080 NR Description: phospholipid hydroperoxide glutathione peroxidase
  misc_feature (1)..(167): Homolog of NCBI NO: 17646156 NR Description: phospholipid hydroperoxide glutathione peroxidase
  misc_feature (1)..(161): Homolog of NCBI NO: 21068666 NR Description: putative phospholipid hydroperoxide glutathione
  misc_feature (7)..(164): Homolog of NCBI NO: 22329066 NR Description: glutathione peroxidase, putative; protein id:
  misc_feature (2)..(167): Homolog of NCBI NO: 21360380 NR Description: glutathione peroxidase 1 [Oryza sativa]
  misc_feature (1)..(165): Homolog of NCBI NO: 20138384 NR Description: Probable phospholipid hydroperoxide glutathione (PHGPx) >gi|8919668|emb|CAB96145.1| phospholipid hydroperoxide
  misc_feature (1)..(167): Homolog of NCBI NO: 232190 NR Description: Probable phospholipid hydroperoxide glutathione (PHGPx) (6P229) >gi|100291|pir||S20501 probable glutathione
  misc_feature (1)..(167): Homolog of NCBI NO: 20138338 NR Description: Probable phospholipid hydroperoxide glutathione
  misc_feature (1)..(167): Homolog of NCBI NO: 485512 NR Description: glutathione peroxidase (EC 1.11.1.9) - sweet

SEQ ID NO: 76387 - DNA, 1331 bp, Arabidopsis thaliana
  misc_feature (1)..(1331): Ceres Seq. ID no. 7107808
  misc_feature: MA Experiment ID: 108435 Result: Up-regulated in Transcription
  misc_feature: MA Experiment 108435 PARAMETER Experiment Name: At_stm_Mutants_cDNA_P Parameter: Plant Line Value: wt Landsburg vs stm
  misc_feature: MA Experiment 108435 PARAMETER Experiment Name: At_stm_Mutants_cDNA_P Parameter: Tissue Value: Shoot Apical Meristem Region
  misc_feature: MA Experiment ID: 108462 Result: Down-regulated in Transcription
  misc_feature: MA Experiment 108462 PARAMETER Experiment Name: At_Germinating_Seeds_cDNA_P Parameter: Age (day) Value: 2 vs. 0
  misc_feature: MA Experiment 108462 PARAMETER Experiment Name: At_Germinating_Seeds_cDNA_P Parameter: Tissue Value: Germinating Seeds
  misc_feature: MA Experiment ID: 108463 Result: Down-regulated in Transcription
  misc_feature: MA Experiment 108463 PARAMETER Experiment Name: At_Germinating_Seeds_cDNA_P Parameter: Age (day) Value: 3 vs. 0
  misc_feature: MA Experiment 108463 PARAMETER Experiment Name: At_Germinating_Seeds_cDNA_P Parameter: Tissue Value: Germinating Seeds
  misc_feature: MA Experiment ID: 108464 Result: Down-regulated in Transcription
  misc_feature: MA Experiment 108464 PARAMETER Experiment Name: At_Germinating_Seeds_cDNA_P Parameter: Age (day) Value: 4 vs. 0
  misc_feature: MA Experiment 108464 PARAMETER Experiment Name: At_Germinating_Seeds_cDNA_P Parameter: Tissue Value: Germinating Seeds
  misc_feature: MA Experiment ID: 108595 Result: Down-regulated in Transcription
  misc_feature: MA Experiment 108595 PARAMETER Experiment Name: At_Ler-pi_Ovule_cDNA_P Parameter: Plant Line Value: null
  misc_feature: MA Experiment ID: 20000068 Result: Up-regulated in Transcription
  misc_feature: MA Experiment ID: 20000069 Result: Down-regulated in Transcription
  misc_feature: MA Experiment 20000069 PARAMETER Experiment Name: At_100uM_ABA_Mutants_cDNA_P Parameter: Plant Line Value: CS23
  misc_feature: MA Experiment 20000069 PARAMETER Experiment Name: At_100uM_ABA_Mutants_cDNA_P Parameter: Timepoint (hr) Value: 6
  misc_feature: MA Experiment 20000069 PARAMETER Experiment Name: At_100uM_ABA_Mutants_cDNA_P Parameter: Tissue Value: Aerial
  misc_feature: MA Experiment 20000069 PARAMETER Experiment Name: At_100uM_ABA_Mutants_cDNA_P Parameter: Treatment Value: 100uM ABA vs. No Treatment
  misc_feature: MA Experiment ID: 20000070 Result: Down-regulated in Transcription
  misc_feature: MA Experiment 20000070 PARAMETER Experiment Name: At_100uM_ABA_Mutants_cDNA_P Parameter: Plant Line Value: CS24
  misc_feature: MA Experiment 20000070 PARAMETER Experiment Name: At_100uM_ABA_Mutants_cDNA_P Parameter: Timepoint (hr) Value: 6
  misc_feature: MA Experiment 20000070 PARAMETER Experiment Name: At_100uM_ABA_Mutants_cDNA_P Parameter: Tissue Value: Aerial
  misc_feature: MA Experiment 20000070 PARAMETER Experiment Name: At_100uM_ABA_Mutants_cDNA_P Parameter: Treatment Value: 100uM ABA vs. No Treatment
  misc_feature: MA Experiment ID: 20000071 Result: Down-regulated in Transcription
  misc_feature: MA Experiment 20000071 PARAMETER Experiment Name: At_100uM_ABA_Mutants_cDNA_P Parameter: Plant Line Value: CS8104
  misc_feature: MA Experiment 20000071 PARAMETER Experiment Name: At_100uM_ABA_Mutants_cDNA_P Parameter: Timepoint (hr) Value: 6
  misc_feature: MA Experiment 20000071 PARAMETER Experiment Name: At_100uM_ABA_Mutants_cDNA_P Parameter: Tissue Value: Aerial
  misc_feature: MA Experiment 20000071 PARAMETER Experiment Name: At_100uM_ABA_Mutants_cDNA_P Parameter: Treatment Value: 100uM ABA vs. No Treatment
  misc_feature: MA Experiment ID: 20000089 Result: Down-regulated in Transcription
  misc_feature: MA Experiment ID: 20000090 Result: Down-regulated in Transcription
  misc_feature: MA Experiment ID: 20000113 Result: Up-regulated in Transcription
  misc_feature: MA Experiment 20000113 PARAMETER Experiment Name: At_42deg_Heat_cDNA_P Parameter: Temperature (deg C) Value: 42 vs. 22
  misc_feature: MA Experiment 20000113 PARAMETER Experiment Name: At_42deg_Heat_cDNA_P Parameter: Timepoint (hr) Value: 8
  misc_feature: MA Experiment 20000113 PARAMETER Experiment Name: At_42deg_Heat_cDNA_P Parameter: Tissue Value: Aerial
  misc_feature: MA Experiment ID: 20000185 Result: Down-regulated in Transcription
  misc_feature: MA Experiment 20000185 PARAMETER Experiment Name: At_Roots__P Parameter: Age (day) Value: 7 vs. 21
  misc_feature: MA Experiment 20000185 PARAMETER Experiment Name: At_Roots__P Parameter: Organism Value: A. thaliana
  misc_feature: MA Experiment 20000185 PARAMETER Experiment Name: At_Roots__P Parameter: Tissue Value: Roots vs. Whole Plant
  misc_feature: MA Experiment ID: 20000265 Result: Up-regulated in Transcription
  misc_feature: MA Experiment 20000265 PARAMETER Experiment Name: At_Open_Flower_P Parameter: Age (day) Value: 21
  misc_feature: MA Experiment 20000265 PARAMETER Experiment Name: At_Open_Flower_P Parameter: Plant Line Value: WS
  misc_feature: MA Experiment 20000265 PARAMETER Experiment Name: At_Open_Flower_P Parameter: Tissue Value: Closed Flower vs. Whole Plant
  misc_feature: MA Experiment ID: 20000286 Result: Up-regulated in Transcription
  misc_feature: MA Experiment 20000286 PARAMETER Experiment Name: At_Open_Flower_P Parameter: Age (day) Value: 21
  misc_feature: MA Experiment 20000286 PARAMETER Experiment Name: At_Open_Flower_P Parameter: Plant Line Value: WS
  misc_feature: MA Experiment 20000286 PARAMETER Experiment Name: At_Open_Flower_P Parameter: Tissue Value: Half Open vs. Whole Plant
  misc_feature: MA Experiment ID: 20000439 Result: Down-regulated in Transcription
  misc_feature: MA Experiment 20000439 PARAMETER Experiment Name: At_Roots__P Parameter: Age (day) Value: 14 vs. 21
  misc_feature: MA Experiment 20000439 PARAMETER Experiment Name: At_Roots__P Parameter: Organism Value: A. thaliana
  misc_feature: MA Experiment 20000439 PARAMETER Experiment Name: At_Roots__P Parameter: Tissue Value: Roots vs. Whole Plant
  misc_feature: MA Experiment ID: 20000495 Result: Down-regulated in Transcription
  misc_feature: MA Experiment 20000495 PARAMETER Experiment Name: At_Guard_Cells_P Parameter: Harvest Date Value: 8/2/2002
  misc_feature: MA Experiment 20000495 PARAMETER Experiment Name: At_Guard_Cells_P Parameter: Organism Value: A. thaliana
  misc_feature: MA Experiment 20000495 PARAMETER Experiment Name: At_Guard_Cells_P Parameter: Tissue Value: Guard Cells vs. Leaves
  misc_feature: MA Experiment ID: 20000573 Result: Down-regulated in Transcription
  misc_feature: MA Experiment 20000573 PARAMETER Experiment Name: At_100uM_ABA_Mutants__P Parameter: Organism Value: A. thaliana
  misc_feature: MA Experiment 20000573 PARAMETER Experiment Name: At_100uM_ABA_Mutants__P Parameter: Plant Line Value: CS22 vs. Ler wt
  misc_feature: MA Experiment 20000573 PARAMETER Experiment Name: At_100uM_ABA_Mutants__P Parameter: Timepoint (hr) Value: N/A
  misc_feature: MA Experiment 20000573 PARAMETER Experiment Name: At_100uM_ABA_Mutants__P Parameter: Tissue Value: Whole Plant
  misc_feature: MA Experiment 20000573 PARAMETER Experiment Name: At_100uM_ABA_Mutants__P Parameter: Treatment Value: None
  misc_feature: MA Experiment ID: 20000574 Result: Down-regulated in Transcription
  misc_feature: MA Experiment 20000574 PARAMETER Experiment Name: At_100uM_ABA_Mutants__P Parameter: Organism Value: A. thaliana
  misc_feature: MA Experiment 20000574 PARAMETER Experiment Name: At_100uM_ABA_Mutants__P Parameter: Plant Line Value: CS23 vs. Ler wt
  misc_feature: MA Experiment 20000574 PARAMETER Experiment Name: At_100uM_ABA_Mutants__P Parameter: Timepoint (hr) Value: N/A
  misc_feature: MA Experiment 20000574 PARAMETER Experiment Name: At_100uM_ABA_Mutants__P Parameter: Tissue Value: Whole Plant
  misc_feature: MA Experiment 20000574 PARAMETER Experiment Name: At_100uM_ABA_Mutants__P Parameter: Treatment Value: None
  misc_feature: MA Experiment ID: 20001248 Result: Down-regulated in Transcription
  misc_feature: MA Experiment 20001248 PARAMETER Experiment Name: At_Far-red-induction_P Parameter: Age (day) Value: 7
  misc_feature: MA Experiment 20001248 PARAMETER Experiment Name: At_Far-red-induction_P Parameter: Light Value: Far-red vs. White
  misc_feature: MA Experiment 20001248 PARAMETER Experiment Name: At_Far-red-induction_P Parameter: Organism Value: A. thaliana
  misc_feature: MA Experiment 20001248 PARAMETER Experiment Name: At_Far-red-induction_P Parameter: Plant Line Value: Columbia
  misc_feature: MA Experiment 20001248 PARAMETER Experiment Name: At_Far-red-induction_P Parameter: Timepoint (hr) Value: 4
  misc_feature: MA Experiment 20001248 PARAMETER Experiment Name: At_Far-red-induction_P Parameter: Tissue Value: Whole Plant
  misc_feature: MA Experiment ID: 20001557 Result: Down-regulated in Transcription
  misc_feature: MA Experiment 20001557 PARAMETER Experiment Name: At_Drought_Soil_Dry_P Parameter: Age (day) Value: 27
  misc_feature: MA Experiment 20001557 PARAMETER Experiment Name: At_Drought_Soil_Dry_P Parameter: Organism Value: A. thaliana
  misc_feature: MA Experiment 20001557 PARAMETER Experiment Name: At_Drought_Soil_Dry_P Parameter: Plant Line Value: WS
  misc_feature: MA Experiment 20001557 PARAMETER Experiment Name: At_Drought_Soil_Dry_P Parameter: Post Timepoint (hr) Value: 3
  misc_feature: MA Experiment 20001557 PARAMETER Experiment Name: At_Drought_Soil_Dry_P Parameter: Post-Treatment Value: Re-Water vs. No Drought
  misc_feature: MA Experiment 20001557 PARAMETER Experiment Name: At_Drought_Soil_Dry_P Parameter: Timepoint (day) Value: 13
  misc_feature: MA Experiment 20001557 PARAMETER Experiment Name: At_Drought_Soil_Dry_P Parameter: Treatment Value: Drought vs. No Drought
  misc_feature: MA Experiment ID: 20001558 Result: Down-regulated in Transcription
  misc_feature: MA Experiment 20001558 PARAMETER Experiment Name: At_Drought_Soil_Dry_P Parameter: Age (day) Value: 27
  misc_feature: MA Experiment 20001558 PARAMETER Experiment Name: At_Drought_Soil_Dry_P Parameter: Organism Value: A. thaliana
  misc_feature: MA Experiment 20001558 PARAMETER Experiment Name: At_Drought_Soil_Dry_P Parameter: Plant Line Value: WS
  misc_feature: MA Experiment 20001558 PARAMETER Experiment Name: At_Drought_Soil_Dry_P Parameter: Post Timepoint (hr) Value: 6
  misc_feature: MA Experiment 20001558 PARAMETER Experiment Name: At_Drought_Soil_Dry_P Parameter: Post-Treatment Value: Re-Water vs. No Drought
  misc_feature: MA Experiment 20001558 PARAMETER Experiment Name: At_Drought_Soil_Dry_P Parameter: Timepoint (day) Value: 13
  misc_feature: MA Experiment 20001558 PARAMETER Experiment Name: At_Drought_Soil_Dry_P Parameter: Treatment Value: Drought vs. No Drought
  misc_feature: MA Experiment ID: 20001560 Result: Down-regulated in Transcription
  misc_feature: MA Experiment 20001560 PARAMETER Experiment Name: At_Drought_Soil_Dry_P Parameter: Age (day) Value: 28
  misc_feature: MA Experiment 20001560 PARAMETER Experiment Name: At_Drought_Soil_Dry_P Parameter: Organism Value: A. thaliana
  misc_feature: MA Experiment 20001560 PARAMETER Experiment Name: At_Drought_Soil_Dry_P Parameter: Plant Line Value: WS
  misc_feature: MA Experiment 20001560 PARAMETER Experiment Name: At_Drought_Soil_Dry_P Parameter: Post Timepoint (hr) Value: None
  misc_feature: MA Experiment 20001560 PARAMETER Experiment Name: At_Drought_Soil_Dry_P Parameter: Post-Treatment Value: None
  misc_feature: MA Experiment 20001560 PARAMETER Experiment Name: At_Drought_Soil_Dry_P Parameter: Timepoint (day) Value: 14
  misc_feature: MA Experiment 20001560 PARAMETER Experiment Name: At_Drought_Soil_Dry_P Parameter: Treatment Value: Drought vs. No Drought
  misc_feature: Pfam Name: CMAS Pfam Description: Cyclopropane-fatty-acyl-phospholipid synthase
ccacgcgtccgcaaataatccctgacttcgtcacgtttctttgtatctccaacgtccaataaatgaaagcaactctagcagcaccctcttctctcacaagcctcccttatcgaaccaactcttctttcggctcaaagtcatcgcttctctttcggtctccatcctcctcctcctcagtctctatgacgacaacgcgtggaaacgtggctgtggcggctgctgctacatccactgaggcgctaagaaaaggaatagcggagttctacaatgaaacttcgggtttgtgggaagagatttggggagatcatatgcatcatggcttttatgaccctgattcttctgttcaactttctgattctggtcacaaggaagctcagatccgtatgattgaagagtctctccgtttcgccggtgttactgatgaagaggaggagaaaaagataaagaaagtagtggatgttgggtgtgggattggaggaagctcaagatatcttgcctctaaatttggagctgaatgcattggcattactctcagccctgttcaggccaagagagccaatgatctcgcggctgctcaatcactctctcataaggcttccttccaagttgcggatgcgttggatcagccattcgaagatggaaaattcgatctagtgtggtcgatggagagtggtgagcatatgcctgacaaggccaagtttgtaaaagagttggtacgtgtggcggctccaggaggtaggataataatagtgacatggtgccatagaaatctatctgcgggggaggaagctttgcagccgtgggagcaaaacatcttggacaaaatctgtaagacgttctatctcccggcttggtgctccaccgatgattatgtcaacttgcttcaatcccattctctccaggatattaagtgtgcggattggtcagagaacgtagctcctttctggcctgcggttatacggactgcattaacatggaagggccttgtgtctctgcttcgtagtggtatgaaaagtattaaaggagcattgacaatgccattgatgattgaaggttacaagaaaggtgtcattaagtttggtatcatcacttgccagaagccactctaagtctaaagctatactaggagattcaataagactataagagtagtgtctcatgtgaaagcatgaaattccttaaaaacgtcaatgttaagcctatgcttcgttatttgttttagataagtatcatttcactcttgtctaaggtagtttctataaacaataaataccatgaattagctcatgttatctggtaaattctcggaagtgattgtcatggattaactc

SEQ ID NO: 76388 - protein, 348 aa, Arabidopsis thaliana
  peptide (1)..(348): Ceres Seq. ID no. 7107809
  misc_feature: Pfam Name: CMAS Pfam Description: Cyclopropane-fatty-acyl-phospholipid synthase
  misc_feature (1)..(348): Homolog of NCBI NO: 24211769 NR Description: Tocopherol O-methyltransferase, chloroplast
  misc_feature (1)..(348): Homolog of NCBI NO: 15217804 NR Description: gamma-tocopherol methyltransferase; protein id: supported by cDNA: 32143., supported by cDNA: gi_15146233,
  misc_feature (1)..(348): Homolog of NCBI NO: 21592747 NR Description: gamma-tocopherol methyltransferase [Arabidopsis
  misc_feature (1)..(348): Homolog of NCBI NO: 27448218 NR Description: gamma-tocopherol methyltransferase [Brassica
  misc_feature (7)..(347): Homolog of NCBI NO: 17224292 NR Description: gamma-tocopherol methyltransferase [Perilla
  misc_feature (48)..(347): Homolog of NCBI NO: 22208517 NR Description: putative gamma-tocopherol methyltransferase
  misc_feature (57)..(348): Homolog of NCBI NO: 23039419 NR Description: hypothetical protein [Trichodesmium erythraeum
  misc_feature (60)..(346): Homolog of NCBI NO: 23128517 NR Description: hypothetical protein [Nostoc punctiforme]
  misc_feature (60)..(346): Homolog of NCBI NO: 17229295 NR Description: gamma-tocopherol methyltransferase [Nostoc sp.
  misc_feature (48)..(348): Homolog of NCBI NO: 16331764 NR Description: delta(24)-sterol C-methyltransferase
MKATLAAPSSLTSLPYRTNSSFGSKSSLLFRSPSSSSSVSMTTTRGNVAVAAAATSTEALRKGIAEFYNETSGLWEEIWGDHMHHGFYDPDSSVQLSDSGHKEAQIRMIEESLRFAGVTDEEEEKKIKKVVDVGCGIGGSSRYLASKFGAECIGITLSPVQAKRANDLAAAQSLSHKASFQVADALDQPFEDGKFDLVWSMESGEHMPDKAKFVKELVRVAAPGGRIIIVTWCHRNLSAGEEALQPWEQNILDKICKTFYLPAWCSTDDYVNLLQSHSLQDIKCADWSENVAPFWPAVIRTALTWKGLVSLLRSGMKSIKGALTMPLMIEGYKKGVIKFGIITCQKPL

SEQ ID NO: 76389 - protein, 308 aa, Arabidopsis thaliana
  peptide (1)..(308): Ceres Seq. ID no. 7107810
  misc_feature: Pfam Name: CMAS Pfam Description: Cyclopropane-fatty-acyl-phospholipid synthase
  misc_feature (1)..(308): Homolog of NCBI NO: 24211769 NR Description: Tocopherol O-methyltransferase, chloroplast
  misc_feature (1)..(308): Homolog of NCBI NO: 15217804 NR Description: gamma-tocopherol methyltransferase; protein id: supported by cDNA: 32143., supported by cDNA: gi_15146233,
  misc_feature (1)..(308): Homolog of NCBI NO: 21592747 NR Description: gamma-tocopherol methyltransferase [Arabidopsis
  misc_feature (1)..(308): Homolog of NCBI NO: 27448218 NR Description: gamma-tocopherol methyltransferase [Brassica
  misc_feature (1)..(307): Homolog of NCBI NO: 17224292 NR Description: gamma-tocopherol methyltransferase [Perilla
  misc_feature (8)..(307): Homolog of NCBI NO: 22208517 NR Description: putative gamma-tocopherol methyltransferase
  misc_feature (17)..(308): Homolog of NCBI NO: 23039419 NR Description: hypothetical protein [Trichodesmium erythraeum
  misc_feature (20)..(306): Homolog of NCBI NO: 23128517 NR Description: hypothetical protein [Nostoc punctiforme]
  misc_feature (20)..(306): Homolog of NCBI NO: 17229295 NR Description: gamma-tocopherol methyltransferase [Nostoc sp.
  misc_feature (8)..(308): Homolog of NCBI NO: 16331764 NR Description: delta(24)-sterol C-methyltransferase
MTTTRGNVAVAAAATSTEALRKGIAEFYNETSGLWEEIWGDHMHHGFYDPDSSVQLSDSGHKEAQIRMIEESLRFAGVTDEEEEKKIKKVVDVGCGIGGSSRYLASKFGAECIGITLSPVQAKRANDLAAAQSLSHKASFQVADALDQPFEDGKFDLVWSMESGEHMPDKAKFVKELVRVAAPGGRIIIVTWCHRNLSAGEEALQPWEQNILDKICKTFYLPAWCSTDDYVNLLQSHSLQDIKCADWSENVAPFWPAVIRTALTWKGLVSLLRSGMKSIKGALTMPLMIEGYKKGVIKFGIITCQKPL

SEQ ID NO: 76390 - protein, 266 aa, Arabidopsis thaliana
  peptide (1)..(266): Ceres Seq. ID no. 7107811
  misc_feature: Pfam Name: CMAS Pfam Description: Cyclopropane-fatty-acyl-phospholipid synthase
  misc_feature (1)..(266): Homolog of NCBI NO: 24211769 NR Description: Tocopherol O-methyltransferase, chloroplast
  misc_feature (1)..(266): Homolog of NCBI NO: 15217804 NR Description: gamma-tocopherol methyltransferase; protein id: supported by cDNA: 32143., supported by cDNA: gi_15146233,
  misc_feature (1)..(266): Homolog of NCBI NO: 21592747 NR Description: gamma-tocopherol methyltransferase [Arabidopsis
  misc_feature (1)..(266): Homolog of NCBI NO: 27448218 NR Description: gamma-tocopherol methyltransferase [Brassica
  misc_feature (1)..(265): Homolog of NCBI NO: 17224292 NR Description: gamma-tocopherol methyltransferase [Perilla
  misc_feature (1)..(265): Homolog of NCBI NO: 22208517 NR Description: putative gamma-tocopherol methyltransferase
  misc_feature (1)..(266): Homolog of NCBI NO: 23039419 NR Description: hypothetical protein [Trichodesmium erythraeum
  misc_feature (1)..(264): Homolog of NCBI NO: 23128517 NR Description: hypothetical protein [Nostoc punctiforme]
  misc_feature (1)..(264): Homolog of NCBI NO: 17229295 NR Description: gamma-tocopherol methyltransferase [Nostoc sp.
  misc_feature (1)..(266): Homolog of NCBI NO: 16331764 NR Description: delta(24)-sterol C-methyltransferase
MHHGFYDPDSSVQLSDSGHKEAQIRMIEESLRFAGVTDEEEEKKIKKVVDVGCGIGGSSRYLASKFGAECIGITLSPVQAKRANDLAAAQSLSHKASFQVADALDQPFEDGKFDLVWSMESGEHMPDKAKFVKELVRVAAPGGRIIIVTWCHRNLSAGEEALQPWEQNILDKICKTFYLPAWCSTDDYVNLLQSHSLQDIKCADWSENVAPFWPAVIRTALTWKGLVSLLRSGMKSIKGALTMPLMIEGYKKGVIKFGIITCQKPL

SEQ ID NO: 76391 - DNA, 1079 bp, Arabidopsis thaliana
  misc_feature (1)..(1079): Ceres Seq. ID no. 7107822
  misc_feature: Pfam Name: Synaptobrevin Pfam Description: Synaptobrevin
gggtcgacccacgcgtccgggtaaagaaaaaatggcgcaacaatcgttgatctacagtttcgtagctcgcggcacggtgatcctcgttgagttcactgatttcaaaggtaatttcacctcaatcgctgctcagtgcctccagaagcttccgtcttcgaacaacaagttcacctacaactgcgacggtcataccttcaattaccttgtcgaagatggattcacctattgtgttgttgcggttgattctgctgggaggcaaattcccatgtcctttttggaaagagtaaaagaagattttaacaagcgatatggtggtggaaaggctgcaactgctcaagcaaacagcttgaataaggagtttggctctaaactgaaagagcatatgcagtattgcatggatcatcctgatgagattagcaagcttgctaaggtgaaggcgcaagtgtcagaagttaagggtgtaatgatggaaaacattgagaaggttcttgaccgtggtgagaaaattgagcttttggtggacaaaaccgaaaatcttcgctcacaggcacaagatttcagaacaacaggaacgcagatgagaagaaagatgtggcttcagaacatgaagataaaactcatagtgctcgccatcattatcgcactgattctcatcatcgtgctctcagtttgccatgggtttaagtgttaagcccagaaaattcaaaacttctgagatctttctcactcggtacatcgtagtgccttctcttttattgttcgatcttcaatctaatgtttctgcttgaattggttttgtatagatagacatatatgtatgctactcatttgctatattgcttgcatctgatgacattgatcccttgcgaaccagtcagtacttgacaagagatccgaaactattaaatgattttgttgactgaagattgcattgtggtggtgatgataaaaatttgagattgtattgacgattatacggcgtgatgtgtgttggttactttaaatttagataagagtagtgccctctctatatcgttactagggatggtagtacatatatatacgtacgtcatattccg

SEQ ID NO: 76392 - protein, 229 aa, Arabidopsis thaliana
  peptide (1)..(229): Ceres Seq. ID no. 7107823
  misc_feature: Pfam Name: Synaptobrevin Pfam Description: Synaptobrevin
  misc_feature (11)..(229): Homolog of NCBI NO: 15220943 NR Description: synaptobrevin 7B, putative; protein id:
  misc_feature (11)..(229): Homolog of NCBI NO: 15225796 NR Description: putative synaptobrevin; protein id: At2g33120.1, by cDNA: 2443., supported by cDNA: gi_16930420, supported by
  misc_feature (11)..(229): Homolog of NCBI NO: 600710 NR Description: formerly called HAT24; synaptobrevin-related
  misc_feature (11)..(229): Homolog of NCBI NO: 27805753 NR Description: Vesicle-associated membrane protein 725
  misc_feature (11)..(229): Homolog of NCBI NO: 30685375 NR Description: synaptobrevin -related [Arabidopsis thaliana] putative synaptobrevin [Arabidopsis thaliana]
  misc_feature (11)..(229): Homolog of NCBI NO: 15220315 NR Description: synaptobrevin 7B, putative; protein id:
  misc_feature (11)..(229): Homolog of NCBI NO: 29150380 NR Description: synaptobrevin-like protein [Oryza sativa
  misc_feature (11)..(229): Homolog of NCBI NO: 27805765 NR Description: Putative vesicle-associated membrane protein 726
  misc_feature (11)..(204): Homolog of NCBI NO: 33347409 NR Description: synptobrevin-related protein [Pyrus pyrifolia]
  misc_feature (11)..(229): Homolog of NCBI NO: 30685571 NR Description: synaptobrevin -related [Arabidopsis thaliana]
GRPTRPGKEKMAQQSLIYSFVARGTVILVEFTDFKGNFTSIAAQCLQKLPSSNNKFTYNCDGHTFNYLVEDGFTYCVVAVDSAGRQIPMSFLERVKEDFNKRYGGGKAATAQANSLNKEFGSKLKEHMQYCMDHPDEISKLAKVKAQVSEVKGVMMENIEKVLDRGEKIELLVDKTENLRSQAQDFRTTGTQMRRKMWLQNMKIKLIVLAIIIALILIIVLSVCHGFKC

SEQ ID NO: 76393 - protein, 219 aa, Arabidopsis thaliana; identical to SEQ ID NO: 23487
  peptide (1)..(219): Ceres Seq. ID no. 7107824
  misc_feature: Pfam Name: Synaptobrevin Pfam Description: Synaptobrevin
  misc_feature (1)..(219): Homolog of NCBI NO: 15220943 NR Description: synaptobrevin 7B, putative; protein id:
  misc_feature (1)..(219): Homolog of NCBI NO: 15225796 NR Description: putative synaptobrevin; protein id: At2g33120.1, by cDNA: 2443., supported by cDNA: gi_16930420, supported by
  misc_feature (1)..(219): Homolog of NCBI NO: 600710 NR Description: formerly called HAT24; synaptobrevin-related
  misc_feature (1)..(219): Homolog of NCBI NO: 27805753 NR Description: Vesicle-associated membrane protein 725
  misc_feature (1)..(219): Homolog of NCBI NO: 30685375 NR Description: synaptobrevin -related [Arabidopsis thaliana] putative synaptobrevin [Arabidopsis thaliana]
  misc_feature (1)..(219): Homolog of NCBI NO: 15220315 NR Description: synaptobrevin 7B, putative; protein id:
  misc_feature (1)..(219): Homolog of NCBI NO: 29150380 NR Description: synaptobrevin-like protein [Oryza sativa
  misc_feature (1)..(219): Homolog of NCBI NO: 27805765 NR Description: Putative vesicle-associated membrane protein 726
  misc_feature (1)..(194): Homolog of NCBI NO: 33347409 NR Description: synptobrevin-related protein [Pyrus pyrifolia]
  misc_feature (1)..(219): Homolog of NCBI NO: 30685571 NR Description: synaptobrevin -related [Arabidopsis thaliana]

SEQ ID NO: 76394 - protein, 141 aa, Arabidopsis thaliana; identical to SEQ ID NO: 23488
  peptide (1)..(141): Ceres Seq. ID no. 7107825
  misc_feature: Pfam Name: Synaptobrevin Pfam Description: Synaptobrevin
  misc_feature (1)..(141): Homolog of NCBI NO: 15220943 NR Description: synaptobrevin 7B, putative; protein id:
  misc_feature (1)..(141): Homolog of NCBI NO: 15225796 NR Description: putative synaptobrevin; protein id: At2g33120.1, by cDNA: 2443., supported by cDNA: gi_16930420, supported by
  misc_feature (1)..(141): Homolog of NCBI NO: 600710 NR Description: formerly called HAT24; synaptobrevin-related
  misc_feature (1)..(141): Homolog of NCBI NO: 27805753 NR Description: Vesicle-associated membrane protein 725
  misc_feature (1)..(141): Homolog of NCBI NO: 30685375 NR Description: synaptobrevin -related [Arabidopsis thaliana] putative synaptobrevin [Arabidopsis thaliana]
  misc_feature (1)..(141): Homolog of NCBI NO: 15220315 NR Description: synaptobrevin 7B, putative; protein id:
  misc_feature (1)..(141): Homolog of NCBI NO: 29150380 NR Description: synaptobrevin-like protein [Oryza sativa
  misc_feature (1)..(141): Homolog of NCBI NO: 27805765 NR Description: Putative vesicle-associated membrane protein 726
  misc_feature (1)..(116): Homolog of NCBI NO: 33347409 NR Description: synptobrevin-related protein [Pyrus pyrifolia]
  misc_feature (1)..(141): Homolog of NCBI NO: 30685571 NR Description: synaptobrevin -related [Arabidopsis thaliana]

SEQ ID NO: 76395 - DNA, 1863 bp, Arabidopsis thaliana
  misc_feature (1)..(1863): Ceres Seq. ID no. 7107826
  misc_feature: MA Experiment ID: 20000307 Result: Up-regulated in Transcription
  misc_feature: MA Experiment 20000307 PARAMETER Experiment Name: At_Germinating_Seeds_Sub_P Parameter: Age (hr) Value: 24 vs. 0
  misc_feature: MA Experiment 20000307 PARAMETER Experiment Name: At_Germinating_Seeds_Sub_P Parameter: Organism Value: A. thaliana
  misc_feature: MA Experiment 20000307 PARAMETER Experiment Name: At_Germinating_Seeds_Sub_P Parameter: Plant Line Value: WS
  misc_feature: MA Experiment 20000307 PARAMETER Experiment Name: At_Germinating_Seeds_Sub_P Parameter: Tissue Value: Germinating Seeds
cgcccattttcacagatcaacgataaaccaaatcaaagcagctcctgggaacggttcgattcgagcagagagagagggagagagggagagagggagagagagttatggtttatgagtctctctgtgaacatggggacgaatgatctcgacatcgaagaagggactctggagatcggcatggagtatagaactgtttctggtgttgctggaccattggtcattcttgacaaagtgaagggtccaaagtaccaggagattgttaatattcgcttaggagatggatcaacgagacgtggtcaggttttggaagttgatggcgagaaagcagttgtgcaggtttttgaaggaacatctggaattgacaacaagtttacaaccgtgcaattcacaggagaggttttgaaaacacctgtatcattggacatgcttgggcgcatatttaacggttcaggaaagccgattgataatggccctcctattctgccagaagcataccttgatatttcaggaagttcaatcaaccccagtgaaagaacctatcctgaagagatgatacagacaggcatatcgaccatcgatgtcatgaattccattgctcgtggacagaagattccacttttctctgctgctggtcttccacataatgaaatagctgctcagatttgtcgtcaggctggtctagtcaagcgtttggaaaagactgttgatctacttgaggatcatggagaggacaattttgcaattgtgtttgcagctatgggtgtgaacatggagacagctcagttcttcaagcgagattttgaagaaaatggatcaatggagagagttactcttttcctgaacctggccaatgacccaaccattgagagaatcatcactcctcgaattgccctcacaacagctgaatatctggcttatgaatgtgggaaacacgtccttgtgatattgacggatatgagttcttatgctgatgctcttcgtgaggtttccgctgcccgagaagaggttcccggaagacgtggatatccaggttatatgtacactgatcttgcaactatttatgaacgtgctgggcgtatagaaggaagaaaaggttccatcacccaaattccaatcctcactatgcccaatgacgatatcactcatccaactccggatcttactggttacattactgaaggtcagatatatatcgataggcaacttcacaacagacagatatatccacccatcaacgtgcttccatccctttctcgtttaatgaagagtgctatcggcgagggcatgactcgtaaagaccattctgatgtgtcgaaccagctgtatgcaaattatgcaatcgggaaagatgttcaagcgatgaaagctgttgttggagaagaagcactttcttcagaggatttgctttatctagagtttttggataagtttgagaggaagtttgtgatgcaaggagcttatgatacacgcaacatcttccagtcgctggacttagcttggacattgctccgtatcttcccacgggagcttcttcatcgtatccctgcaaagacacttgaccaattctacagccgcgactcaaccagttaaaatgaggtaatggaggttatcttatcgaaactcttttgagagaaaagtgtgaatttttgtgatgtgtattatttggtgcttattataaagaggaaaaacaaagaaaagctatatattctgtgtctccctatctggtgatattttttttggttctgcattgtgttccaaagtggaaataaaaatcgataaacgatgtcgtattgtagtactttccttttctttgtatgaatttgttaagattggtttataaatgggattataataagtatcttt

SEQ ID NO: 76396 - protein, 529 aa, Arabidopsis thaliana
  peptide (1)..(529): Ceres Seq. ID no. 7107827
  misc_feature (245)..(424): Pfam Name: ATP synthase alpha/beta family, Pfam Description: ATP synthase alpha/beta family,
  misc_feature (38)..(529): Homolog of NCBI NO: 81637 NR Description: H+-exporting ATPase (EC 3.6.3.6) 57K chain -
  misc_feature (44)..(529): Homolog of NCBI NO: 15222929 NR Description: vacuolar ATP synthase subunit B; protein id: supported by cDNA: gi_166626, supported by cDNA: gi_20453109 thaliana] >gi|27735259|sp|P11574|VATB_ARATH Vacuolar
  misc_feature (283)..(529): Homolog of NCBI NO: 25290419 NR Description: protein T4O12.24 [imported] - Arabidopsis >gi|6721109|gb|AAF26763.1|AC007396_12 T4O12.24 [Arabidopsis
  misc_feature (44)..(284): Homolog of NCBI NO: 25290419 NR Description: protein T4O12.24 [imported] - Arabidopsis >gi|6721109|gb|AAF26763.1|AC007396_12 T4O12.24 [Arabidopsis
  misc_feature (44)..(529): Homolog of NCBI NO: 17065080 NR Description: Unknown protein [Arabidopsis thaliana]
  misc_feature (44)..(529): Homolog of NCBI NO: 15233891 NR Description: probable H+-transporting ATPase; protein id: supported by cDNA: gi_14517367, supported by cDNA: gi_15010615,
  misc_feature (42)..(527): Homolog of NCBI NO: 2493129 NR Description: Vacuolar ATP synthase subunit B isoform 1 B subunit 1) (Vacuolar proton pump B subunit 1)
  misc_feature (50)..(528): Homolog of NCBI NO: 2493132 NR Description: Vacuolar ATP synthase subunit B isoform 2 B subunit 2) (Vacuolar proton pump B subunit 2)
  misc_feature (44)..(529): Homolog of NCBI NO: 26986106 NR Description: vacuolar ATPase subunit B [Mesembryanthemum
  misc_feature (42)..(529): Homolog of NCBI NO: 11266665 NR Description: H+-transporting two-sector ATPase (EC 3.6.3.14)
RPFSQINDKPNQSSSWERFDSSRERGREGERERELWFMSLSVNMGTNDLDIEEGTLEIGMEYRTVSGVAGPLVILDKVKGPKYQEIVNIRLGDGSTRRGQVLEVDGEKAVVQVFEGTSGIDNKFTTVQFTGEVLKTPVSLDMLGRIFNGSGKPIDNGPPILPEAYLDISGSSINPSERTYPEEMIQTGISTIDVMNSIARGQKIPLFSAAGLPHNEIAAQICRQAGLVKRLEKTVDLLEDHGEDNFAIVFAAMGVNMETAQFFKRDFEENGSMERVTLFLNLANDPTIERIITPRIALTTAEYLAYECGKHVLVILTDMSSYADALREVSAAREEVPGRRGYPGYMYTDLATIYERAGRIEGRKGSITQIPILTMPNDDITHPTPDLTGYITEGQIYIDRQLHNRQIYPPINVLPSLSRLMKSAIGEGMTRKDHSDVSNQLYANYAIGKDVQAMKAVVGEEALSSEDLLYLEFLDKFERKFVMQGAYDTRNIFQSLDLAWTLLRIFPRELLHRIPAKTLDQFYSRDSTS

SEQ ID NO: 76397 - protein, 492 aa, Arabidopsis thaliana
  peptide (1)..(492): Ceres Seq. ID no. 7107828
  misc_feature (208)..(387): Pfam Name: ATP synthase alpha/beta family, Pfam Description: ATP synthase alpha/beta family,
  misc_feature (1)..(492): Homolog of NCBI NO: 81637 NR Description: H+-exporting ATPase (EC 3.6.3.6) 57K chain -
  misc_feature (7)..(492): Homolog of NCBI NO: 15222929 NR Description: vacuolar ATP synthase subunit B; protein id: supported by cDNA: gi_166626, supported by cDNA: gi_20453109 thaliana] >gi|27735259|sp|P11574|VATB_ARATH Vacuolar
  misc_feature (246)..(492): Homolog of NCBI NO: 25290419 NR Description: protein T4O12.24 [imported] - Arabidopsis >gi|6721109|gb|AAF26763.1|AC007396_12 T4O12.24 [Arabidopsis
  misc_feature (7)..(247): Homolog of NCBI NO: 25290419 NR Description: protein T4O12.24 [imported] - Arabidopsis >gi|6721109|gb|AAF26763.1|AC007396_12 T4O12.24 [Arabidopsis
  misc_feature (7)..(492): Homolog of NCBI NO: 17065080 NR Description: Unknown protein [Arabidopsis thaliana]
  misc_feature (7)..(492): Homolog of NCBI NO: 15233891 NR Description: probable H+-transporting ATPase; protein id: supported by cDNA: gi_14517367, supported by cDNA: gi_15010615,
  misc_feature (5)..(490): Homolog of NCBI NO: 2493129 NR Description: Vacuolar ATP synthase subunit B isoform 1 B subunit 1) (Vacuolar proton pump B subunit 1)
  misc_feature (13)..(491): Homolog of NCBI NO: 2493132 NR Description: Vacuolar ATP synthase subunit B isoform 2 B subunit 2) (Vacuolar proton pump B subunit 2)
  misc_feature (7)..(492): Homolog of NCBI NO: 26986106 NR Description: vacuolar ATPase subunit B [Mesembryanthemum
  misc_feature (5)..(492): Homolog of NCBI NO: 11266665 NR Description: H+-transporting two-sector ATPase (EC 3.6.3.14)
MSLSVNMGTNDLDIEEGTLEIGMEYRTVSGVAGPLVILDKVKGPKYQEIVNIRLGDGSTRRGQVLEVDGEKAVVQVFEGTSGIDNKFTTVQFTGEVLKTPVSLDMLGRIFNGSGKPIDNGPPILPEAYLDISGSSINPSERTYPEEMIQTGISTIDVMNSIARGQKIPLFSAAGLPHNEIAAQICRQAGLVKRLEKTVDLLEDHGEDNFAIVFAAMGVNMETAQFFKRDFEENGSMERVTLFLNLANDPTIERIITPRIALTTAEYLAYECGKHVLVILTDMSSYADALREVSAAREEVPGRRGYPGYMYTDLATIYERAGRIEGRKGSITQIPILTMPNDDITHPTPDLTGYITEGQIYIDRQLHNRQIYPPINVLPSLSRLMKSAIGEGMTRKDHSDVSNQLYANYAIGKDVQAMKAVVGEEALSSEDLLYLEFLDKFERKFVMQGAYDTRNIFQSLDLAWTLLRIFPRELLHRIPAKTLDQFYSRDSTS

SEQ ID NO: 76398 - protein, 486 aa, Arabidopsis thaliana; identical to SEQ ID NO: 46000
  peptide (1)..(486): Ceres Seq. ID no. 7107829
  misc_feature (202)..(381): Pfam Name: ATP synthase alpha/beta family, Pfam Description: ATP synthase alpha/beta family,
  misc_feature (1)..(486): Homolog of NCBI NO: 81637 NR Description: H+-exporting ATPase (EC 3.6.3.6) 57K chain -
  misc_feature (1)..(486): Homolog of NCBI NO: 15222929 NR Description: vacuolar ATP synthase subunit B; protein id: supported by cDNA: gi_166626, supported by cDNA: gi_20453109 thaliana] >gi|27735259|sp|P11574|VATB_ARATH Vacuolar
  misc_feature (240)..(486): Homolog of NCBI NO: 25290419 NR Description: protein T4O12.24 [imported] - Arabidopsis >gi|6721109|gb|AAF26763.1|AC007396_12 T4O12.24 [Arabidopsis
  misc_feature (1)..(241): Homolog of NCBI NO: 25290419 NR Description: protein T4O12.24 [imported] - Arabidopsis >gi|6721109|gb|AAF26763.1|AC007396_12 T4O12.24 [Arabidopsis
  misc_feature (1)..(486): Homolog of NCBI NO: 17065080 NR Description: Unknown protein [Arabidopsis thaliana]
  misc_feature (1)..(486): Homolog of NCBI NO: 15233891 NR Description: probable H+-transporting ATPase; protein id: supported by cDNA: gi_14517367, supported by cDNA: gi_15010615,
  misc_feature (1)..(484): Homolog of NCBI NO: 2493129 NR Description: Vacuolar ATP synthase subunit B isoform 1 B subunit 1) (Vacuolar proton pump B subunit 1)
  misc_feature (7)..(485): Homolog of NCBI NO: 2493132 NR Description: Vacuolar ATP synthase subunit B isoform 2 B subunit 2) (Vacuolar proton pump B subunit 2)
  misc_feature (1)..(486): Homolog of NCBI NO: 26986106 NR Description: vacuolar ATPase subunit B [Mesembryanthemum
  misc_feature (1)..(486): Homolog of NCBI NO: 11266665 NR Description: H+-transporting two-sector ATPase (EC 3.6.3.14)

SEQ ID NO: 76399 - DNA, 1382 bp, Arabidopsis thaliana
  misc_feature (1)..(1382): Ceres Seq. ID no. 7107850
  misc_feature: MA Experiment ID: 108434 Result: Up-regulated in Transcription
  misc_feature: MA Experiment 108434 PARAMETER Experiment Name: At_Root_Tips_cDNA_P Parameter: Tissue Value: Root Tips
  misc_feature: MA Experiment ID: 108461 Result: Up-regulated in Transcription
  misc_feature: MA Experiment 108461 PARAMETER Experiment Name: At_Germinating_Seeds_cDNA_P Parameter: Age (day) Value: 1 vs. 0
  misc_feature: MA Experiment 108461 PARAMETER Experiment Name: At_Germinating_Seeds_cDNA_P Parameter: Tissue Value: Germinating Seeds
  misc_feature: MA Experiment ID: 108462 Result: Up-regulated in Transcription
  misc_feature: MA Experiment 108462 PARAMETER Experiment Name: At_Germinating_Seeds_cDNA_P Parameter: Age (day) Value: 2 vs. 0
  misc_feature: MA Experiment 108462 PARAMETER Experiment Name: At_Germinating_Seeds_cDNA_P Parameter: Tissue Value: Germinating Seeds
  misc_feature: MA Experiment ID: 108573 Result: Up-regulated in Transcription
  misc_feature: MA Experiment 108573 PARAMETER Experiment Name: At_Drought_cDNA_P Parameter: Timepoint (hr) Value: 6
  misc_feature: MA Experiment 108573 PARAMETER Experiment Name: At_Drought_cDNA_P Parameter: Tissue Value: Aerial
  misc_feature: MA Experiment 108573 PARAMETER Experiment Name: At_Drought_cDNA_P Parameter: Treatment Value: Drought vs. No Drought
  misc_feature: MA Experiment ID: 108574 Result: Up-regulated in Transcription
  misc_feature: MA Experiment 108574 PARAMETER Experiment Name: At_Wounding__cDNA_P Parameter: Timepoint (hr) Value: 1
  misc_feature: MA Experiment 108574 PARAMETER Experiment Name: At_Wounding__cDNA_P Parameter: Tissue Value: Aerial
  misc_feature: MA Experiment 108574 PARAMETER Experiment Name: At_Wounding__cDNA_P Parameter: Treatment Value: Wounding vs. No Wounding
  misc_feature: MA Experiment ID: 108579 Result: Up-regulated in Transcription
  misc_feature: MA Experiment 108579 PARAMETER Experiment Name: At_4deg_Cold_cDNA_P Parameter: Temperature (deg C) Value: 4 vs. 22
  misc_feature: MA Experiment 108579 PARAMETER Experiment Name: At_4deg_Cold_cDNA_P Parameter: Timepoint (hr) Value: 6
  misc_feature: MA Experiment 108579 PARAMETER Experiment Name: At_4deg_Cold_cDNA_P Parameter: Tissue Value: Aerial
  misc_feature: MA Experiment ID: 108585 Result: Up-regulated in Transcription
  misc_feature: MA Experiment 108585 PARAMETER Experiment Name: At_5mM_NaNP_cDNA_P Parameter: Timepoint (hr) Value: 6
  misc_feature: MA Experiment 108585 PARAMETER Experiment Name: At_5mM_NaNP_cDNA_P Parameter: Tissue Value: Aerial
  misc_feature: MA Experiment 108585 PARAMETER Experiment Name: At_5mM_NaNP_cDNA_P Parameter: Treatment Value: null
  misc_feature: MA Experiment ID: 20000179 Result: Up-regulated in Transcription
  misc_feature: MA Experiment 20000179 PARAMETER Experiment Name: At_Germinating_Seeds_P Parameter: Age (hr) Value: 6 vs. 0
  misc_feature: MA Experiment 20000179 PARAMETER Experiment Name: At_Germinating_Seeds_P Parameter: Tissue Value: Germinating Seeds
  misc_feature: MA Experiment ID: 20000180 Result: Up-regulated in Transcription
  misc_feature: MA Experiment 20000180 PARAMETER Experiment Name: At_Germinating_Seeds_P Parameter: Age (hr) Value: 24 vs. 0
  misc_feature: MA Experiment 20000180 PARAMETER Experiment Name: At_Germinating_Seeds_P Parameter: Tissue Value: Germinating Seeds
  misc_feature: MA Experiment ID: 20000213 Result: Up-regulated in Transcription
  misc_feature: MA Experiment 20000213 PARAMETER Experiment Name: At_4deg_Cold_P Parameter: Timepoint (hr) Value: 2
  misc_feature: MA Experiment ID: 20000794 Result: Down-regulated in Transcription
  misc_feature: MA Experiment 20000794 PARAMETER Experiment Name: At_Petals_P Parameter: Age (day) Value: 23-25 days
  misc_feature: MA Experiment 20000794 PARAMETER Experiment Name: At_Petals_P Parameter: Plant Line Value: WS
  misc_feature: MA Experiment 20000794 PARAMETER Experiment Name: At_Petals_P Parameter: Tissue Value: Petals vs. Whole plant
  misc_feature: MA Experiment ID: 20001451 Result: Down-regulated in Transcription
  misc_feature: MA Experiment 20001451 PARAMETER Experiment Name: At_Far-red-induction_P Parameter: Age (day) Value: 7
  misc_feature: MA Experiment 20001451 PARAMETER Experiment Name: At_Far-red-induction_P Parameter: Light Value: Far-red vs. White
  misc_feature: MA Experiment 20001451 PARAMETER Experiment Name: At_Far-red-induction_P Parameter: Organism Value: A. thaliana
  misc_feature: MA Experiment 20001451 PARAMETER Experiment Name: At_Far-red-induction_P Parameter: Plant Line Value: Columbia
  misc_feature: MA Experiment 20001451 PARAMETER Experiment Name: At_Far-red-induction_P Parameter: Timepoint (hr) Value: 24
  misc_feature: MA Experiment 20001451 PARAMETER Experiment Name: At_Far-red-induction_P Parameter: Tissue Value: Whole Plant
  misc_feature: MA Experiment ID: 20001557 Result: Up-regulated in Transcription
  misc_feature: MA Experiment 20001557 PARAMETER Experiment Name: At_Drought_Soil_Dry_P Parameter: Age (day) Value: 27
  misc_feature: MA Experiment 20001557 PARAMETER Experiment Name: At_Drought_Soil_Dry_P Parameter: Organism Value: A. thaliana
  misc_feature: MA Experiment 20001557 PARAMETER Experiment Name: At_Drought_Soil_Dry_P Parameter: Plant Line Value: WS
  misc_feature: MA Experiment 20001557 PARAMETER Experiment Name: At_Drought_Soil_Dry_P Parameter: Post Timepoint (hr) Value: 3
  misc_feature: MA Experiment 20001557 PARAMETER Experiment Name: At_Drought_Soil_Dry_P Parameter: Post-Treatment Value: Re-Water vs. No Drought
  misc_feature: MA Experiment 20001557 PARAMETER Experiment Name: At_Drought_Soil_Dry_P Parameter: Timepoint (day) Value: 13
  misc_feature: MA Experiment 20001557 PARAMETER Experiment Name: At_Drought_Soil_Dry_P Parameter: Treatment Value: Drought vs. No Drought
  misc_feature: MA Experiment ID: 20001905 Result: Up-regulated in Transcription
  misc_feature: MA Experiment 20001905 PARAMETER Experiment Name: At_Drought_Reproduction_P Parameter: Age (day) Value: 40
  misc_feature: MA Experiment 20001905 PARAMETER Experiment Name: At_Drought_Reproduction_P Parameter: Organism Value: A. thaliana
  misc_feature: MA Experiment 20001905 PARAMETER Experiment Name: At_Drought_Reproduction_P Parameter: Plant Line Value: WS
  misc_feature: MA Experiment 20001905 PARAMETER Experiment Name: At_Drought_Reproduction_P Parameter: Timepoint (day) Value: 10
  misc_feature: MA Experiment 20001905 PARAMETER Experiment Name: At_Drought_Reproduction_P Parameter: Tissue Value: Rosettes
  misc_feature: MA Experiment 20001905 PARAMETER Experiment Name: At_Drought_Reproduction_P Parameter: Treatment Value: Drought vs. No Drought
gacccacgcgtccggtaaaccatggttgagccggcgaatactgttggtcttccggtgaacccgactccgttgctgaaagatgagctcgatatcgtgattccgactatcagaaacctcgatttcctcgagatgtggaggccttttcttcagccttaccatctgatcatcgtccaggacggagatccatcgaagaagatccatgtccctgaaggttacgactacgagctctacaacaggaacgacattaaccgaatcctcggacctaaggcttcttgtatctcgtttaaggattctgcttgtcgatgctttgggtacatggtgtctaagaagaagtatatcttcaccattgatgacgattgcttcgttgccaaggatccatcaggcaaagcagtgaacgctcttgagcaacacatcaagaaccttctctgcccatcgtctccctttttcttcaacaccttgtatgatccttaccgtgaaggtgctgatttcgtccgtggataccctttcagtctccgtgaaggtgtttccactgctgtttcccatggtctttggctcaacatccctgactacgatgccccgacccaactcgtgaagcctaaggagaggaacaccaggtatgtggatgctgtcatgaccaacccaaagggaacacttttcccaatgtgtggtatgaacttggcttttgaccgtgatttgattggcccggctatgtactttgttctcatgggtgatggtcagcctattggtcgttacgacgatatgtgggctggttggtgcatcaaggtgatctgtgaccacttgagcttgggagtgaagaccggtttaccgtatatctaccacagcaaagcgagcaacccttttgttaacctgaagaaggaatacaagggaatcttctggcaggaggagatcattccgttcttccagaacgcaaagctatcgaaagaagcagtaactgttcagcaatgctacattgagctctcaaagatggtcaaggagaagttgagctccttagacccgtactttgacaagcttgcagatgccatggttacatggattgaagcttgggatgagcttaacccaccagcagccagtggcaaaagcttgagagcagtatgagccaaaaagaaaaagccaccaaagttttggttatttttagctcaaattatcgttacttttaaatttctgattttacgaacctttcttgctttttttacacatttgagtagttttcatcatcagtactttctcattgtccggttatggtttttgcatttggtttaaatatcaccggtttatttataaacagtggtggattagtagtactattttctgagtttttttctttgtttcattaataaaaaggccttttcataggtgtttgc

SEQ ID NO: 76400 - protein, 364 aa, Arabidopsis thaliana
  peptide (1)..(364): Ceres Seq. ID no. 7107851
  misc_feature (13)..(356): Pfam Name: Reversibly glycosylated polypeptide Pfam Description: Reversibly glycosylated polypeptide
  misc_feature (1)..(364): Homolog of NCBI NO: 2317731 NR Description: reversibly glycosylated polypeptide-2
  misc_feature (1)..(360): Homolog of NCBI NO: 15242351 NR Description: reversibly glycosylated polypeptide-3; protein At5g15650.1, supported by cDNA: 35863., supported by cDNA: supported by cDNA: gi_2317730 [Arabidopsis thaliana]
  misc_feature (1)..(360): Homolog of NCBI NO: 21593071 NR Description: reversibly glycosylated polypeptide-3
  misc_feature (1)..(354): Homolog of NCBI NO: 15232865 NR Description: reversibly glycosylated polypeptide-1; protein
  misc_feature (1)..(354): Homolog of NCBI NO: 2317729 NR Description: reversibly glycosylated polypeptide-1
  misc_feature (5)..(363): Homolog of NCBI NO: 4158221 NR Description: reversibly glycosylated polypeptide [Oryza sativa
  misc_feature (5)..(363): Homolog of NCBI NO: 34915190 NR Description: reversibly glycosylated polypeptide [Oryza sativa
  misc_feature (5)..(353): Homolog of NCBI NO: 4158232 NR Description: reversibly glycosylated polypeptide [Triticum
  misc_feature (15)..(364): Homolog of NCBI NO: 34394574 NR Description: putative reversibly glycosylated polypeptide
  misc_feature (12)..(363): Homolog of NCBI NO: 30680679 NR Description: reversibly glycosylatable polypeptide -related
MVEPANTVGLPVNPTPLLKDELDIVIPTIRNLDFLEMWRPFLQPYHLIIVQDGDPSKKIHVPEGYDYELYNRNDINRILGPKASCISFKDSACRCFGYMVSKKKYIFTIDDDCFVAKDPSGKAVNALEQHIKNLLCPSSPFFFNTLYDPYREGADFVRGYPFSLREGVSTAVSHGLWLNIPDYDAPTQLVKPKERNTRYVDAVMTNPKGTLFPMCGMNLAFDRDLIGPAMYFVLMGDGQPIGRYDDMWAGWCIKVICDHLSLGVKTGLPYIYHSKASNPFVNLKKEYKGIFWQEEIIPFFQNAKLSKEAVTVQQCYIELSKMVKEKLSSLDPYFDKLADAMVTWIEAWDELNPPAASGKSLRAV

SEQ ID NO: 76401 - protein, 328 aa, Arabidopsis thaliana
  peptide (1)..(328): Ceres Seq. ID no. 7107852
  misc_feature (1)..(320): Pfam Name: Reversibly glycosylated polypeptide Pfam Description: Reversibly glycosylated polypeptide
  misc_feature (1)..(328): Homolog of NCBI NO: 2317731 NR Description: reversibly glycosylated polypeptide-2
  misc_feature (1)..(324): Homolog of NCBI NO: 15242351 NR Description: reversibly glycosylated polypeptide-3; protein At5g15650.1, supported by cDNA: 35863., supported by cDNA: supported by cDNA: gi_2317730 [Arabidopsis thaliana]
  misc_feature (1)..(324): Homolog of NCBI NO: 21593071 NR Description: reversibly glycosylated polypeptide-3
  misc_feature (1)..(318): Homolog of NCBI NO: 15232865 NR Description: reversibly glycosylated polypeptide-1; protein
  misc_feature (1)..(318): Homolog of NCBI NO: 2317729 NR Description: reversibly glycosylated polypeptide-1
  misc_feature (1)..(327): Homolog of NCBI NO: 4158221 NR Description: reversibly glycosylated polypeptide [Oryza sativa
  misc_feature (1)..(327): Homolog of NCBI NO: 34915190 NR Description: reversibly glycosylated polypeptide [Oryza sativa
  misc_feature (1)..(317): Homolog of NCBI NO: 4158232 NR Description: reversibly glycosylated polypeptide [Triticum
  misc_feature (1)..(328): Homolog of NCBI NO: 34394574 NR Description: putative reversibly glycosylated polypeptide
  misc_feature (1)..(327): Homolog of NCBI NO: 30680679 NR Description: reversibly glycosylatable polypeptide -related
MWRPFLQPYHLIIVQDGDPSKKIHVPEGYDYELYNRNDINRILGPKASCISFKDSACRCFGYMVSKKKYIFTIDDDCFVAKDPSGKAVNALEQHIKNLLCPSSPFFFNTLYDPYREGADFVRGYPFSLREGVSTAVSHGLWLNIPDYDAPTQLVKPKERNTRYVDAVMTNPKGTLFPMCGMNLAFDRDLIGPAMYFVLMGDGQPIGRYDDMWAGWCIKVICDHLSLGVKTGLPYIYHSKASNPFVNLKKEYKGIFWQEEIIPFFQNAKLSKEAVTVQQCYIELSKMVKEKLSSLDPYFDKLADAMVTWIEAWDELNPPAASGKSLRAV

SEQ ID NO: 76402 - protein, 266 aa, Arabidopsis thaliana
  peptide (1)..(266): Ceres Seq. ID no. 7107853
  misc_feature (1)..(258): Pfam Name: Reversibly glycosylated polypeptide Pfam Description: Reversibly glycosylated polypeptide
  misc_feature (1)..(266): Homolog of NCBI NO: 2317731 NR Description: reversibly glycosylated polypeptide-2
  misc_feature (1)..(262): Homolog of NCBI NO: 15242351 NR Description: reversibly glycosylated polypeptide-3; protein At5g15650.1, supported by cDNA: 35863., supported by cDNA: supported by cDNA: gi_2317730 [Arabidopsis thaliana]
  misc_feature (1)..(262): Homolog of NCBI NO: 21593071 NR Description: reversibly glycosylated polypeptide-3
  misc_feature (1)..(256): Homolog of NCBI NO: 15232865 NR Description: reversibly glycosylated polypeptide-1; protein
  misc_feature (1)..(256): Homolog of NCBI NO: 2317729 NR Description: reversibly glycosylated polypeptide-1
  misc_feature (1)..(265): Homolog of NCBI NO: 4158221 NR Description: reversibly glycosylated polypeptide [Oryza sativa
  misc_feature (1)..(265): Homolog of NCBI NO: 34915190 NR Description: reversibly glycosylated polypeptide [Oryza sativa
  misc_feature (1)..(255): Homolog of NCBI NO: 4158232 NR Description: reversibly glycosylated polypeptide [Triticum
  misc_feature (1)..(266): Homolog of NCBI NO: 34394574 NR Description: putative reversibly glycosylated polypeptide
  misc_feature (1)..(265): Homolog of NCBI NO: 30680679 NR Description: reversibly glycosylatable polypeptide -related
MVSKKKYIFTIDDDCFVAKDPSGKAVNALEQHIKNLLCPSSPFFFNTLYDPYREGADFVRGYPFSLREGVSTAVSHGLWLNIPDYDAPTQLVKPKERNTRYVDAVMTNPKGTLFPMCGMNLAFDRDLIGPAMYFVLMGDGQPIGRYDDMWAGWCIKVICDHLSLGVKTGLPYIYHSKASNPFVNLKKEYKGIFWQEEIIPFFQNAKLSKEAVTVQQCYIELSKMVKEKLSSLDPYFDKLADAMVTWIEAWDELNPPAASGKSLRAV

SEQ ID NO: 76403 - DNA, 1375 bp, Arabidopsis thaliana
  misc_feature (1)..(1375): Ceres Seq. ID no. 7107862
  misc_feature: MA Experiment ID: 108461 Result: Up-regulated in Transcription
  misc_feature: MA Experiment 108461 PARAMETER Experiment Name: At_Germinating_Seeds_cDNA_P Parameter: Age (day) Value: 1 vs. 0
  misc_feature: MA Experiment 108461 PARAMETER Experiment Name: At_Germinating_Seeds_cDNA_P Parameter: Tissue Value: Germinating Seeds
  misc_feature: MA Experiment ID: 108569 Result: Up-regulated in Transcription
  misc_feature: MA Experiment 108569 PARAMETER Experiment Name: At_0.001%_MeJA__cDNA_P Parameter: Timepoint (hr) Value: 6
  misc_feature: MA Experiment 108569 PARAMETER Experiment Name: At_0.001%_MeJA__cDNA_P Parameter: Tissue Value: Aerial
  misc_feature: MA Experiment 108569 PARAMETER Experiment Name: At_0.001%_MeJA__cDNA_P Parameter: Treatment Value: 0.001% MeJA vs. No Treatment
  misc_feature: MA Experiment ID: 108585 Result: Up-regulated in Transcription
  misc_feature: MA Experiment 108585 PARAMETER Experiment Name: At_5mM_NaNP_cDNA_P Parameter: Timepoint (hr) Value: 6
  misc_feature: MA Experiment 108585 PARAMETER Experiment Name: At_5mM_NaNP_cDNA_P Parameter: Tissue Value: Aerial
  misc_feature: MA Experiment 108585 PARAMETER Experiment Name: At_5mM_NaNP_cDNA_P Parameter: Treatment Value: null
  misc_feature: MA Experiment ID: 20000180 Result: Up-regulated in Transcription
  misc_feature: MA Experiment 20000180 PARAMETER Experiment Name: At_Germinating_Seeds_P Parameter: Age (hr) Value: 24 vs. 0
  misc_feature: MA Experiment 20000180 PARAMETER Experiment Name: At_Germinating_Seeds_P Parameter: Tissue Value: Germinating Seeds
  misc_feature: MA Experiment ID: 20000184 Result: Up-regulated in Transcription
  misc_feature: MA Experiment 20000184 PARAMETER Experiment Name: At_Shoots__P Parameter: Age (day) Value: 7
  misc_feature: MA Experiment 20000184 PARAMETER Experiment Name: At_Shoots__P Parameter: Tissue Value: Shoots vs. Whole Plant
  misc_feature: MA Experiment ID: 20000185 Result: Up-regulated in Transcription
  misc_feature: MA Experiment 20000185 PARAMETER Experiment Name: At_Roots__P Parameter: Age (day) Value: 7 vs. 21
  misc_feature: MA Experiment 20000185 PARAMETER Experiment Name: At_Roots__P Parameter: Organism Value: A. thaliana
  misc_feature: MA Experiment 20000185 PARAMETER Experiment Name: At_Roots__P Parameter: Tissue Value: Roots vs. Whole Plant
  misc_feature: MA Experiment ID: 20000234 Result: Up-regulated in Transcription
  misc_feature: MA Experiment 20000234 PARAMETER Experiment Name: At_Siliques_P Parameter: Age (day) Value: 21
  misc_feature: MA Experiment 20000234 PARAMETER Experiment Name: At_Siliques_P Parameter: Organism Value: A. thaliana
  misc_feature: MA Experiment 20000234 PARAMETER Experiment Name: At_Siliques_P Parameter: Plant Line Value: WS
  misc_feature: MA Experiment 20000234 PARAMETER Experiment Name: At_Siliques_P Parameter: Tissue Value: Less Than 5mm Siliques vs. Whole Plant
  misc_feature: MA Experiment ID: 20000235 Result: Up-regulated in Transcription
  misc_feature: MA Experiment 20000235 PARAMETER Experiment Name: At_Siliques_P Parameter: Age (day) Value: 21
  misc_feature: MA Experiment 20000235 PARAMETER Experiment Name: At_Siliques_P Parameter: Organism Value: A. thaliana
  misc_feature: MA Experiment 20000235 PARAMETER Experiment Name: At_Siliques_P Parameter: Plant Line Value: WS
  misc_feature: MA Experiment 20000235 PARAMETER Experiment Name: At_Siliques_P Parameter: Tissue Value: 5-10mm Siliques vs. Whole Plant
  misc_feature: MA Experiment ID: 20000264 Result: Up-regulated in Transcription
  misc_feature: MA Experiment 20000264 PARAMETER Experiment Name: At_Open_Flower_P Parameter: Age (day) Value: 21
  misc_feature: MA Experiment 20000264 PARAMETER Experiment Name: At_Open_Flower_P Parameter: Plant Line Value: WS
  misc_feature: MA Experiment 20000264 PARAMETER Experiment Name: At_Open_Flower_P Parameter: Tissue Value: Open Flower vs. Whole Plant
  misc_feature: MA Experiment ID: 20000265 Result: Up-regulated in Transcription
  misc_feature: MA Experiment 20000265 PARAMETER Experiment Name: At_Open_Flower_P Parameter: Age (day) Value: 21
  misc_feature: MA Experiment 20000265 PARAMETER Experiment Name: At_Open_Flower_P Parameter: Plant Line Value: WS
  misc_feature: MA Experiment 20000265 PARAMETER Experiment Name: At_Open_Flower_P Parameter: Tissue Value: Closed Flower vs. Whole Plant
  misc_feature: MA Experiment ID: 20000286 Result: Up-regulated in Transcription
  misc_feature: MA Experiment 20000286 PARAMETER Experiment Name: At_Open_Flower_P Parameter: Age (day) Value: 21
  misc_feature: MA Experiment 20000286 PARAMETER Experiment Name: At_Open_Flower_P Parameter: Plant Line Value: WS
  misc_feature: MA Experiment 20000286 PARAMETER Experiment Name: At_Open_Flower_P Parameter: Tissue Value: Half Open vs. Whole Plant
  misc_feature: MA Experiment ID: 20000439 Result: Up-regulated in Transcription
  misc_feature: MA Experiment 20000439 PARAMETER Experiment Name: At_Roots__P Parameter: Age (day) Value: 14 vs. 21
  misc_feature: MA Experiment 20000439 PARAMETER Experiment Name: At_Roots__P Parameter: Organism Value: A. thaliana
  misc_feature: MA Experiment 20000439 PARAMETER Experiment Name: At_Roots__P Parameter: Tissue Value: Roots vs. Whole Plant
  misc_feature: MA Experiment ID: 20001451 Result: Down-regulated in Transcription
  misc_feature: MA Experiment 20001451 PARAMETER Experiment Name: At_Far-red-induction_P Parameter: Age (day) Value: 7
  misc_feature: MA Experiment 20001451 PARAMETER Experiment Name: At_Far-red-induction_P Parameter: Light Value: Far-red vs. White
  misc_feature: MA Experiment 20001451 PARAMETER Experiment Name: At_Far-red-induction_P Parameter: Organism Value: A. thaliana
  misc_feature: MA Experiment 20001451 PARAMETER Experiment Name: At_Far-red-induction_P Parameter: Plant Line Value: Columbia
  misc_feature: MA Experiment 20001451 PARAMETER Experiment Name: At_Far-red-induction_P Parameter: Timepoint (hr) Value: 24
  misc_feature: MA Experiment 20001451 PARAMETER Experiment Name: At_Far-red-induction_P Parameter: Tissue Value: Whole Plant
  misc_feature: MA Experiment ID: 20001557 Result: Up-regulated in Transcription
  misc_feature: MA Experiment 20001557 PARAMETER Experiment Name: At_Drought_Soil_Dry_P Parameter: Age (day) Value: 27
  misc_feature: MA Experiment 20001557 PARAMETER Experiment Name: At_Drought_Soil_Dry_P Parameter: Organism Value: A. thaliana
  misc_feature: MA Experiment 20001557 PARAMETER Experiment Name: At_Drought_Soil_Dry_P Parameter: Plant Line Value: WS
  misc_feature: MA Experiment 20001557 PARAMETER Experiment Name: At_Drought_Soil_Dry_P Parameter: Post Timepoint (hr) Value: 3
  misc_feature: MA Experiment 20001557 PARAMETER Experiment Name: At_Drought_Soil_Dry_P Parameter: Post-Treatment Value: Re-Water vs. No Drought
  misc_feature: MA Experiment 20001557 PARAMETER Experiment Name: At_Drought_Soil_Dry_P Parameter: Timepoint (day) Value: 13
  misc_feature: MA Experiment 20001557 PARAMETER Experiment Name: At_Drought_Soil_Dry_P Parameter: Treatment Value: Drought vs. No Drought
  misc_feature: MA Experiment ID: 20001558 Result: Up-regulated in Transcription
  misc_feature: MA Experiment 20001558 PARAMETER Experiment Name: At_Drought_Soil_Dry_P Parameter: Age (day) Value: 27
  misc_feature: MA Experiment 20001558 PARAMETER Experiment Name: At_Drought_Soil_Dry_P Parameter: Organism Value: A. thaliana
  misc_feature: MA Experiment 20001558 PARAMETER Experiment Name: At_Drought_Soil_Dry_P Parameter: Plant Line Value: WS
  misc_feature: MA Experiment 20001558 PARAMETER Experiment Name: At_Drought_Soil_Dry_P Parameter: Post Timepoint (hr) Value: 6
  misc_feature: MA Experiment 20001558 PARAMETER Experiment Name: At_Drought_Soil_Dry_P Parameter: Post-Treatment Value: Re-Water vs. No Drought
  misc_feature: MA Experiment 20001558 PARAMETER Experiment Name: At_Drought_Soil_Dry_P Parameter: Timepoint (day) Value: 13
  misc_feature: MA Experiment 20001558 PARAMETER Experiment Name: At_Drought_Soil_Dry_P Parameter: Treatment Value: Drought vs. No Drought
  misc_feature: MA Experiment ID: 20001560 Result: Up-regulated in Transcription
  misc_feature: MA Experiment 20001560 PARAMETER Experiment Name: At_Drought_Soil_Dry_P Parameter: Age (day) Value: 28
  misc_feature: MA Experiment 20001560 PARAMETER Experiment Name: At_Drought_Soil_Dry_P Parameter: Organism Value: A. thaliana
  misc_feature: MA Experiment 20001560 PARAMETER Experiment Name: At_Drought_Soil_Dry_P Parameter: Plant Line Value: WS
  misc_feature: MA Experiment 20001560 PARAMETER Experiment Name: At_Drought_Soil_Dry_P Parameter: Post Timepoint (hr) Value: None
  misc_feature: MA Experiment 20001560 PARAMETER Experiment Name: At_Drought_Soil_Dry_P Parameter: Post-Treatment Value: None
  misc_feature: MA Experiment 20001560 PARAMETER Experiment Name: At_Drought_Soil_Dry_P Parameter: Timepoint (day) Value: 14
  misc_feature: MA Experiment 20001560 PARAMETER Experiment Name: At_Drought_Soil_Dry_P Parameter: Treatment Value: Drought vs. No Drought
  misc_feature: MA Experiment ID: 20001905 Result: Up-regulated in Transcription
  misc_feature: MA Experiment 20001905 PARAMETER Experiment Name: At_Drought_Reproduction_P Parameter: Age (day) Value: 40
  misc_feature: MA Experiment 20001905 PARAMETER Experiment Name: At_Drought_Reproduction_P Parameter: Organism Value: A. thaliana
  misc_feature: MA Experiment 20001905 PARAMETER Experiment Name: At_Drought_Reproduction_P Parameter: Plant Line Value: WS
  misc_feature: MA Experiment 20001905 PARAMETER Experiment Name: At_Drought_Reproduction_P Parameter: Timepoint (day) Value: 10
  misc_feature: MA Experiment 20001905 PARAMETER Experiment Name: At_Drought_Reproduction_P Parameter: Tissue Value: Rosettes
  misc_feature: MA Experiment 20001905 PARAMETER Experiment Name: At_Drought_Reproduction_P Parameter: Treatment Value: Drought vs. No Drought
gacccacgcgtccgctcaaatctccacaatcttttctctccaaattctcttctctctgaatcaatccaatcatggttgagccggcgaacaccgttggaattccggtgaaccacatcccattgttgaaggatgagctcgatatcgtgatccccacgatccgtaacctcgatttcctggagatgtggaggcctttttttcagccttaccatctgattatcgtccaagatggagatccatcgaagaccattgctgtccctgaagggttcgattacgaactctacaacaggaacgacatcaaccgtatccttggtcctaaagcttcctgcatttccttcaaggactctgcttgtcgttgcttcggctacatggtctccaagaagaagtacatcttcactattgatgacgattgcttcgttgctaaggatccatctggaaaagctgtgaacgctcttgagcaacacatcaagaaccttctctgcccatcaactccatttttcttcaacaccttgtacgacccataccgtgaaggtgctgacttcgtccgtggataccctttcagtctccgtgagggtgtttccaccgctgtttcccacggtctgtggctcaacatccctgattacgatgcccctacccaacttgtgaagcctaaggaaaggaacacaaggtatgtggatgctgtcatgaccatcccaaaggggactcttttccctatgtgtggtatgaacttggcctatgaccgtgagctcattggtccggctatgtactttggtctcatgggtgatggtcagcctattggtcgctacgacgatatgtgggctggatggtgtatcaaggtgatctgtgaccatttgggattgggagtgaagacaggtttgccctacatttaccacagcaaagccagcaacccgtttgtgaacttgaagaaggagtacaagggaatcttctggcaggaggatatcattcctttcttccagagcccaaagctcacgaaagaagctgtgacagttcaacaatgctacatggagctgtccaagttggtgaaggagaagctaagccccattgatccttactttgacaagcttgcagatgctatggtcacttggattgaagcttgggatgagcttaacccacccactaaagcttgagcagcaaaaaaaccaccaccgcagttttggttattagctcaacatatcatctatcttctccgttttgtttttgttttgtcttttctcaaattttccggcgattcttcagttcgtttttaagttgccggagtttatttaaatagtgaatggtgtagttctatttatgaccgagacaatctctcttttgaggtttttcgtttttgtttcaataataaaaaatcatatccctt

SEQ ID NO: 76404 - protein, 357 aa, Arabidopsis thaliana
  peptide (1)..(357): Ceres Seq. ID no. 7107863
  misc_feature (13)..(356): Pfam Name: Reversibly glycosylated polypeptide Pfam Description: Reversibly glycosylated polypeptide
  misc_feature (1)..(357): Homolog of NCBI NO: 2317729 NR Description: reversibly glycosylated polypeptide-1
  misc_feature (1)..(357): Homolog of NCBI NO: 15232865 NR Description: reversibly glycosylated polypeptide-1; protein
  misc_feature (1)..(354): Homolog of NCBI NO: 15242351 NR Description: reversibly glycosylated polypeptide-3; protein At5g15650.1, supported by cDNA: 35863., supported by cDNA: supported by cDNA: gi_2317730 [Arabidopsis thaliana]
  misc_feature (1)..(354): Homolog of NCBI NO: 2317731 NR Description: reversibly glycosylated polypeptide-2
  misc_feature (1)..(354): Homolog of NCBI NO: 21593071 NR Description: reversibly glycosylated polypeptide-3
  misc_feature (9)..(357): Homolog of NCBI NO: 34582499 NR Description: Alpha-1,4-glucan-protein synthase [UDP-forming] 2
  misc_feature (5)..(357): Homolog of NCBI NO: 4158221 NR Description: reversibly glycosylated polypeptide [Oryza sativa
  misc_feature (5)..(357): Homolog of NCBI NO: 34915190 NR Description: reversibly glycosylated polypeptide [Oryza sativa
  misc_feature (5)..(357): Homolog of NCBI NO: 4158232 NR Description: reversibly glycosylated polypeptide [Triticum
  misc_feature (5)..(357): Homolog of NCBI NO: 34588146 NR Description: Alpha-1,4-glucan-protein synthase [UDP-forming] glucose:protein transglucosylase) (UPTG) (Amylogenin) (Golgi
MVEPANTVGIPVNHIPLLKDELDIVIPTIRNLDFLEMWRPFFQPYHLIIVQDGDPSKTIAVPEGFDYELYNRNDINRILGPKASCISFKDSACRCFGYMVSKKKYIFTIDDDCFVAKDPSGKAVNALEQHIKNLLCPSTPFFFNTLYDPYREGADFVRGYPFSLREGVSTAVSHGLWLNIPDYDAPTQLVKPKERNTRYVDAVMTIPKGTLFPMCGMNLAYDRELIGPAMYFGLMGDGQPIGRYDDMWAGWCIKVICDHLGLGVKTGLPYIYHSKASNPFVNLKKEYKGIFWQEDIIPFFQSPKLTKEAVTVQQCYMELSKLVKEKLSPIDPYFDKLADAMVTWIEAWDELNPPTKA

SEQ ID NO: 76405 - protein, 321 aa, Arabidopsis thaliana
  peptide (1)..(321): Ceres Seq. ID no. 7107864
  misc_feature (1)..(320): Pfam Name: Reversibly glycosylated polypeptide Pfam Description: Reversibly glycosylated polypeptide
  misc_feature (1)..(321): Homolog of NCBI NO: 2317729 NR Description: reversibly glycosylated polypeptide-1
  misc_feature (1)..(321): Homolog of NCBI NO: 15232865 NR Description: reversibly glycosylated polypeptide-1; protein
  misc_feature (1)..(318): Homolog of NCBI NO: 15242351 NR Description: reversibly glycosylated polypeptide-3; protein At5g15650.1, supported by cDNA: 35863., supported by cDNA: supported by cDNA: gi_2317730 [Arabidopsis thaliana]
  misc_feature (1)..(318): Homolog of NCBI NO: 2317731 NR Description: reversibly glycosylated polypeptide-2
  misc_feature (1)..(318): Homolog of NCBI NO: 21593071 NR Description: reversibly glycosylated polypeptide-3
  misc_feature (1)..(321): Homolog of NCBI NO: 34582499 NR Description: Alpha-1,4-glucan-protein synthase [UDP-forming] 2
  misc_feature (1)..(321): Homolog of NCBI NO: 4158221 NR Description: reversibly glycosylated polypeptide [Oryza sativa
  misc_feature (1)..(321): Homolog of NCBI NO: 34915190 NR Description: reversibly glycosylated polypeptide [Oryza sativa
  misc_feature (1)..(321): Homolog of NCBI NO: 4158232 NR Description: reversibly glycosylated polypeptide [Triticum
  misc_feature (1)..(321): Homolog of NCBI NO: 34588146 NR Description: Alpha-1,4-glucan-protein synthase [UDP-forming] glucose:protein transglucosylase) (UPTG) (Amylogenin) (Golgi
MWRPFFQPYHLIIVQDGDPSKTIAVPEGFDYELYNRNDINRILGPKASCISFKDSACRCFGYMVSKKKYIFTIDDDCFVAKDPSGKAVNALEQHIKNLLCPSTPFFFNTLYDPYREGADFVRGYPFSLREGVSTAVSHGLWLNIPDYDAPTQLVKPKERNTRYVDAVMTIPKGTLFPMCGMNLAYDRELIGPAMYFGLMGDGQPIGRYDDMWAGWCIKVICDHLGLGVKTGLPYIYHSKASNPFVNLKKEYKGIFWQEDIIPFFQSPKLTKEAVTVQQCYMELSKLVKEKLSPIDPYFDKLADAMVTWIEAWDELNPPTKA

SEQ ID NO: 76406 - protein, 259 aa, Arabidopsis thaliana
  peptide (1)..(259): Ceres Seq. ID no. 7107865
  misc_feature (1)..(258): Pfam Name: Reversibly glycosylated polypeptide Pfam Description: Reversibly glycosylated polypeptide
  misc_feature (1)..(259): Homolog of NCBI NO: 2317729 NR Description: reversibly glycosylated polypeptide-1
  misc_feature (1)..(259): Homolog of NCBI NO: 15232865 NR Description: reversibly glycosylated polypeptide-1; protein
  misc_feature (1)..(256): Homolog of NCBI NO: 15242351 NR Description: reversibly glycosylated polypeptide-3; protein At5g15650.1, supported by cDNA: 35863., supported by cDNA: supported by cDNA: gi_2317730 [Arabidopsis thaliana]
  misc_feature (1)..(256): Homolog of NCBI NO: 2317731 NR Description: reversibly glycosylated polypeptide-2
  misc_feature (1)..(256): Homolog of NCBI NO: 21593071 NR Description: reversibly glycosylated polypeptide-3
  misc_feature (1)..(259): Homolog of NCBI NO: 34582499 NR Description: Alpha-1,4-glucan-protein synthase [UDP-forming] 2
  misc_feature (1)..(259): Homolog of NCBI NO: 4158221 NR Description: reversibly glycosylated polypeptide [Oryza sativa
  misc_feature (1)..(259): Homolog of NCBI NO: 34915190 NR Description: reversibly glycosylated polypeptide [Oryza sativa
  misc_feature (1)..(259): Homolog of NCBI NO: 4158232 NR Description: reversibly glycosylated polypeptide [Triticum
  misc_feature (1)..(259): Homolog of NCBI NO: 34588146 NR Description: Alpha-1,4-glucan-protein synthase [UDP-forming] glucose:protein transglucosylase) (UPTG) (Amylogenin) (Golgi
MVSKKKYIFTIDDDCFVAKDPSGKAVNALEQHIKNLLCPSTPFFFNTLYDPYREGADFVRGYPFSLREGVSTAVSHGLWLNIPDYDAPTQLVKPKERNTRYVDAVMTIPKGTLFPMCGMNLAYDRELIGPAMYFGLMGDGQPIGRYDDMWAGWCIKVICDHLGLGVKTGLPYIYHSKASNPFVNLKKEYKGIFWQEDIIPFFQSPKLTKEAVTVQQCYMELSKLVKEKLSPIDPYFDKLADAMVTWIEAWDELNPPTKA

SEQ ID NO: 76407 - DNA, 880 bp, Arabidopsis thaliana
  misc_feature (1)..(880): Ceres Seq. ID no. 7107876
  misc_feature: MA Experiment ID: 20000169 Result: Up-regulated in Transcription
  misc_feature: MA Experiment 20000169 PARAMETER Experiment Name: At_100uM_ABA_P Parameter: Age (day) Value: 14
  misc_feature: MA Experiment 20000169 PARAMETER Experiment Name: At_100uM_ABA_P Parameter: Organism Value: A. thaliana
  misc_feature: MA Experiment 20000169 PARAMETER Experiment Name: At_100uM_ABA_P Parameter: Plant Line Value: WS
  misc_feature: MA Experiment 20000169 PARAMETER Experiment Name: At_100uM_ABA_P Parameter: Timepoint (hr) Value: 6
  misc_feature: MA Experiment 20000169 PARAMETER Experiment Name: At_100uM_ABA_P Parameter: Tissue Value: Aerial
  misc_feature: MA Experiment 20000169 PARAMETER Experiment Name: At_100uM_ABA_P Parameter: Treatment Value: 100uM ABA vs. No Treatment
  misc_feature: MA Experiment ID: 20000184 Result: Up-regulated in Transcription
  misc_feature: MA Experiment 20000184 PARAMETER Experiment Name: At_Shoots__P Parameter: Age (day) Value: 7
  misc_feature: MA Experiment 20000184 PARAMETER Experiment Name: At_Shoots__P Parameter: Tissue Value: Shoots vs. Whole Plant
  misc_feature: MA Experiment ID: 20000185 Result: Up-regulated in Transcription
  misc_feature: MA Experiment 20000185 PARAMETER Experiment Name: At_Roots__P Parameter: Age (day) Value: 7 vs. 21
  misc_feature: MA Experiment 20000185 PARAMETER Experiment Name: At_Roots__P Parameter: Organism Value: A. thaliana
  misc_feature: MA Experiment 20000185 PARAMETER Experiment Name: At_Roots__P Parameter: Tissue Value: Roots vs. Whole Plant
  misc_feature: MA Experiment ID: 20000234 Result: Up-regulated in Transcription
  misc_feature: MA Experiment 20000234 PARAMETER Experiment Name: At_Siliques_P Parameter: Age (day) Value: 21
  misc_feature: MA Experiment 20000234 PARAMETER Experiment Name: At_Siliques_P Parameter: Organism Value: A. thaliana
  misc_feature: MA Experiment 20000234 PARAMETER Experiment Name: At_Siliques_P Parameter: Plant Line Value: WS
  misc_feature: MA Experiment 20000234 PARAMETER Experiment Name: At_Siliques_P Parameter: Tissue Value: Less Than 5mm Siliques vs. Whole Plant
  misc_feature: MA Experiment ID: 20000264 Result: Up-regulated in Transcription
  misc_feature: MA Experiment 20000264 PARAMETER Experiment Name: At_Open_Flower_P Parameter: Age (day) Value: 21
  misc_feature: MA Experiment 20000264 PARAMETER Experiment Name: At_Open_Flower_P Parameter: Plant Line Value: WS
  misc_feature: MA Experiment 20000264 PARAMETER Experiment Name: At_Open_Flower_P Parameter: Tissue Value: Open Flower vs. Whole Plant
  misc_feature: MA Experiment ID: 20000265 Result: Up-regulated in Transcription
  misc_feature: MA Experiment 20000265 PARAMETER Experiment Name: At_Open_Flower_P Parameter: Age (day) Value: 21
  misc_feature: MA Experiment 20000265 PARAMETER Experiment Name: At_Open_Flower_P Parameter: Plant Line Value: WS
  misc_feature: MA Experiment 20000265 PARAMETER Experiment Name: At_Open_Flower_P Parameter: Tissue Value: Closed Flower vs. Whole Plant
  misc_feature: MA Experiment ID: 20000438 Result: Up-regulated in Transcription
  misc_feature: MA Experiment 20000438 PARAMETER Experiment Name: At_Shoots__P Parameter: Age (day) Value: 14
  misc_feature: MA Experiment 20000438 PARAMETER Experiment Name: At_Shoots__P Parameter: Tissue Value: Shoots vs. Whole Plant
  misc_feature: MA Experiment ID: 20000439 Result: Up-regulated in Transcription
  misc_feature: MA Experiment 20000439 PARAMETER Experiment Name: At_Roots__P Parameter: Age (day) Value: 14 vs. 21
  misc_feature: MA Experiment 20000439 PARAMETER Experiment Name: At_Roots__P Parameter: Organism Value: A. thaliana
  misc_feature: MA Experiment 20000439 PARAMETER Experiment Name: At_Roots__P Parameter: Tissue Value: Roots vs. Whole Plant
  misc_feature: MA Experiment ID: 20001248 Result: Down-regulated in Transcription
  misc_feature: MA Experiment 20001248 PARAMETER Experiment Name: At_Far-red-induction_P Parameter: Age (day) Value: 7
  misc_feature: MA Experiment 20001248 PARAMETER Experiment Name: At_Far-red-induction_P Parameter: Light Value: Far-red vs. White
  misc_feature: MA Experiment 20001248 PARAMETER Experiment Name: At_Far-red-induction_P Parameter: Organism Value: A. thaliana
  misc_feature: MA Experiment 20001248 PARAMETER Experiment Name: At_Far-red-induction_P Parameter: Plant Line Value: Columbia
  misc_feature: MA Experiment 20001248 PARAMETER Experiment Name: At_Far-red-induction_P Parameter: Timepoint (hr) Value: 4
  misc_feature: MA Experiment 20001248 PARAMETER Experiment Name: At_Far-red-induction_P Parameter: Tissue Value: Whole Plant
gacccacgcgtccggttagcccagaaaggtcttaaccttatactcgttgctcgtaacccagacaagctcaaagatgtctctgattccatcagatctaagtatagtcaaactcagatcttgaccgttgtgatggatttctctggagatattgatgaaggtgtgaaacggattaaggagagtattgaaggattagatgttgggattttgattaataatgctggcatgtcttatccttatgctaagtattttcatgaggttgatgaagagttgatcaataacttgattaagatcaatgttgaaggaactactaaagttactcaagctgtgttgcctaatatgcttaagaggaagaaaggtgctattattaatatgggttctggtgctgctgctcttattccttcttatcctttttactctgtttatgctggtgctaaaacgtacgtggatcagttcacaaagtgtctacatgttgagtataagaagagtgggattgatgttcaatgccaggttcccttgtatgttgcaacaaagatgacaaaaataagaagagcatccttcttagttgcatcaccagagggttacgcaaaggcagcactgcgttttgtaggctatgaagcacaatgcacaccgtactggcctcacgctctcatgggtgcagttgtctctgcattgcccgaaagcgtttttgaatcatttaacatcaagagatgcctccagatccggaagaagggtctccaaaaagactccatgaagaaagaatgaatcttccaggtttaagttactaccaagaatttccttcttctgaagttgttggtttcttgaaaagcttctgttctgaatcttttgtaagacttgtactctttagttttctaagtttttt

SEQ ID NO: 76408 - protein, 253 aa, Arabidopsis thaliana
  peptide (1)..(253): Ceres Seq. ID no. 7107877
  misc_feature (5)..(180): Pfam Name: short chain dehydrogenase Pfam Description: short chain dehydrogenase
  misc_feature (1)..(253): Homolog of NCBI NO: 2586125 NR Description: b-keto acyl reductase [Arabidopsis thaliana]
  misc_feature (5)..(253): Homolog of NCBI NO: 11072027 NR Description: F12A21.14 [Arabidopsis thaliana]
  misc_feature (5)..(253): Homolog of NCBI NO: 18408847 NR Description: Expressed protein; protein id: At1g67730.1, by cDNA: 7434. [Arabidopsis thaliana] >gi|21594872|gb|AAM66051.1|
  misc_feature (5)..(253): Homolog of NCBI NO: 28565597 NR Description: putative 3-ketoacyl-CoA reductase 1 [Brassica
  misc_feature (5)..(253): Homolog of NCBI NO: 28565601 NR Description: putative 3-ketoacyl-CoA reductase 2 [Brassica
  misc_feature (44)..(253): Homolog of NCBI NO: 13605726 NR Description: At1g67730/F12A21_31 [Arabidopsis thaliana]
  misc_feature (44)..(253): Homolog of NCBI NO: 23505781 NR Description: At1g67730/F12A21_31 [Arabidopsis thaliana]
  misc_feature (5)..(252): Homolog of NCBI NO: 7489413 NR Description: probable b-keto acyl reductase (EC 1.1.-.-) -
  misc_feature (5)..(252): Homolog of NCBI NO: 7489808 NR Description: probable beta-keto acyl reductase - maize
  misc_feature (5)..(252): Homolog of NCBI NO: 38345332 NR Description: OSJNBa0081L15.5 [Oryza sativa (japonica
DPRVRLAQKGLNLILVARNPDKLKDVSDSIRSKYSQTQILTVVMDFSGDIDEGVKRIKESIEGLDVGILINNAGMSYPYAKYFHEVDEELINNLIKINVEGTTKVTQAVLPNMLKRKKGAIINMGSGAAALIPSYPFYSVYAGAKTYVDQFTKCLHVEYKKSGIDVQCQVPLYVATKMTKIRRASFLVASPEGYAKAALRFVGYEAQCTPYWPHALMGAVVSALPESVFESFNIKRCLQIRKKGLQKDSMKKE

SEQ ID NO: 76409 - protein, 210 aa, Arabidopsis thaliana
  peptide (1)..(210): Ceres Seq. ID no. 7107878
  misc_feature (1)..(137): Pfam Name: short chain dehydrogenase Pfam Description: short chain dehydrogenase
  misc_feature (1)..(210): Homolog of NCBI NO: 2586125 NR Description: b-keto acyl reductase [Arabidopsis thaliana]
  misc_feature (1)..(210): Homolog of NCBI NO: 11072027 NR Description: F12A21.14 [Arabidopsis thaliana]
  misc_feature (1)..(210): Homolog of NCBI NO: 18408847 NR Description: Expressed protein; protein id: At1g67730.1, by cDNA: 7434. [Arabidopsis thaliana] >gi|21594872|gb|AAM66051.1|
  misc_feature (1)..(210): Homolog of NCBI NO: 28565597 NR Description: putative 3-ketoacyl-CoA reductase 1 [Brassica
  misc_feature (1)..(210): Homolog of NCBI NO: 28565601 NR Description: putative 3-ketoacyl-CoA reductase 2 [Brassica
  misc_feature (1)..(210): Homolog of NCBI NO: 13605726 NR Description: At1g67730/F12A21_31 [Arabidopsis thaliana]
  misc_feature (1)..(210): Homolog of NCBI NO: 23505781 NR Description: At1g67730/F12A21_31 [Arabidopsis thaliana]
  misc_feature (1)..(209): Homolog of NCBI NO: 7489413 NR Description: probable b-keto acyl reductase (EC 1.1.-.-) -
  misc_feature (1)..(209): Homolog of NCBI NO: 7489808 NR Description: probable beta-keto acyl reductase - maize
  misc_feature (1)..(209): Homolog of NCBI NO: 38345332 NR Description: OSJNBa0081L15.5 [Oryza sativa (japonica
MDFSGDIDEGVKRIKESIEGLDVGILINNAGMSYPYAKYFHEVDEELINNLIKINVEGTTKVTQAVLPNMLKRKKGAIINMGSGAAALIPSYPFYSVYAGAKTYVDQFTKCLHVEYKKSGIDVQCQVPLYVATKMTKIRRASFLVASPEGYAKAALRFVGYEAQCTPYWPHALMGAVVSALPESVFESFNIKRCLQIRKKGLQKDSMKKE

SEQ ID NO: 76410 - protein, 179 aa, Arabidopsis thaliana
  peptide (1)..(179): Ceres Seq. ID no. 7107879
  misc_feature (1)..(106): Pfam Name: short chain dehydrogenase Pfam Description: short chain dehydrogenase
  misc_feature (1)..(179): Homolog of NCBI NO: 2586125 NR Description: b-keto acyl reductase [Arabidopsis thaliana]
  misc_feature (1)..(179): Homolog of NCBI NO: 11072027 NR Description: F12A21.14 [Arabidopsis thaliana]
  misc_feature (1)..(179): Homolog of NCBI NO: 18408847 NR Description: Expressed protein; protein id: At1g67730.1, by cDNA: 7434. [Arabidopsis thaliana] >gi|21594872|gb|AAM66051.1|
  misc_feature (1)..(179): Homolog of NCBI NO: 28565597 NR Description: putative 3-ketoacyl-CoA reductase 1 [Brassica
  misc_feature (1)..(179): Homolog of NCBI NO: 28565601 NR Description: putative 3-ketoacyl-CoA reductase 2 [Brassica
  misc_feature (1)..(179): Homolog of NCBI NO: 13605726 NR Description: At1g67730/F12A21_31 [Arabidopsis thaliana]
  misc_feature (1)..(179): Homolog of NCBI NO: 23505781 NR Description: At1g67730/F12A21_31 [Arabidopsis thaliana]
  misc_feature (1)..(178): Homolog of NCBI NO: 7489413 NR Description: probable b-keto acyl reductase (EC 1.1.-.-) -
  misc_feature (1)..(178): Homolog of NCBI NO: 7489808 NR Description: probable beta-keto acyl reductase - maize
  misc_feature (1)..(178): Homolog of NCBI NO: 38345332 NR Description: OSJNBa0081L15.5 [Oryza sativa (japonica
MSYPYAKYFHEVDEELINNLIKINVEGTTKVTQAVLPNMLKRKKGAIINMGSGAAALIPSYPFYSVYAGAKTYVDQFTKCLHVEYKKSGIDVQCQVPLYVATKMTKIRRASFLVASPEGYAKAALRFVGYEAQCTPYWPHALMGAVVSALPESVFESFNIKRCLQIRKKGLQKDSMKKE

SEQ ID NO: 76411 - DNA, 1844 bp, Arabidopsis thaliana
  misc_feature (1)..(1844): Ceres Seq. ID no. 7107883
  misc_feature: MA Experiment ID: 108463 Result: Up-regulated in Transcription
  misc_feature: MA Experiment 108463 PARAMETER Experiment Name: At_Germinating_Seeds_cDNA_P Parameter: Age (day) Value: 3 vs. 0
  misc_feature: MA Experiment 108463 PARAMETER Experiment Name: At_Germinating_Seeds_cDNA_P Parameter: Tissue Value: Germinating Seeds
  misc_feature: MA Experiment ID: 108501 Result: Up-regulated in Transcription
  misc_feature: MA Experiment 108501 PARAMETER Experiment Name: At_ap2_floral_buds_cDNA_P Parameter: Plant Line Value: ap2 (Ler.)
  misc_feature: MA Experiment 108501 PARAMETER Experiment Name: At_ap2_floral_buds_cDNA_P Parameter: Tissue Value: Closed Flower
  misc_feature: MA Experiment ID: 108572 Result: Up-regulated in Transcription
  misc_feature: MA Experiment 108572 PARAMETER Experiment Name: At_Drought_cDNA_P Parameter: Timepoint (hr) Value: 1
  misc_feature: MA Experiment 108572 PARAMETER Experiment Name: At_Drought_cDNA_P Parameter: Tissue Value: Aerial
  misc_feature: MA Experiment 108572 PARAMETER Experiment Name: At_Drought_cDNA_P Parameter: Treatment Value: Drought vs. No Drought
  misc_feature: MA Experiment ID: 108576 Result: Up-regulated in Transcription
  misc_feature: MA Experiment 108576 PARAMETER Experiment Name: At_42deg_Heat_cDNA_P Parameter: Temperature (deg C) Value: 42 vs. 22
  misc_feature: MA Experiment 108576 PARAMETER Experiment Name: At_42deg_Heat_cDNA_P Parameter: Timepoint (hr) Value: 1
  misc_feature: MA Experiment 108576 PARAMETER Experiment Name: At_42deg_Heat_cDNA_P Parameter: Tissue Value: Aerial
  misc_feature: MA Experiment ID: 108595 Result: Up-regulated in Transcription
  misc_feature: MA Experiment 108595 PARAMETER Experiment Name: At_Ler-pi_Ovule_cDNA_P Parameter: Plant Line Value: null
  misc_feature: MA Experiment ID: 20000069 Result: Down-regulated in Transcription
  misc_feature: MA Experiment 20000069 PARAMETER Experiment Name: At_100uM_ABA_Mutants_cDNA_P Parameter: Plant Line Value: CS23
  misc_feature: MA Experiment 20000069 PARAMETER Experiment Name: At_100uM_ABA_Mutants_cDNA_P Parameter: Timepoint (hr) Value: 6
  misc_feature: MA Experiment 20000069 PARAMETER Experiment Name: At_100uM_ABA_Mutants_cDNA_P Parameter: Tissue Value: Aerial
  misc_feature: MA Experiment 20000069 PARAMETER Experiment Name: At_100uM_ABA_Mutants_cDNA_P Parameter: Treatment Value: 100uM ABA vs. No Treatment
  misc_feature: MA Experiment ID: 20000086 Result: Down-regulated in Transcription
  misc_feature: MA Experiment 20000086 PARAMETER Experiment Name: At_100uM_ABA_Mutants_cDNA_P Parameter: Plant Line Value: CS22
  misc_feature: MA Experiment 20000086 PARAMETER Experiment Name: At_100uM_ABA_Mutants_cDNA_P Parameter: Timepoint (hr) Value: 6
  misc_feature: MA Experiment 20000086 PARAMETER Experiment Name: At_100uM_ABA_Mutants_cDNA_P Parameter: Tissue Value: Aerial
  misc_feature: MA Experiment 20000086 PARAMETER Experiment Name: At_100uM_ABA_Mutants_cDNA_P Parameter: Treatment Value: 100uM ABA vs. No Treatment
  misc_feature: MA Experiment ID: 20000093 Result: Up-regulated in Transcription
  misc_feature: MA Experiment 20000093 PARAMETER Experiment Name: At_42deg_Heat_cDNA_P Parameter: Temperature (deg C) Value: 42 vs. 22
  misc_feature: MA Experiment 20000093 PARAMETER Experiment Name: At_42deg_Heat_cDNA_P Parameter: Timepoint (hr) Value: 0.5
  misc_feature: MA Experiment 20000093 PARAMETER Experiment Name: At_42deg_Heat_cDNA_P Parameter: Tissue Value: Aerial
  misc_feature: MA Experiment ID: 20000112 Result: Up-regulated in Transcription
  misc_feature: MA Experiment 20000112 PARAMETER Experiment Name: At_42deg_Heat_cDNA_P Parameter: Temperature (deg C) Value: 42 vs. 22
  misc_feature: MA Experiment 20000112 PARAMETER Experiment Name: At_42deg_Heat_cDNA_P Parameter: Timepoint (hr) Value: 2
  misc_feature: MA Experiment 20000112 PARAMETER Experiment Name: At_42deg_Heat_cDNA_P Parameter: Tissue Value: Aerial
  misc_feature: MA Experiment ID: 20000113 Result: Up-regulated in Transcription
  misc_feature: MA Experiment 20000113 PARAMETER Experiment Name: At_42deg_Heat_cDNA_P Parameter: Temperature (deg C) Value: 42 vs. 22
  misc_feature: MA Experiment 20000113 PARAMETER Experiment Name: At_42deg_Heat_cDNA_P Parameter: Timepoint (hr) Value: 8
  misc_feature: MA Experiment 20000113 PARAMETER Experiment Name: At_42deg_Heat_cDNA_P Parameter: Tissue Value: Aerial
  misc_feature: MA Experiment ID: 20000117 Result: Down-regulated in Transcription
  misc_feature: MA Experiment 20000117 PARAMETER Experiment Name: At_100uM_ABA_Mutants_cDNA_P Parameter: Plant Line Value: Columbia
  misc_feature: MA Experiment 20000117 PARAMETER Experiment Name: At_100uM_ABA_Mutants_cDNA_P Parameter: Timepoint (hr) Value: 6
  misc_feature: MA Experiment 20000117 PARAMETER Experiment Name: At_100uM_ABA_Mutants_cDNA_P Parameter: Tissue Value: Aerial
  misc_feature: MA Experiment 20000117 PARAMETER Experiment Name: At_100uM_ABA_Mutants_cDNA_P Parameter: Treatment Value: 100uM ABA vs. No Treatment
  misc_feature: MA Experiment ID: 20000144 Result: Up-regulated in Transcription
  misc_feature: MA Experiment 20000144 PARAMETER Experiment Name: At_42deg_Heat_cDNA_P Parameter: Temperature (deg C) Value: 42 vs. 22
  misc_feature: MA Experiment 20000144 PARAMETER Experiment Name: At_42deg_Heat_cDNA_P Parameter: Timepoint (hr) Value: 1
  misc_feature: MA Experiment 20000144 PARAMETER Experiment Name: At_42deg_Heat_cDNA_P Parameter: Tissue Value: Aerial
  misc_feature: MA Experiment ID: 20000171 Result: Up-regulated in Transcription
  misc_feature: MA Experiment 20000171 PARAMETER Experiment Name: At_42deg_Heat_P Parameter: Age (day) Value: 14
  misc_feature: MA Experiment 20000171 PARAMETER Experiment Name: At_42deg_Heat_P Parameter: Organism Value: A. thaliana
  misc_feature: MA Experiment 20000171 PARAMETER Experiment Name: At_42deg_Heat_P Parameter: Plant Line Value: WS
  misc_feature: MA Experiment 20000171 PARAMETER Experiment Name: At_42deg_Heat_P Parameter: Temperature (deg C) Value: 42 vs. 22
  misc_feature: MA Experiment 20000171 PARAMETER Experiment Name: At_42deg_Heat_P Parameter: Timepoint (hr) Value: 1
  misc_feature: MA Experiment 20000171 PARAMETER Experiment Name: At_42deg_Heat_P Parameter: Tissue Value: Aerial
  misc_feature: MA Experiment ID: 20000173 Result: Up-regulated in Transcription
  misc_feature: MA Experiment 20000173 PARAMETER Experiment Name: At_42deg_Heat_P Parameter: Age (day) Value: 14
  misc_feature: MA Experiment 20000173 PARAMETER Experiment Name: At_42deg_Heat_P Parameter: Organism Value: A. thaliana
  misc_feature: MA Experiment 20000173 PARAMETER Experiment Name: At_42deg_Heat_P Parameter: Plant Line Value: WS
  misc_feature: MA Experiment 20000173 PARAMETER Experiment Name: At_42deg_Heat_P Parameter: Temperature (deg C) Value: 42 vs. 22
  misc_feature: MA Experiment 20000173 PARAMETER Experiment Name: At_42deg_Heat_P Parameter: Timepoint (hr) Value: 6
  misc_feature: MA Experiment 20000173 PARAMETER Experiment Name: At_42deg_Heat_P Parameter: Tissue Value: Aerial
  misc_feature: MA Experiment ID: 20001248 Result: Down-regulated in Transcription
  misc_feature: MA Experiment 20001248 PARAMETER Experiment Name: At_Far-red-induction_P Parameter: Age (day) Value: 7
  misc_feature: MA Experiment 20001248 PARAMETER Experiment Name: At_Far-red-induction_P Parameter: Light Value: Far-red vs. White
  misc_feature: MA Experiment 20001248 PARAMETER Experiment Name: At_Far-red-induction_P Parameter: Organism Value: A. thaliana
  misc_feature: MA Experiment 20001248 PARAMETER Experiment Name: At_Far-red-induction_P Parameter: Plant Line Value: Columbia
  misc_feature: MA Experiment 20001248 PARAMETER Experiment Name: At_Far-red-induction_P Parameter: Timepoint (hr) Value: 4
  misc_feature: MA Experiment 20001248 PARAMETER Experiment Name: At_Far-red-induction_P Parameter: Tissue Value: Whole Plant
  misc_feature: MA Experiment ID: 20001560 Result: Down-regulated in Transcription
  misc_feature: MA Experiment 20001560 PARAMETER Experiment Name: At_Drought_Soil_Dry_P Parameter: Age (day) Value: 28
  misc_feature: MA Experiment 20001560 PARAMETER Experiment Name: At_Drought_Soil_Dry_P Parameter: Organism Value: A. thaliana
  misc_feature: MA Experiment 20001560 PARAMETER Experiment Name: At_Drought_Soil_Dry_P Parameter: Plant Line Value: WS
  misc_feature: MA Experiment 20001560 PARAMETER Experiment Name: At_Drought_Soil_Dry_P Parameter: Post Timepoint (hr) Value: None
  misc_feature: MA Experiment 20001560 PARAMETER Experiment Name: At_Drought_Soil_Dry_P Parameter: Post-Treatment Value: None
  misc_feature: MA Experiment 20001560 PARAMETER Experiment Name: At_Drought_Soil_Dry_P Parameter: Timepoint (day) Value: 14
  misc_feature: MA Experiment 20001560 PARAMETER Experiment Name: At_Drought_Soil_Dry_P Parameter: Treatment Value: Drought vs. No Drought
  misc_feature: MA Experiment ID: 20001757 Result: Down-regulated in Transcription
  misc_feature: MA Experiment 20001757 PARAMETER Experiment Name: At_50mM_NH4NO3_L-to-H_P Parameter: Timepoint (hr) Value: 6
  misc_feature: MA Experiment 20001757 PARAMETER Experiment Name: At_50mM_NH4NO3_L-to-H_P Parameter: Tissue Value: Leaf
  misc_feature: MA Experiment 20001757 PARAMETER Experiment Name: At_50mM_NH4NO3_L-to-H_P Parameter: Treatment Value: 50mM NH4NO3 vs 100mM Mannitol
cagtgtgagtaatttagcaaagcttttcaaaaaccagagaaaatgttcatcgagagcttcaaagttgagagcccaaatgtcaaatacacagagaatgagatcaattcggtgtacgattacgaaacaacagaggtcgtccatgagaatcgtaacggtacatatcagtgggtcgtgaagccaaagactgtcaaatacgatttcaaaacagacactcgtgtccccaaattaggggttatgcttgttggttggggaggaaacaatggatcaacactaaccgctggtgtcattgctaacaaagaaggaatatcgtgggcgactaaagacaaagtgcaacaagctaattactttggttcacttactcaagcttcttcgattcgtgttggatcttacaatggtgaagagatctacgctcctttcaagagtcttcttccaatggtgaatccagatgatgttgtgtttggtggttgggatataagtgacatgaatttagcggacgctatggctagagctagagttcttgacattgatctgcagaaacaacttagaccttacatggagaacatgatcccgcttcctggtatctatgatcctgatttcattgctgcgaatcaaggttcacgtgctaatagcgtgatcaaaggtaccaagaaggaacaagttgatcacatcatcaaggacatgagggagtttaaggagaagaacaaagtggataagttggttgtgttatggactgcaaacacagagcgttatagcaatgtgattgtaggacttaatgatacgacggagaatctattggcttctgttgaaaaggatgagtctgagatctcgccgtctacgttgtatgctattgcttgtgttcttgaagggatccctttcatcaatgggagtcctcagaatactttggtccccggtcttatcgagttggctatatcgaataattgtttgatcggtggagatgatttcaagagtggtcagactaagatgaaatccgtttgggttgatttccttgttggagctggcattaagcctacttctattgtgagctataatcatttgggaaacaacgacgggatgaacctctcagcgccacagactttccgctctaaggagatttcaaagagcaatgttgtagatgacatggtagctagtaatggcatcctctttgagcctggtgaacaccctgaccatgtcgttgtcatcaagtatgtaccatatgttgcggatagtaaaagagcaatggatgagtacacgtctgagatattcatgggagggaggaacacaattgtgttgcataacacttgtgaggactctctcttggctgcaccaattatcttggatcttgtccttctcgctgaactcagcaccagaatccagtttaaagctgaaggagaggggaagtttcactctttccacccggtagctaccatactcagttacctcacaaaggcacctcttgtaccgcccggaacagcggtggttaacgctctgtcgaagcagcggccaatgctggaaaacattcttagggcatgtgttgggcttgcgccagagaacaacatgatcatggagtacaagtgaaggatgaggaagaagaagtaaaggtacctaataagaccttaggatatgaagaacactgctccattgtttcattaatatatatcattttgtatgtatattatatgaatgtgtgtgtgagagataatatggataagcttagggttattttgtgtgatatggatctggtcggtttatttggtgagaaaattagccaaggttttggatcacatgtgtaaaagattaagtaattatgcttgtgtctccttgtaatataaccaaacttatgatct

SEQ ID NO: 76412 - protein, 510 aa, Arabidopsis thaliana
  peptide (1)..(510): Ceres Seq. ID no. 7107884
  misc_feature (61)..(495): Pfam Name: Myo-inositol-1-phosphate synthase Pfam Description: Myo-inositol-1-phosphate synthase
  misc_feature (1)..(510): Homolog of NCBI NO: 973313 NR Description: myo-inositol 1-phosphate synthase isozyme-2
  misc_feature (1)..(510): Homolog of NCBI NO: 15227169 NR Description: putative myo-inositol 1-phosphate synthase; id: At2g22240.1, supported by cDNA: gi_15450746, supported by
  misc_feature (1)..(510): Homolog of NCBI NO: 14548098 NR Description: Inositol-3-phosphate synthase
  misc_feature (1)..(510): Homolog of NCBI NO: 14548093 NR Description: Inositol-3-phosphate synthase
  misc_feature (1)..(510): Homolog of NCBI NO: 15236025 NR Description: myo-inositol-1-phosphate synthase; protein id: supported by cDNA: 1978., supported by cDNA: gi_1161311, by cDNA: gi_13937199, supported by cDNA: gi_14334743 [Arabidopsis
  misc_feature (2)..(510): Homolog of NCBI NO: 7488491 NR Description: inositol-3-phosphate synthase (EC 5.5.1.4)
  misc_feature (1)..(510): Homolog of NCBI NO: 1161312 NR Description: myo-inositol-1-phosphate synthase
  misc_feature (1)..(510): Homolog of NCBI NO: 14548092 NR Description: Inositol-3-phosphate synthase
  misc_feature (1)..(510): Homolog of NCBI NO: 14548095 NR Description: Inositol-3-phosphate synthase
  misc_feature (1)..(510): Homolog of NCBI NO: 14548099 NR Description: Inositol-3-phosphate synthase
MFIESFKVESPNVKYTENEINSVYDYETTEVVHENRNGTYQWVVKPKTVKYDFKTDTRVPKLGVMLVGWGGNNGSTLTAGVIANKEGISWATKDKVQQANYFGSLTQASSIRVGSYNGEEIYAPFKSLLPMVNPDDVVFGGWDISDMNLADAMARARVLDIDLQKQLRPYMENMIPLPGIYDPDFIAANQGSRANSVIKGTKKEQVDHIIKDMREFKEKNKVDKLVVLWTANTERYSNVIVGLNDTTENLLASVEKDESEISPSTLYAIACVLEGIPFINGSPQNTLVPGLIELAISNNCLIGGDDFKSGQTKMKSVWVDFLVGAGIKPTSIVSYNHLGNNDGMNLSAPQTFRSKEISKSNVVDDMVASNGILFEPGEHPDHVVVIKYVPYVADSKRAMDEYTSEIFMGGRNTIVLHNTCEDSLLAAPIILDLVLLAELSTRIQFKAEGEGKFHSFHPVATILSYLTKAPLVPPGTAVVNALSKQRPMLENILRACVGLAPENNMIMEYK

SEQ ID NO: 76413 - protein, 446 aa, Arabidopsis thaliana
  peptide (1)..(446): Ceres Seq. ID no. 7107885
  misc_feature (1)..(431): Pfam Name: Myo-inositol-1-phosphate synthase Pfam Description: Myo-inositol-1-phosphate synthase
  misc_feature (1)..(446): Homolog of NCBI NO: 973313 NR Description: myo-inositol 1-phosphate synthase isozyme-2
  misc_feature (1)..(446): Homolog of NCBI NO: 15227169 NR Description: putative myo-inositol 1-phosphate synthase; id: At2g22240.1, supported by cDNA: gi_15450746, supported by
  misc_feature (1)..(446): Homolog of NCBI NO: 14548098 NR Description: Inositol-3-phosphate synthase
  misc_feature (1)..(446): Homolog of NCBI NO: 14548093 NR Description: Inositol-3-phosphate synthase
  misc_feature (1)..(446): Homolog of NCBI NO: 15236025 NR Description: myo-inositol-1-phosphate synthase; protein id: supported by cDNA: 1978., supported by cDNA: gi_1161311, by cDNA: gi_13937199, supported by cDNA: gi_14334743 [Arabidopsis
  misc_feature (1)..(446): Homolog of NCBI NO: 7488491 NR Description: inositol-3-phosphate synthase (EC 5.5.1.4)
  misc_feature (1)..(446): Homolog of NCBI NO: 1161312 NR Description: myo-inositol-1-phosphate synthase
  misc_feature (1)..(446): Homolog of NCBI NO: 14548092 NR Description: Inositol-3-phosphate synthase
  misc_feature (1)..(446): Homolog of NCBI NO: 14548095 NR Description: Inositol-3-phosphate synthase
  misc_feature (1)..(446): Homolog of NCBI NO: 14548099 NR Description: Inositol-3-phosphate synthase
MLVGWGGNNGSTLTAGVIANKEGISWATKDKVQQANYFGSLTQASSIRVGSYNGEEIYAPFKSLLPMVNPDDVVFGGWDISDMNLADAMARARVLDIDLQKQLRPYMENMIPLPGIYDPDFIAANQGSRANSVIKGTKKEQVDHIIKDMREFKEKNKVDKLVVLWTANTERYSNVIVGLNDTTENLLASVEKDESEISPSTLYAIACVLEGIPFINGSPQNTLVPGLIELAISNNCLIGGDDFKSGQTKMKSVWVDFLVGAGIKPTSIVSYNHLGNNDGMNLSAPQTFRSKEISKSNVVDDMVASNGILFEPGEHPDHVVVIKYVPYVADSKRAMDEYTSEIFMGGRNTIVLHNTCEDSLLAAPIILDLVLLAELSTRIQFKAEGEGKFHSFHPVATILSYLTKAPLVPPGTAVVNALSKQRPMLENILRACVGLAPENNMIMEYK

SEQ ID NO: 76414 - protein, 380 aa, Arabidopsis thaliana
  peptide (1)..(380): Ceres Seq. ID no. 7107886
  misc_feature (1)..(365): Pfam Name: Myo-inositol-1-phosphate synthase Pfam Description: Myo-inositol-1-phosphate synthase
  misc_feature (1)..(380): Homolog of NCBI NO: 973313 NR Description: myo-inositol 1-phosphate synthase isozyme-2
  misc_feature (1)..(380): Homolog of NCBI NO: 15227169 NR Description: putative myo-inositol 1-phosphate synthase; id: At2g22240.1, supported by cDNA: gi_15450746, supported by
  misc_feature (1)..(380): Homolog of NCBI NO: 14548098 NR Description: Inositol-3-phosphate synthase
  misc_feature (1)..(380): Homolog of NCBI NO: 14548093 NR Description: Inositol-3-phosphate synthase
  misc_feature (1)..(380): Homolog of NCBI NO: 15236025 NR Description: myo-inositol-1-phosphate synthase; protein id: supported by cDNA: 1978., supported by cDNA: gi_1161311, by cDNA: gi_13937199, supported by cDNA: gi_14334743 [Arabidopsis
  misc_feature (1)..(380): Homolog of NCBI NO: 7488491 NR Description: inositol-3-phosphate synthase (EC 5.5.1.4)
  misc_feature (1)..(380): Homolog of NCBI NO: 1161312 NR Description: myo-inositol-1-phosphate synthase
  misc_feature (1)..(380): Homolog of NCBI NO: 14548092 NR Description: Inositol-3-phosphate synthase
  misc_feature (1)..(380): Homolog of NCBI NO: 14548095 NR Description: Inositol-3-phosphate synthase
  misc_feature (1)..(380): Homolog of NCBI NO: 14548099 NR Description: Inositol-3-phosphate synthase
MVNPDDVVFGGWDISDMNLADAMARARVLDIDLQKQLRPYMENMIPLPGIYDPDFIAANQGSRANSVIKGTKKEQVDHIIKDMREFKEKNKVDKLVVLWTANTERYSNVIVGLNDTTENLLASVEKDESEISPSTLYAIACVLEGIPFINGSPQNTLVPGLIELAISNNCLIGGDDFKSGQTKMKSVWVDFLVGAGIKPTSIVSYNHLGNNDGMNLSAPQTFRSKEISKSNVVDDMVASNGILFEPGEHPDHVVVIKYVPYVADSKRAMDEYTSEIFMGGRNTIVLHNTCEDSLLAAPIILDLVLLAELSTRIQFKAEGEGKFHSFHPVATILSYLTKAPLVPPGTAVVNALSKQRPMLENILRACVGLAPENNMIMEYK

SEQ ID NO: 76415 - DNA, 1951 bp, Arabidopsis thaliana
  misc_feature (1)..(1951): Ceres Seq. ID no. 7107891
  misc_feature: MA Experiment ID: 20000286 Result: Up-regulated in Transcription
  misc_feature: MA Experiment 20000286 PARAMETER Experiment Name: At_Open_Flower_P Parameter: Age (day) Value: 21
  misc_feature: MA Experiment 20000286 PARAMETER Experiment Name: At_Open_Flower_P Parameter: Plant Line Value: WS
  misc_feature: MA Experiment 20000286 PARAMETER Experiment Name: At_Open_Flower_P Parameter: Tissue Value: Half Open vs. Whole Plant
  misc_feature: MA Experiment ID: 20000573 Result: Down-regulated in Transcription
  misc_feature: MA Experiment 20000573 PARAMETER Experiment Name: At_100uM_ABA_Mutants__P Parameter: Organism Value: A. thaliana
  misc_feature: MA Experiment 20000573 PARAMETER Experiment Name: At_100uM_ABA_Mutants__P Parameter: Plant Line Value: CS22 vs. Ler wt
  misc_feature: MA Experiment 20000573 PARAMETER Experiment Name: At_100uM_ABA_Mutants__P Parameter: Timepoint (hr) Value: N/A
  misc_feature: MA Experiment 20000573 PARAMETER Experiment Name: At_100uM_ABA_Mutants__P Parameter: Tissue Value: Whole Plant
  misc_feature: MA Experiment 20000573 PARAMETER Experiment Name: At_100uM_ABA_Mutants__P Parameter: Treatment Value: None
  misc_feature: MA Experiment ID: 20000574 Result: Down-regulated in Transcription
  misc_feature: MA Experiment 20000574 PARAMETER Experiment Name: At_100uM_ABA_Mutants__P Parameter: Organism Value: A. thaliana
  misc_feature: MA Experiment 20000574 PARAMETER Experiment Name: At_100uM_ABA_Mutants__P Parameter: Plant Line Value: CS23 vs. Ler wt
  misc_feature: MA Experiment 20000574 PARAMETER Experiment Name: At_100uM_ABA_Mutants__P Parameter: Timepoint (hr) Value: N/A
  misc_feature: MA Experiment 20000574 PARAMETER Experiment Name: At_100uM_ABA_Mutants__P Parameter: Tissue Value: Whole Plant
  misc_feature: MA Experiment 20000574 PARAMETER Experiment Name: At_100uM_ABA_Mutants__P Parameter: Treatment Value: None
caaaattcaaaaacctcacatttcacttctctcttctcgcttcttctagatctcaccggtttatctagctccggtttgattcatctccggttatggggagagaatgaggagttaccgttttagtgattatctacacatgtctgtttcattctctaacgatatggatttgttttgtggagaagactccggtgtgttttccggtgagtcaacggttgatttctcgtcttccgaggttgattcatggcctggtgattctatcgcttgttttatcgaagacgagcgtcacttcgttcctggacatgattatctctctagatttcaaactcgatctctcgatgcttccgctagagaagattccgtcgcatggattctcaaggtacaagcgtattataactttcagcctttaacggcgtacctcgccgttaactatatggatcggtttctttacgctcgtcgattaccggaaacgagtggttggccaatgcaacttttagcagtggcatgcttgtctttagctgcaaagatggaggaaattctcgttccttctctttttgattttcaggttgcaggagtgaagtatttatttgaagcaaaaactataaaaagaatggaacttcttgttctaagtgtgttagattggagactaagatcggttacaccgtttgatttcattagcttctttgcttacaagatcgatccttcgggtacctttctcgggttctttatctcccatgctacagagattatactctccaacataaaagaagcgagctttcttgagtactggccatcgagtatagctgcagccgcgattctctgtgtagcgaacgagttaccttctctatcctctgttgtcaatccccacgagagccctgagacttggtgtgacggattgagcaaagagaagatagtgagatgctatagactgatgaaagcgatggccatcgagaataaccggttaaatacaccaaaagtgatagcaaagcttcgagtgagtgtaagggcatcatcgacgttaacaaggccaagtgatgaatcctcttctccttgtaaaaggagaaaattaagtggctattcatgggtaggtgatgaaacatctacctctaattaaaatttggggagtgaaagtagaggaccaaggaaacaaaacctagaagaaaaaaaaccctcttctgtttaagtagagtatattttttaacaagtacatagtaataagggagtgatgaagaaaagtaaaagtgtttattggctgagttaaagtaattaagagttttccaaccaaggggaaggaataagagttttggttacaattacttttatggaaagggtaaaaattgggttttggggttggttggttggttgggagagacgaagctcacattaatggctttgcagattcccaagaaagcaaaatgagtaagtgagtgtaacacacacgtgttagagaaaagatatgatcatgtgagtgtgtgtgtgtgagagagagagagaagagtatttgcattagagtcctcatcacacaggtactgatggataagacaggggagcgtctgcaaaagatttgtgagtggagatttttctgagctctttgtcttaatggatcgcagcagttcatgggacccttcctcagcttcatcatcaaacaaaaaaaaaatcaagttgcgaagtatatataatttgttttttgtttggatttttaagatttttgattccttgtgtgtgacttcacgtgacggaggcgtgtgtctcacgtgtttgttttctcttcaaatcttttattttggcgggaaatttttgtgtttttgatttctatacgtattcgtggactccaaatgagttttgtcacggtgcgttttagtaacgtatgcatgcgtgtaaggtgtcacgtatgtgtatatatatgattttttttttggattcttgaaaggttaaattttatatataaaacgtt

SEQ ID NO: 76416 - protein, 335 aa, Arabidopsis thaliana
  peptide (1)..(335): Ceres Seq. ID no. 7107892
  misc_feature (50)..(182): Pfam Name: Cyclin, N-terminal domain Pfam Description: Cyclin, N-terminal domain
  misc_feature (1)..(335): Homolog of NCBI NO: 3915635 NR Description: Cyclin delta-1 >gi|2995130|emb|CAA58285.1| cyclin
  misc_feature (1)..(335): Homolog of NCBI NO: 15223075 NR Description: Cyclin D1;1; protein id: At1g70210.1 [Arabidopsis
  misc_feature (1)..(335): Homolog of NCBI NO: 1076311 NR Description: cyclin delta-1 - Arabidopsis thaliana
  misc_feature (12)..(330): Homolog of NCBI NO: 25989347 NR Description: cyclin D1 [Helianthus tuberosus]
  misc_feature (12)..(335): Homolog of NCBI NO: 6448480 NR Description: cyclin D1 [Antirrhinum majus]
  misc_feature (1)..(120): Homolog of NCBI NO: 17154787 NR Description: cyclin D1 [Arabidopsis thaliana]
  misc_feature (18)..(313): Homolog of NCBI NO: 25809160 NR Description: cyclin D protein [Physcomitrella patens]
  misc_feature (12)..(301): Homolog of NCBI NO: 1076312 NR Description: cyclin delta-2 - Arabidopsis thaliana
  misc_feature (8)..(301): Homolog of NCBI NO: 15227224 NR Description: Cyclin D2;1; protein id: At2g22490.1 [Arabidopsis
  misc_feature (50)..(314): Homolog of NCBI NO: 7484663 NR Description: cyclin D-like protein - red goosefoot
MRSYRFSDYLHMSVSFSNDMDLFCGEDSGVFSGESTVDFSSSEVDSWPGDSIACFIEDERHFVPGHDYLSRFQTRSLDASAREDSVAWILKVQAYYNFQPLTAYLAVNYMDRFLYARRLPETSGWPMQLLAVACLSLAAKMEEILVPSLFDFQVAGVKYLFEAKTIKRMELLVLSVLDWRLRSVTPFDFISFFAYKIDPSGTFLGFFISHATEIILSNIKEASFLEYWPSSIAAAAILCVANELPSLSSVVNPHESPETWCDGLSKEKIVRCYRLMKAMAIENNRLNTPKVIAKLRVSVRASSTLTRPSDESSSPCKRRKLSGYSWVGDETSTSN

SEQ ID NO: 76417 - protein, 324 aa, Arabidopsis thaliana
  peptide (1)..(324): Ceres Seq. ID no. 7107893
  misc_feature (39)..(171): Pfam Name: Cyclin, N-terminal domain Pfam Description: Cyclin, N-terminal domain
  misc_feature (1)..(324): Homolog of NCBI NO: 3915635 NR Description: Cyclin delta-1 >gi|2995130|emb|CAA58285.1| cyclin
  misc_feature (1)..(324): Homolog of NCBI NO: 15223075 NR Description: Cyclin D1;1; protein id: At1g70210.1 [Arabidopsis
  misc_feature (1)..(324): Homolog of NCBI NO: 1076311 NR Description: cyclin delta-1 - Arabidopsis thaliana
  misc_feature (1)..(319): Homolog of NCBI NO: 25989347 NR Description: cyclin D1 [Helianthus tuberosus]
  misc_feature (1)..(324): Homolog of NCBI NO: 6448480 NR Description: cyclin D1 [Antirrhinum majus]
  misc_feature (1)..(109): Homolog of NCBI NO: 17154787 NR Description: cyclin D1 [Arabidopsis thaliana]
  misc_feature (7)..(302): Homolog of NCBI NO: 25809160 NR Description: cyclin D protein [Physcomitrella patens]
  misc_feature (1)..(290): Homolog of NCBI NO: 1076312 NR Description: cyclin delta-2 - Arabidopsis thaliana
  misc_feature (1)..(290): Homolog of NCBI NO: 15227224 NR Description: Cyclin D2;1; protein id: At2g22490.1 [Arabidopsis
  misc_feature (39)..(303): Homolog of NCBI NO: 7484663 NR Description: cyclin D-like protein - red goosefoot
MSVSFSNDMDLFCGEDSGVFSGESTVDFSSSEVDSWPGDSIACFIEDERHFVPGHDYLSRFQTRSLDASAREDSVAWILKVQAYYNFQPLTAYLAVNYMDRFLYARRLPETSGWPMQLLAVACLSLAAKMEEILVPSLFDFQVAGVKYLFEAKTIKRMELLVLSVLDWRLRSVTPFDFISFFAYKIDPSGTFLGFFISHATEIILSNIKEASFLEYWPSSIAAAAILCVANELPSLSSVVNPHESPETWCDGLSKEKIVRCYRLMKAMAIENNRLNTPKVIAKLRVSVRASSTLTRPSDESSSPCKRRKLSGYSWVGDETSTSN

SEQ ID NO: 76418 - protein, 316 aa, Arabidopsis thaliana
  peptide (1)..(316): Ceres Seq. ID no. 7107894
  misc_feature (31)..(163): Pfam Name: Cyclin, N-terminal domain Pfam Description: Cyclin, N-terminal domain
  misc_feature (1)..(316): Homolog of NCBI NO: 3915635 NR Description: Cyclin delta-1 >gi|2995130|emb|CAA58285.1| cyclin
  misc_feature (1)..(316): Homolog of NCBI NO: 15223075 NR Description: Cyclin D1;1; protein id: At1g70210.1 [Arabidopsis
  misc_feature (1)..(316): Homolog of NCBI NO: 1076311 NR Description: cyclin delta-1 - Arabidopsis thaliana
  misc_feature (1)..(311): Homolog of NCBI NO: 25989347 NR Description: cyclin D1 [Helianthus tuberosus]
  misc_feature (1)..(316): Homolog of NCBI NO: 6448480 NR Description: cyclin D1 [Antirrhinum majus]
  misc_feature (1)..(101): Homolog of NCBI NO: 17154787 NR Description: cyclin D1 [Arabidopsis thaliana]
  misc_feature (1)..(294): Homolog of NCBI NO: 25809160 NR Description: cyclin D protein [Physcomitrella patens]
  misc_feature (1)..(282): Homolog of NCBI NO: 1076312 NR Description: cyclin delta-2 - Arabidopsis thaliana
  misc_feature (1)..(282): Homolog of NCBI NO: 15227224 NR Description: Cyclin D2;1; protein id: At2g22490.1 [Arabidopsis
  misc_feature (31)..(295): Homolog of NCBI NO: 7484663 NR Description: cyclin D-like protein - red goosefoot
MDLFCGEDSGVFSGESTVDFSSSEVDSWPGDSIACFIEDERHFVPGHDYLSRFQTRSLDASAREDSVAWILKVQAYYNFQPLTAYLAVNYMDRFLYARRLPETSGWPMQLLAVACLSLAAKMEEILVPSLFDFQVAGVKYLFEAKTIKRMELLVLSVLDWRLRSVTPFDFISFFAYKIDPSGTFLGFFISHATEIILSNIKEASFLEYWPSSIAAAAILCVANELPSLSSVVNPHESPETWCDGLSKEKIVRCYRLMKAMAIENNRLNTPKVIAKLRVSVRASSTLTRPSDESSSPCKRRKLSGYSWVGDETSTSN

SEQ ID NO: 76419 - DNA, 618 bp, Arabidopsis thaliana
  misc_feature (1)..(618): Ceres Seq. ID no. 7107926
  misc_feature: MA Experiment ID: 108434 Result: Up-regulated in Transcription
  misc_feature: MA Experiment 108434 PARAMETER Experiment Name: At_Root_Tips_cDNA_P Parameter: Tissue Value: Root Tips
  misc_feature: MA Experiment ID: 108573 Result: Down-regulated in Transcription
  misc_feature: MA Experiment 108573 PARAMETER Experiment Name: At_Drought_cDNA_P Parameter: Timepoint (hr) Value: 6
  misc_feature: MA Experiment 108573 PARAMETER Experiment Name: At_Drought_cDNA_P Parameter: Tissue Value: Aerial
  misc_feature: MA Experiment 108573 PARAMETER Experiment Name: At_Drought_cDNA_P Parameter: Treatment Value: Drought vs. No Drought
  misc_feature: MA Experiment ID: 108577 Result: Down-regulated in Transcription
  misc_feature: MA Experiment 108577 PARAMETER Experiment Name: At_42deg_Heat_cDNA_P Parameter: Temperature (deg C) Value: 42 vs. 22
  misc_feature: MA Experiment 108577 PARAMETER Experiment Name: At_42deg_Heat_cDNA_P Parameter: Timepoint (hr) Value: 6
  misc_feature: MA Experiment 108577 PARAMETER Experiment Name: At_42deg_Heat_cDNA_P Parameter: Tissue Value: Aerial
  misc_feature: MA Experiment ID: 20000111 Result: Down-regulated in Transcription
  misc_feature: MA Experiment 20000111 PARAMETER Experiment Name: At_42deg_Heat_cDNA_P Parameter: Temperature (deg C) Value: 42 vs. 22
  misc_feature: MA Experiment 20000111 PARAMETER Experiment Name: At_42deg_Heat_cDNA_P Parameter: Timepoint (hr) Value: 6
  misc_feature: MA Experiment 20000111 PARAMETER Experiment Name: At_42deg_Heat_cDNA_P Parameter: Tissue Value: Aerial
  misc_feature: MA Experiment ID: 20000112 Result: Down-regulated in Transcription
  misc_feature: MA Experiment 20000112 PARAMETER Experiment Name: At_42deg_Heat_cDNA_P Parameter: Temperature (deg C) Value: 42 vs. 22
  misc_feature: MA Experiment 20000112 PARAMETER Experiment Name: At_42deg_Heat_cDNA_P Parameter: Timepoint (hr) Value: 2
  misc_feature: MA Experiment 20000112 PARAMETER Experiment Name: At_42deg_Heat_cDNA_P Parameter: Tissue Value: Aerial
  misc_feature: MA Experiment ID: 20000113 Result: Down-regulated in Transcription
  misc_feature: MA Experiment 20000113 PARAMETER Experiment Name: At_42deg_Heat_cDNA_P Parameter: Temperature (deg C) Value: 42 vs. 22
  misc_feature: MA Experiment 20000113 PARAMETER Experiment Name: At_42deg_Heat_cDNA_P Parameter: Timepoint (hr) Value: 8
  misc_feature: MA Experiment 20000113 PARAMETER Experiment Name: At_42deg_Heat_cDNA_P Parameter: Tissue Value: Aerial
  misc_feature: MA Experiment ID: 20000173 Result: Down-regulated in Transcription
  misc_feature: MA Experiment 20000173 PARAMETER Experiment Name: At_42deg_Heat_P Parameter: Age (day) Value: 14
  misc_feature: MA Experiment 20000173 PARAMETER Experiment Name: At_42deg_Heat_P Parameter: Organism Value: A. thaliana
  misc_feature: MA Experiment 20000173 PARAMETER Experiment Name: At_42deg_Heat_P Parameter: Plant Line Value: WS
  misc_feature: MA Experiment 20000173 PARAMETER Experiment Name: At_42deg_Heat_P Parameter: Temperature (deg C) Value: 42 vs. 22
  misc_feature: MA Experiment 20000173 PARAMETER Experiment Name: At_42deg_Heat_P Parameter: Timepoint (hr) Value: 6
  misc_feature: MA Experiment 20000173 PARAMETER Experiment Name: At_42deg_Heat_P Parameter: Tissue Value: Aerial
  misc_feature: MA Experiment ID: 20000234 Result: Up-regulated in Transcription
  misc_feature: MA Experiment 20000234 PARAMETER Experiment Name: At_Siliques_P Parameter: Age (day) Value: 21
  misc_feature: MA Experiment 20000234 PARAMETER Experiment Name: At_Siliques_P Parameter: Organism Value: A. thaliana
  misc_feature: MA Experiment 20000234 PARAMETER Experiment Name: At_Siliques_P Parameter: Plant Line Value: WS
  misc_feature: MA Experiment 20000234 PARAMETER Experiment Name: At_Siliques_P Parameter: Tissue Value: Less Than 5mm Siliques vs. Whole Plant
  misc_feature: MA Experiment ID: 20000265 Result: Up-regulated in Transcription
  misc_feature: MA Experiment 20000265 PARAMETER Experiment Name: At_Open_Flower_P Parameter: Age (day) Value: 21
  misc_feature: MA Experiment 20000265 PARAMETER Experiment Name: At_Open_Flower_P Parameter: Plant Line Value: WS
  misc_feature: MA Experiment 20000265 PARAMETER Experiment Name: At_Open_Flower_P Parameter: Tissue Value: Closed Flower vs. Whole Plant
  misc_feature: MA Experiment ID: 20000495 Result: Up-regulated in Transcription
  misc_feature: MA Experiment 20000495 PARAMETER Experiment Name: At_Guard_Cells_P Parameter: Harvest Date Value: 8/2/2002
  misc_feature: MA Experiment 20000495 PARAMETER Experiment Name: At_Guard_Cells_P Parameter: Organism Value: A. thaliana
  misc_feature: MA Experiment 20000495 PARAMETER Experiment Name: At_Guard_Cells_P Parameter: Tissue Value: Guard Cells vs. Leaves
  misc_feature: MA Experiment ID: 20001911 Result: Down-regulated in Transcription
  misc_feature: MA Experiment 20001911 PARAMETER Experiment Name: At_Drought_Reproduction_P Parameter: Age (day) Value: 40
  misc_feature: MA Experiment 20001911 PARAMETER Experiment Name: At_Drought_Reproduction_P Parameter: Organism Value: A. thaliana
  misc_feature: MA Experiment 20001911 PARAMETER Experiment Name: At_Drought_Reproduction_P Parameter: Plant Line Value: WS
  misc_feature: MA Experiment 20001911 PARAMETER Experiment Name: At_Drought_Reproduction_P Parameter: Timepoint (day) Value: 10
  misc_feature: MA Experiment 20001911 PARAMETER Experiment Name: At_Drought_Reproduction_P Parameter: Tissue Value: Flowers
  misc_feature: MA Experiment 20001911 PARAMETER Experiment Name: At_Drought_Reproduction_P Parameter: Treatment Value: Drought vs. No Drought
acgatgatgagctctgcatccgccatgaaagctgttggatttttgcttctgcttaccattctaacattagcttatgcgaagaagtcaggtgatgtgacagagttgcagattggtgttaagtacaagcctcagaaatgtgatctccaggctcacaaaggggataagatcaaggttcactatcggggaaagttaactgatggaactgtctttgattcaagttttgagagaggtgaccctattgagtttgagcttggaactggtcaagtcatcccaggatgggaccagggtttattgggagcttgtgtaggtgagaagagaaagttgaaaatcccatccaagcttggttatggtgataacggctcaccaccaaaaatcccgggtggggcgacactgatattcgacaccgagcttgttgctgtgaacggagaaccatccagcgaagcgaaatcaaagaatgagctttgattacaccataattgtttttcatttaaaaggaaaccttgagtagtcatcgatgttggcatttgaatcttaaacagcctagaatcatttactttgctagtcttaaacagcctagaatcatttactttgctagttgaagacaataattatattttg

SEQ ID NO: 76420 - protein, 154 aa, Arabidopsis thaliana
  peptide (1)..(154): Ceres Seq. ID no. 7107927
  misc_feature (44)..(138): Pfam Name: FKBP-type peptidyl-prolyl cis-trans isomerase Pfam Description: FKBP-type peptidyl-prolyl cis-trans isomerase
  misc_feature (2)..(154): Homolog of NCBI NO: 18404471 NR Description: immunophilin (FKBP15-1); protein id: At3g25220.1, by cDNA: 40618., supported by cDNA: gi_1272405, supported by
  misc_feature (9)..(154): Homolog of NCBI NO: 2129622 NR Description: probable peptidylprolyl isomerase (EC 5.2.1.8)
  misc_feature (9)..(154): Homolog of NCBI NO: 21593622 NR Description: immunophilin (FKBP15-1) [Arabidopsis thaliana]
  misc_feature (9)..(148): Homolog of NCBI NO: 38174807 NR Description: putative immunophilin [Hordeum vulgare subsp.
  misc_feature (3)..(145): Homolog of NCBI NO: 15239019 NR Description: FKBP-type peptidyl-prolyl cis-trans isomerase, protein id: At5g48580.1, supported by cDNA: 143222., supported by gi_1272407, supported by cDNA: gi_13877792, supported by cDNA:
  misc_feature (3)..(145): Homolog of NCBI NO: 2129623 NR Description: probable peptidylprolyl isomerase (EC 5.2.1.8)
  misc_feature (13)..(154): Homolog of NCBI NO: 34906954 NR Description: rapamycin-binding protein-like [Oryza sativa
  misc_feature (9)..(154): Homolog of NCBI NO: 23396588 NR Description: FK506-binding protein 2 precursor
  misc_feature (18)..(140): Homolog of NCBI NO: 27694894 NR Description: Similar to FK506 binding protein 2 (13 kDa)
  misc_feature (9)..(140): Homolog of NCBI NO: 6679805 NR Description: FK506 binding protein 2; FK506 binding protein 2
TMMSSASAMKAVGFLLLLTILTLAYAKKSGDVTELQIGVKYKPQKCDLQAHKGDKIKVHYRGKLTDGTVFDSSFERGDPIEFELGTGQVIPGWDQGLLGACVGEKRKLKIPSKLGYGDNGSPPKIPGGATLIFDTELVAVNGEPSSEAKSKNEL

SEQ ID NO: 76421 - protein, 153 aa, Arabidopsis thaliana; identical to SEQ ID NO: 25440
  peptide (1)..(153): Ceres Seq. ID no. 7107928
  misc_feature (43)..(137): Pfam Name: FKBP-type peptidyl-prolyl cis-trans isomerase Pfam Description: FKBP-type peptidyl-prolyl cis-trans isomerase
  misc_feature (1)..(153): Homolog of NCBI NO: 18404471 NR Description: immunophilin (FKBP15-1); protein id: At3g25220.1, by cDNA: 40618., supported by cDNA: gi_1272405, supported by
  misc_feature (8)..(153): Homolog of NCBI NO: 2129622 NR Description: probable peptidylprolyl isomerase (EC 5.2.1.8)
  misc_feature (8)..(153): Homolog of NCBI NO: 21593622 NR Description: immunophilin (FKBP15-1) [Arabidopsis thaliana]
  misc_feature (8)..(147): Homolog of NCBI NO: 38174807 NR Description: putative immunophilin [Hordeum vulgare subsp.
  misc_feature (2)..(144): Homolog of NCBI NO: 15239019 NR Description: FKBP-type peptidyl-prolyl cis-trans isomerase, protein id: At5g48580.1, supported by cDNA: 143222., supported by gi_1272407, supported by cDNA: gi_13877792, supported by cDNA:
  misc_feature (2)..(144): Homolog of NCBI NO: 2129623 NR Description: probable peptidylprolyl isomerase (EC 5.2.1.8)
  misc_feature (12)..(153): Homolog of NCBI NO: 34906954 NR Description: rapamycin-binding protein-like [Oryza sativa
  misc_feature (8)..(153): Homolog of NCBI NO: 23396588 NR Description: FK506-binding protein 2 precursor
  misc_feature (17)..(139): Homolog of NCBI NO: 27694894 NR Description: Similar to FK506 binding protein 2 (13 kDa)
  misc_feature (8)..(139): Homolog of NCBI NO: 6679805 NR Description: FK506 binding protein 2; FK506 binding protein 2

SEQ ID NO: 76422 - protein, 152 aa, Arabidopsis thaliana; identical to SEQ ID NO: 25441
  peptide (1)..(152): Ceres Seq. ID no. 7107929
  misc_feature (42)..(136): Pfam Name: FKBP-type peptidyl-prolyl cis-trans isomerase Pfam Description: FKBP-type peptidyl-prolyl cis-trans isomerase
  misc_feature (1)..(152): Homolog of NCBI NO: 18404471 NR Description: immunophilin (FKBP15-1); protein id: At3g25220.1, by cDNA: 40618., supported by cDNA: gi_1272405, supported by
  misc_feature (7)..(152): Homolog of NCBI NO: 2129622 NR Description: probable peptidylprolyl isomerase (EC 5.2.1.8)
  misc_feature (7)..(152): Homolog of NCBI NO: 21593622 NR Description: immunophilin (FKBP15-1) [Arabidopsis thaliana]
  misc_feature (7)..(146): Homolog of NCBI NO: 38174807 NR Description: putative immunophilin [Hordeum vulgare subsp.
  misc_feature (1)..(143): Homolog of NCBI NO: 15239019 NR Description: FKBP-type peptidyl-prolyl cis-trans isomerase, protein id: At5g48580.1, supported by cDNA: 143222., supported by gi_1272407, supported by cDNA: gi_13877792, supported by cDNA:
  misc_feature (1)..(143): Homolog of NCBI NO: 2129623 NR Description: probable peptidylprolyl isomerase (EC 5.2.1.8)
  misc_feature (11)..(152): Homolog of NCBI NO: 34906954 NR Description: rapamycin-binding protein-like [Oryza sativa
  misc_feature (7)..(152): Homolog of NCBI NO: 23396588 NR Description: FK506-binding protein 2 precursor
  misc_feature (16)..(138): Homolog of NCBI NO: 27694894 NR Description: Similar to FK506 binding protein 2 (13 kDa)
  misc_feature (7)..(138): Homolog of NCBI NO: 6679805 NR Description: FK506 binding protein 2; FK506 binding protein 2

SEQ ID NO: 76423 - DNA, 1262 bp, Arabidopsis thaliana
  misc_feature (1)..(1262): Ceres Seq. ID no. 7107930
  misc_feature: MA Experiment ID: 108461 Result: Down-regulated in Transcription
  misc_feature: MA Experiment 108461 PARAMETER Experiment Name: At_Germinating_Seeds_cDNA_P Parameter: Age (day) Value: 1 vs. 0
  misc_feature: MA Experiment 108461 PARAMETER Experiment Name: At_Germinating_Seeds_cDNA_P Parameter: Tissue Value: Germinating Seeds
  misc_feature: MA Experiment ID: 108462 Result: Down-regulated in Transcription
  misc_feature: MA Experiment 108462 PARAMETER Experiment Name: At_Germinating_Seeds_cDNA_P Parameter: Age (day) Value: 2 vs. 0
  misc_feature: MA Experiment 108462 PARAMETER Experiment Name: At_Germinating_Seeds_cDNA_P Parameter: Tissue Value: Germinating Seeds
  misc_feature: MA Experiment ID: 108594 Result: Down-regulated in Transcription
  misc_feature: MA Experiment 108594 PARAMETER Experiment Name: At_Ler-rhl_Root_cDNA_P Parameter: Plant Line Value: null
  misc_feature: MA Experiment ID: 20000117 Result: Down-regulated in Transcription
  misc_feature: MA Experiment 20000117 PARAMETER Experiment Name: At_100uM_ABA_Mutants_cDNA_P Parameter: Plant Line Value: Columbia
  misc_feature: MA Experiment 20000117 PARAMETER Experiment Name: At_100uM_ABA_Mutants_cDNA_P Parameter: Timepoint (hr) Value: 6
  misc_feature: MA Experiment 20000117 PARAMETER Experiment Name: At_100uM_ABA_Mutants_cDNA_P Parameter: Tissue Value: Aerial
  misc_feature: MA Experiment 20000117 PARAMETER Experiment Name: At_100uM_ABA_Mutants_cDNA_P Parameter: Treatment Value: 100uM ABA vs. No Treatment
  misc_feature: MA Experiment ID: 20000179 Result: Down-regulated in Transcription
  misc_feature: MA Experiment 20000179 PARAMETER Experiment Name: At_Germinating_Seeds_P Parameter: Age (hr) Value: 6 vs. 0
  misc_feature: MA Experiment 20000179 PARAMETER Experiment Name: At_Germinating_Seeds_P Parameter: Tissue Value: Germinating Seeds
  misc_feature: MA Experiment ID: 20000180 Result: Down-regulated in Transcription
  misc_feature: MA Experiment 20000180 PARAMETER Experiment Name: At_Germinating_Seeds_P Parameter: Age (hr) Value: 24 vs. 0
  misc_feature: MA Experiment 20000180 PARAMETER Experiment Name: At_Germinating_Seeds_P Parameter: Tissue Value: Germinating Seeds
  misc_feature: MA Experiment ID: 20000227 Result: Down-regulated in Transcription
  misc_feature: MA Experiment 20000227 PARAMETER Experiment Name: At_Root-Tips-vs-Tops_P Parameter: Tissue Value: Root Tips vs. Root Tops
  misc_feature: MA Experiment ID: 20000234 Result: Down-regulated in Transcription
  misc_feature: MA Experiment 20000234 PARAMETER Experiment Name: At_Siliques_P Parameter: Age (day) Value: 21
  misc_feature: MA Experiment 20000234 PARAMETER Experiment Name: At_Siliques_P Parameter: Organism Value: A. thaliana
  misc_feature: MA Experiment 20000234 PARAMETER Experiment Name: At_Siliques_P Parameter: Plant Line Value: WS
  misc_feature: MA Experiment 20000234 PARAMETER Experiment Name: At_Siliques_P Parameter: Tissue Value: Less Than 5mm Siliques vs. Whole Plant
  misc_feature: MA Experiment ID: 20000264 Result: Down-regulated in Transcription
  misc_feature: MA Experiment 20000264 PARAMETER Experiment Name: At_Open_Flower_P Parameter: Age (day) Value: 21
  misc_feature: MA Experiment 20000264 PARAMETER Experiment Name: At_Open_Flower_P Parameter: Plant Line Value: WS
  misc_feature: MA Experiment 20000264 PARAMETER Experiment Name: At_Open_Flower_P Parameter: Tissue Value: Open Flower vs. Whole Plant
  misc_feature: MA Experiment ID: 20000265 Result: Down-regulated in Transcription
  misc_feature: MA Experiment 20000265 PARAMETER Experiment Name: At_Open_Flower_P Parameter: Age (day) Value: 21
  misc_feature: MA Experiment 20000265 PARAMETER Experiment Name: At_Open_Flower_P Parameter: Plant Line Value: WS
  misc_feature: MA Experiment 20000265 PARAMETER Experiment Name: At_Open_Flower_P Parameter: Tissue Value: Closed Flower vs. Whole Plant
  misc_feature: MA Experiment ID: 20000286 Result: Down-regulated in Transcription
  misc_feature: MA Experiment 20000286 PARAMETER Experiment Name: At_Open_Flower_P Parameter: Age (day) Value: 21
  misc_feature: MA Experiment 20000286 PARAMETER Experiment Name: At_Open_Flower_P Parameter: Plant Line Value: WS
  misc_feature: MA Experiment 20000286 PARAMETER Experiment Name: At_Open_Flower_P Parameter: Tissue Value: Half Open vs. Whole Plant
  misc_feature: MA Experiment ID: 20000438 Result: Down-regulated in Transcription
  misc_feature: MA Experiment 20000438 PARAMETER Experiment Name: At_Shoots__P Parameter: Age (day) Value: 14
  misc_feature: MA Experiment 20000438 PARAMETER Experiment Name: At_Shoots__P Parameter: Tissue Value: Shoots vs. Whole Plant
  misc_feature: MA Experiment ID: 20000794 Result: Down-regulated in Transcription
  misc_feature: MA Experiment 20000794 PARAMETER Experiment Name: At_Petals_P Parameter: Age (day) Value: 23-25 days
  misc_feature: MA Experiment 20000794 PARAMETER Experiment Name: At_Petals_P Parameter: Plant Line Value: WS
  misc_feature: MA Experiment 20000794 PARAMETER Experiment Name: At_Petals_P Parameter: Tissue Value: Petals vs. Whole plant
ctcgagctacgtcaggggtctctttctgtttgtttgttttcttgtttccttctctctctctctttctttctttgtcttcctttcccaggttgtttttttttgctctctctgccttcttgactttcaaaagactctttctttcttttggattgattttggattctagggctctctttcttttagtgggtttttgttgttgttgttgtggtctctctgatgattactgaacttgagatggggaaaggtgagagtgagcttgagcttggtctagggctgagtcttggcggtggaacggcggccaagattggtaaatcaggtggtggtggcgcgtggggagagcgtggaaggcttttgacggctaaggattttccttctgttggttctaaacgtgctgctgattctgcttctcatgctggttcatctcctcctcgttcaagtcaagttgttggatggcctcctatagggtcacacaggatgaacagtttggttaataaccaagctacaaagtcagcaagagaagaagaagaagctggtaagaagaaagtgaaagatgatgaacctaaagatgtgacaaagaaagtgaatgggaaagtacaagttggatttattaaggtgaacatggatggagttgctataggaagaaaagtggatttgaatgctcattcttcttacgagaatttggcgcaaacattggaagatatgttctttcgcactaatccgggtactgtcgggttaaccagtcagttcactaaaccgttgaggcttttagatggatcgtctgagtttgtacttacttatgaagataaggaaggagattggatgcttgttggtgatgttccatggagaatgttcatcaactcggtgaaaaggctacgtgtgatgaaaacctctgaagctaatggactcgctgcacgaaatcaagaaccaaacgagagacagcgaaagcagccggtttagatctcttttcgacgttacggtgttacaggttttatattttggggttttgcaagtctgagatacttctgaagcaagcataagctagattgatcttatatccagtttgtgtattttcttggttcttataatggtttttactggttttctttagtttttttttttgctgtcttttaattttcggttgcgatttcactatatactatggatggaagagaatgctctttatatcttttactacactgtaaatatttgaagcttatctaatatcgtttttaagggttaaaaaaccctgacgtagcctcgag

SEQ ID NO: 76424 - protein, 246 aa, Arabidopsis thaliana; identical to SEQ ID NO: 29294
  peptide (1)..(246): Ceres Seq. ID no. 7107931
  misc_feature (15)..(234): Pfam Name: AUX/IAA family Pfam Description: AUX/IAA family
  misc_feature (1)..(246): Homolog of NCBI NO: 15225833 NR Description: auxin regulated protein (IAA13); protein id: supported by cDNA: 13741., supported by cDNA: gi_12083207,
  misc_feature (1)..(246): Homolog of NCBI NO: 30685642 NR Description: auxin-responsive protein IAA13 (Indoleacetic protein 13) [Arabidopsis thaliana] >gi|29028860|gb|AAO64809.1|
  misc_feature (2)..(246): Homolog of NCBI NO: 21593621 NR Description: putative auxin-induced protein, IAA12
  misc_feature (2)..(246): Homolog of NCBI NO: 15219761 NR Description: putative auxin-induced protein, IAA12; protein At1g04550.1, supported by cDNA: 40608., supported by cDNA: supported by cDNA: gi_17529011, supported by cDNA: gi_20465450,
  misc_feature (2)..(164): Homolog of NCBI NO: 30678907 NR Description: auxin-responsive protein IAA12 (Indoleacetic
  misc_feature (53)..(230): Homolog of NCBI NO: 20269057 NR Description: aux/IAA protein [Populus tremula x Populus
  misc_feature (12)..(231): Homolog of NCBI NO: 15235385 NR Description: early auxin-inducible protein 11 (IAA11); protein At4g28640.1, supported by cDNA: gi_12083203, supported by cDNA:
  misc_feature (12)..(231): Homolog of NCBI NO: 20466408 NR Description: early auxin-inducible protein 11 [Arabidopsis
  misc_feature (11)..(230): Homolog of NCBI NO: 15219646 NR Description: putative IAA1 protein; protein id: At1g04100.1, by cDNA: gi_12083201, supported by cDNA: gi_972922 [Arabidopsis
  misc_feature (56)..(243): Homolog of NCBI NO: 21594025 NR Description: auxin regulated protein IAA18, putative

SEQ ID NO: 76425 - protein, 240 aa, Arabidopsis thaliana; identical to SEQ ID NO: 29295
  peptide (1)..(240): Ceres Seq. ID no. 7107932
  misc_feature (9)..(228): Pfam Name: AUX/IAA family Pfam Description: AUX/IAA family
  misc_feature (1)..(240): Homolog of NCBI NO: 15225833 NR Description: auxin regulated protein (IAA13); protein id: supported by cDNA: 13741., supported by cDNA: gi_12083207,
  misc_feature (1)..(240): Homolog of NCBI NO: 30685642 NR Description: auxin-responsive protein IAA13 (Indoleacetic protein 13) [Arabidopsis thaliana] >gi|29028860|gb|AAO64809.1|
  misc_feature (1)..(240): Homolog of NCBI NO: 21593621 NR Description: putative auxin-induced protein, IAA12
  misc_feature (1)..(240): Homolog of NCBI NO: 15219761 NR Description: putative auxin-induced protein, IAA12; protein At1g04550.1, supported by cDNA: 40608., supported by cDNA: supported by cDNA: gi_17529011, supported by cDNA: gi_20465450,
  misc_feature (1)..(158): Homolog of NCBI NO: 30678907 NR Description: auxin-responsive protein IAA12 (Indoleacetic
  misc_feature (47)..(224): Homolog of NCBI NO: 20269057 NR Description: aux/IAA protein [Populus tremula x Populus
  misc_feature (6)..(225): Homolog of NCBI NO: 15235385 NR Description: early auxin-inducible protein 11 (IAA11); protein At4g28640.1, supported by cDNA: gi_12083203, supported by cDNA:
  misc_feature (6)..(225): Homolog of NCBI NO: 20466408 NR Description: early auxin-inducible protein 11 [Arabidopsis
  misc_feature (5)..(224): Homolog of NCBI NO: 15219646 NR Description: putative IAA1 protein; protein id: At1g04100.1, by cDNA: gi_12083201, supported by cDNA: gi_972922 [Arabidopsis
  misc_feature (50)..(237): Homolog of NCBI NO: 21594025 NR Description: auxin regulated protein IAA18, putative

SEQ ID NO: 76426 - protein, 160 aa, Arabidopsis thaliana; identical to SEQ ID NO: 29296
  peptide (1)..(160): Ceres Seq. ID no. 7107933
  misc_feature (1)..(148): Pfam Name: AUX/IAA family Pfam Description: AUX/IAA family
  misc_feature (1)..(160): Homolog of NCBI NO: 15225833 NR Description: auxin regulated protein (IAA13); protein id: supported by cDNA: 13741., supported by cDNA: gi_12083207,
  misc_feature (1)..(160): Homolog of NCBI NO: 30685642 NR Description: auxin-responsive protein IAA13 (Indoleacetic protein 13) [Arabidopsis thaliana] >gi|29028860|gb|AAO64809.1|
  misc_feature (1)..(160): Homolog of NCBI NO: 21593621 NR Description: putative auxin-induced protein, IAA12
  misc_feature (1)..(160): Homolog of NCBI NO: 15219761 NR Description: putative auxin-induced protein, IAA12; protein At1g04550.1, supported by cDNA: 40608., supported by cDNA: supported by cDNA: gi_17529011, supported by cDNA: gi_20465450,
  misc_feature (1)..(78): Homolog of NCBI NO: 30678907 NR Description: auxin-responsive protein IAA12 (Indoleacetic
  misc_feature (1)..(144): Homolog of NCBI NO: 20269057 NR Description: aux/IAA protein [Populus tremula x Populus
  misc_feature (1)..(145): Homolog of NCBI NO: 15235385 NR Description: early auxin-inducible protein 11 (IAA11); protein At4g28640.1, supported by cDNA: gi_12083203, supported by cDNA:
  misc_feature (1)..(145): Homolog of NCBI NO: 20466408 NR Description: early auxin-inducible protein 11 [Arabidopsis
  misc_feature (1)..(144): Homolog of NCBI NO: 15219646 NR Description: putative IAA1 protein; protein id: At1g04100.1, by cDNA: gi_12083201, supported by cDNA: gi_972922 [Arabidopsis
  misc_feature (1)..(157): Homolog of NCBI NO: 21594025 NR Description: auxin regulated protein IAA18, putative

SEQ ID NO: 76427 - DNA, 1215 bp, Arabidopsis thaliana
  misc_feature (1)..(1215): Ceres Seq. ID no. 7107938
  misc_feature: MA Experiment ID: 20000794 Result: Up-regulated in Transcription
  misc_feature: MA Experiment 20000794 PARAMETER Experiment Name: At_Petals_P Parameter: Age (day) Value: 23-25 days
  misc_feature: MA Experiment 20000794 PARAMETER Experiment Name: At_Petals_P Parameter: Plant Line Value: WS
  misc_feature: MA Experiment 20000794 PARAMETER Experiment Name: At_Petals_P Parameter: Tissue Value: Petals vs. Whole plant
cagtgtgagtaatttagcaagaacataaatatcttaaactcatgtctgaatgtggatgtttttcggcaacaactatgttgagaatttgtgtagtattgataatatgtttgcatatgtgttgtgcctcgagtgattgtacaagtcacgatgatcctgtgtctcaagacgaagcagagaaagcgacgaagctaaagcttggttcgatagctttacttcttgtagccggaggagtcggcgtgagtctaccgttgatcgggaaaaggattccggcgttacaaccggaaaatgatatcttcttcatggtgaaagcttttgctgcaggagtgatcctctgcacaggtttcgttcatatcttaccagacgcgttcgagagattgagctctccatgtcttgaggacactacagctgggaagttcccgtttgctggttttgtagcgatgctgtcggcgatggggactcttatgatcgacacattcgcgacagggtattacaagaggcaacattttagcaataaccatgggagcaagcaagtgaacgtagtagtagatgaagaagagcatgcgggtcatgttcacattcacacgcacgctagtcacggacacacacatggttcgaccgagttgatcagaagacgtatagtgtcgcaggtgcttgagattgggatagttgtgcattcggttattatagggatatcacttggagcttcacagagcatagacaccataaagccactcatggctgcactatctttccatcagttctttgaaggtcttggcctcggtggatgcatctccctggcggatatgaagtcgaaatcgacagtgctaatggcgacatttttctcggtgacggcgccacttgggataggaatagggttggggatgtcaagtggtttaggctacaggaaagagagcaaagaggcaataatggtggaaggaatgttgaatgctgcatctgctgggatactcatatacatgtcacttgttgatcttcttgctactgattttatgaatccaagattgcaatccaatctctggcttcacttggctgcttatctctctctcgtcctaggcgcaggttccatgtctctcctcgccatctgggcctgattcttgatctgaaactaacaaacaaacaaaccaaatgccgctcttttttctcaaatctgtaatggtgtttctaatctcagaatcaatactattctatcttgaacac

SEQ ID NO: 76428 - protein, 355 aa, Arabidopsis thaliana; identical to SEQ ID NO: 36342
  peptide (1)..(355): Ceres Seq. ID no. 7107939
  misc_feature (48)..(352): Pfam Name: ZIP Zinc transporter Pfam Description: ZIP Zinc transporter
  misc_feature (1)..(355): Homolog of NCBI NO: 15230588 NR Description: putative zinc transporter; protein id: supported by cDNA: gi_3252865 [Arabidopsis thaliana]

SEQ ID NO: 76429 - protein, 344 aa, Arabidopsis thaliana; identical to SEQ ID NO: 36343
  peptide (1)..(344): Ceres Seq. ID no. 7107940
  misc_feature (37)..(341): Pfam Name: ZIP Zinc transporter Pfam Description: ZIP Zinc transporter
  misc_feature (1)..(344): Homolog of NCBI NO: 15230588 NR Description: putative zinc transporter; protein id: supported by cDNA: gi_3252865 [Arabidopsis thaliana]

SEQ ID NO: 76430 - protein, 331 aa, Arabidopsis thaliana; identical to SEQ ID NO: 36344
  peptide (1)..(331): Ceres Seq. ID no. 7107941
  misc_feature (24)..(328): Pfam Name: ZIP Zinc transporter Pfam Description: ZIP Zinc transporter
  misc_feature (1)..(331): Homolog of NCBI NO: 15230588 NR Description: putative zinc transporter; protein id: supported by cDNA: gi_3252865 [Arabidopsis thaliana]

SEQ ID NO: 76431 - DNA, 803 bp, Arabidopsis thaliana
  misc_feature (1)..(803): Ceres Seq. ID no. 7107948
  misc_feature: MA Experiment ID: 20000166 Result: Up-regulated in Transcription
  misc_feature: MA Experiment 20000166 PARAMETER Experiment Name: At_100uM_ABA_P Parameter: Age (day) Value: 14
  misc_feature: MA Experiment 20000166 PARAMETER Experiment Name: At_100uM_ABA_P Parameter: Organism Value: A. thaliana
  misc_feature: MA Experiment 20000166 PARAMETER Experiment Name: At_100uM_ABA_P Parameter: Plant Line Value: WS
  misc_feature: MA Experiment 20000166 PARAMETER Experiment Name: At_100uM_ABA_P Parameter: Timepoint (hr) Value: 1
  misc_feature: MA Experiment 20000166 PARAMETER Experiment Name: At_100uM_ABA_P Parameter: Tissue Value: Aerial
  misc_feature: MA Experiment 20000166 PARAMETER Experiment Name: At_100uM_ABA_P Parameter: Treatment Value: 100uM ABA vs. No Treatment
  misc_feature: MA Experiment ID: 20000182 Result: Up-regulated in Transcription
  misc_feature: MA Experiment 20000182 PARAMETER Experiment Name: At_2mM_SA_P Parameter: Age (day) Value: 14
  misc_feature: MA Experiment 20000182 PARAMETER Experiment Name: At_2mM_SA_P Parameter: Organism Value: A. thaliana
  misc_feature: MA Experiment 20000182 PARAMETER Experiment Name: At_2mM_SA_P Parameter: Plant Line Value: WS
  misc_feature: MA Experiment 20000182 PARAMETER Experiment Name: At_2mM_SA_P Parameter: Timepoint (hr) Value: 6
  misc_feature: MA Experiment 20000182 PARAMETER Experiment Name: At_2mM_SA_P Parameter: Tissue Value: Aerial
  misc_feature: MA Experiment 20000182 PARAMETER Experiment Name: At_2mM_SA_P Parameter: Treatment Value: 2mM SA vs. No Treatment
  misc_feature: MA Experiment ID: 20000184 Result: Down-regulated in Transcription
  misc_feature: MA Experiment 20000184 PARAMETER Experiment Name: At_Shoots__P Parameter: Age (day) Value: 7
  misc_feature: MA Experiment 20000184 PARAMETER Experiment Name: At_Shoots__P Parameter: Tissue Value: Shoots vs. Whole Plant
  misc_feature: MA Experiment ID: 20000213 Result: Up-regulated in Transcription
  misc_feature: MA Experiment 20000213 PARAMETER Experiment Name: At_4deg_Cold_P Parameter: Timepoint (hr) Value: 2
  misc_feature: MA Experiment ID: 20000264 Result: Up-regulated in Transcription
  misc_feature: MA Experiment 20000264 PARAMETER Experiment Name: At_Open_Flower_P Parameter: Age (day) Value: 21
  misc_feature: MA Experiment 20000264 PARAMETER Experiment Name: At_Open_Flower_P Parameter: Plant Line Value: WS
  misc_feature: MA Experiment 20000264 PARAMETER Experiment Name: At_Open_Flower_P Parameter: Tissue Value: Open Flower vs. Whole Plant
  misc_feature: MA Experiment ID: 20000437 Result: Up-regulated in Transcription
  misc_feature: MA Experiment 20000437 PARAMETER Experiment Name: At_Drought_P Parameter: Age (day) Value: 8
  misc_feature: MA Experiment 20000437 PARAMETER Experiment Name: At_Drought_P Parameter: Organism Value: A. thaliana
  misc_feature: MA Experiment 20000437 PARAMETER Experiment Name: At_Drought_P Parameter: Plant Line Value: WS
  misc_feature: MA Experiment 20000437 PARAMETER Experiment Name: At_Drought_P Parameter: Timepoint (hr) Value: 24
  misc_feature: MA Experiment 20000437 PARAMETER Experiment Name: At_Drought_P Parameter: Tissue Value: Whole Plant
  misc_feature: MA Experiment 20000437 PARAMETER Experiment Name: At_Drought_P Parameter: Treatment Value: Drought vs. No Drought
  misc_feature: MA Experiment ID: 20000439 Result: Up-regulated in Transcription
  misc_feature: MA Experiment 20000439 PARAMETER Experiment Name: At_Roots__P Parameter: Age (day) Value: 14 vs. 21
  misc_feature: MA Experiment 20000439 PARAMETER Experiment Name: At_Roots__P Parameter: Organism Value: A. thaliana
  misc_feature: MA Experiment 20000439 PARAMETER Experiment Name: At_Roots__P Parameter: Tissue Value: Roots vs. Whole Plant
  misc_feature: MA Experiment ID: 20000794 Result: Up-regulated in Transcription
  misc_feature: MA Experiment 20000794 PARAMETER Experiment Name: At_Petals_P Parameter: Age (day) Value: 23-25 days
  misc_feature: MA Experiment 20000794 PARAMETER Experiment Name: At_Petals_P Parameter: Plant Line Value: WS
  misc_feature: MA Experiment 20000794 PARAMETER Experiment Name: At_Petals_P Parameter: Tissue Value: Petals vs. Whole plant
  misc_feature: MA Experiment ID: 20001450 Result: Down-regulated in Transcription
  misc_feature: MA Experiment 20001450 PARAMETER Experiment Name: At_Far-red-induction_P Parameter: Age (day) Value: 7
  misc_feature: MA Experiment 20001450 PARAMETER Experiment Name: At_Far-red-induction_P Parameter: Light Value: Far-red vs. White
  misc_feature: MA Experiment 20001450 PARAMETER Experiment Name: At_Far-red-induction_P Parameter: Organism Value: A. thaliana
  misc_feature: MA Experiment 20001450 PARAMETER Experiment Name: At_Far-red-induction_P Parameter: Plant Line Value: Columbia
  misc_feature: MA Experiment 20001450 PARAMETER Experiment Name: At_Far-red-induction_P Parameter: Timepoint (hr) Value: 8
  misc_feature: MA Experiment 20001450 PARAMETER Experiment Name: At_Far-red-induction_P Parameter: Tissue Value: Whole Plant
  misc_feature: MA Experiment ID: 20001451 Result: Down-regulated in Transcription
  misc_feature: MA Experiment 20001451 PARAMETER Experiment Name: At_Far-red-induction_P Parameter: Age (day) Value: 7
  misc_feature: MA Experiment 20001451 PARAMETER Experiment Name: At_Far-red-induction_P Parameter: Light Value: Far-red vs. White
  misc_feature: MA Experiment 20001451 PARAMETER Experiment Name: At_Far-red-induction_P Parameter: Organism Value: A. thaliana
  misc_feature: MA Experiment 20001451 PARAMETER Experiment Name: At_Far-red-induction_P Parameter: Plant Line Value: Columbia
  misc_feature: MA Experiment 20001451 PARAMETER Experiment Name: At_Far-red-induction_P Parameter: Timepoint (hr) Value: 24
  misc_feature: MA Experiment 20001451 PARAMETER Experiment Name: At_Far-red-induction_P Parameter: Tissue Value: Whole Plant
cgcccgggcaggtaaacgattcgattctgcgaaaccacttttcaattctcatcggattatttctcttccaatttctacaacgggagctaaactatctagatcggagcattcaatggctgcttcttccgaacccaaatctctttacgatttcaccgtcaaggatgctaagggaaacgatgttgatctaagcatctacaaagggaaggttcttttgattgtgaacgttgcttctcaatgtggcttgactaattcgaattatactgagcttgcgcagctgtatgagaagtacaaaggccatggtttcgagattcttgcgtttccgtgtaaccagtttgggaatcaagagcctggtactaatgaagagattgttcagtttgcttgtactcgtttcaaggctgagtacccgattttcgacaaggttgatgttaacggtgacaaagctgccccagtctacaagtttctgaaatcaagcaaaggcgggctctttggagacggcattaagtggaacttcgcaaagttcttggttgacaaagatggaaatgttgtcgatcgtttcgcaccaactacctcacctctcagcattgagaaggatgtgaagaagttgttgggagttactgcttaagcaaggcaagattgcataattagacaaataaaagctcattagtattgtattaccaatactgtgtagtaagctgagttcgtgagtgtgtgcctttgggaccgcgtacaattataatccgttttttagcggccaaactatgtaataatcgtagatctaaatatcagattttccgttaccttac

SEQ ID NO: 76432 - protein, 206 aa, Arabidopsis thaliana
  peptide (1)..(206): Ceres Seq. ID no. 7107949
  misc_feature (46)..(155): Pfam Name: Glutathione peroxidase Pfam Description: Glutathione peroxidase
  misc_feature (3)..(206): Homolog of NCBI NO: 30681827 NR Description: glutathione peroxidase, putative [Arabidopsis >gi|14532478|gb|AAK63967.1| AT4g11600/T5C23_30 [Arabidopsis >gi|18655355|gb|AAL76133.1| AT4g11600/T5C23_30 [Arabidopsis
  misc_feature (38)..(206): Homolog of NCBI NO: 20138157 NR Description: Probable phospholipid hydroperoxide glutathione
  misc_feature (28)..(202): Homolog of NCBI NO: 6179600 NR Description: GPX12Hv, glutathione peroxidase-like protein
  misc_feature (39)..(202): Homolog of NCBI NO: 27544804 NR Description: phospholipid hydroperoxide glutathione
  misc_feature (38)..(203): Homolog of NCBI NO: 22268405 NR Description: putative glutathione peroxidase [Zea mays]
  misc_feature (40)..(204): Homolog of NCBI NO: 20138151 NR Description: Probable phospholipid hydroperoxide glutathione
  misc_feature (38)..(203): Homolog of NCBI NO: 34334012 NR Description: cytosolic glutathione peroxidase [Triticum
  misc_feature (38)..(203): Homolog of NCBI NO: 21360380 NR Description: glutathione peroxidase 1 [Oryza sativa]
  misc_feature (38)..(202): Homolog of NCBI NO: 6179604 NR Description: glutathione peroxidase-like protein GPX54Hv
  misc_feature (38)..(205): Homolog of NCBI NO: 20138384 NR Description: Probable phospholipid hydroperoxide glutathione (PHGPx) >gi|8919668|emb|CAB96145.1| phospholipid hydroperoxide
ARAGKRFDSAKPLFNSHRIISLPISTTGAKLSRSEHSMAASSEPKSLYDFTVKDAKGNDVDLSIYKGKVLLIVNVASQCGLTNSNYTELAQLYEKYKGHGFEILAFPCNQFGNQEPGTNEEIVQFACTRFKAEYPIFDKVDVNGDKAAPVYKFLKSSKGGLFGDGIKWNFAKFLVDKDGNVVDRFAPTTSPLSIEKDVKKLLGVTA

SEQ ID NO: 76433 - protein, 169 aa, Arabidopsis thaliana; identical to SEQ ID NO: 28163
  peptide (1)..(169): Ceres Seq. ID no. 7107950
  misc_feature (9)..(118): Pfam Name: Glutathione peroxidase Pfam Description: Glutathione peroxidase
  misc_feature (1)..(169): Homolog of NCBI NO: 30681827 NR Description: glutathione peroxidase, putative [Arabidopsis >gi|14532478|gb|AAK63967.1| AT4g11600/T5C23_30 [Arabidopsis >gi|18655355|gb|AAL76133.1| AT4g11600/T5C23_30 [Arabidopsis
  misc_feature (1)..(169): Homolog of NCBI NO: 20138157 NR Description: Probable phospholipid hydroperoxide glutathione
  misc_feature (1)..(165): Homolog of NCBI NO: 6179600 NR Description: GPX12Hv, glutathione peroxidase-like protein
  misc_feature (2)..(165): Homolog of NCBI NO: 27544804 NR Description: phospholipid hydroperoxide glutathione
  misc_feature (1)..(166): Homolog of NCBI NO: 22268405 NR Description: putative glutathione peroxidase [Zea mays]
  misc_feature (3)..(167): Homolog of NCBI NO: 20138151 NR Description: Probable phospholipid hydroperoxide glutathione
  misc_feature (1)..(166): Homolog of NCBI NO: 34334012 NR Description: cytosolic glutathione peroxidase [Triticum
  misc_feature (1)..(166): Homolog of NCBI NO: 21360380 NR Description: glutathione peroxidase 1 [Oryza sativa]
  misc_feature (1)..(165): Homolog of NCBI NO: 6179604 NR Description: glutathione peroxidase-like protein GPX54Hv
  misc_feature (1)..(168): Homolog of NCBI NO: 20138384 NR Description: Probable phospholipid hydroperoxide glutathione (PHGPx) >gi|8919668|emb|CAB96145.1| phospholipid hydroperoxide

SEQ ID NO: 76434 - DNA, 1409 bp, Arabidopsis thaliana
  misc_feature (1)..(1409): Ceres Seq. ID no. 7107951
  misc_feature: MA Experiment ID: 108434 Result: Down-regulated in Transcription
  misc_feature: MA Experiment 108434 PARAMETER Experiment Name: At_Root_Tips_cDNA_P Parameter: Tissue Value: Root Tips
  misc_feature: MA Experiment ID: 108461 Result: Up-regulated in Transcription
  misc_feature: MA Experiment 108461 PARAMETER Experiment Name: At_Germinating_Seeds_cDNA_P Parameter: Age (day) Value: 1 vs. 0
  misc_feature: MA Experiment 108461 PARAMETER Experiment Name: At_Germinating_Seeds_cDNA_P Parameter: Tissue Value: Germinating Seeds
  misc_feature: MA Experiment ID: 108462 Result: Up-regulated in Transcription
  misc_feature: MA Experiment 108462 PARAMETER Experiment Name: At_Germinating_Seeds_cDNA_P Parameter: Age (day) Value: 2 vs. 0
  misc_feature: MA Experiment 108462 PARAMETER Experiment Name: At_Germinating_Seeds_cDNA_P Parameter: Tissue Value: Germinating Seeds
  misc_feature: MA Experiment ID: 108463 Result: Up-regulated in Transcription
  misc_feature: MA Experiment 108463 PARAMETER Experiment Name: At_Germinating_Seeds_cDNA_P Parameter: Age (day) Value: 3 vs. 0
  misc_feature: MA Experiment 108463 PARAMETER Experiment Name: At_Germinating_Seeds_cDNA_P Parameter: Tissue Value: Germinating Seeds
  misc_feature: MA Experiment ID: 108464 Result: Up-regulated in Transcription
  misc_feature: MA Experiment 108464 PARAMETER Experiment Name: At_Germinating_Seeds_cDNA_P Parameter: Age (day) Value: 4 vs. 0
  misc_feature: MA Experiment 108464 PARAMETER Experiment Name: At_Germinating_Seeds_cDNA_P Parameter: Tissue Value: Germinating Seeds
  misc_feature: MA Experiment ID: 108605 Result: Down-regulated in Transcription
  misc_feature: MA Experiment 108605 PARAMETER Experiment Name: At_100uM_ABA_cDNA_P Parameter: Timepoint (hr) Value: 6
  misc_feature: MA Experiment 108605 PARAMETER Experiment Name: At_100uM_ABA_cDNA_P Parameter: Tissue Value: Aerial
  misc_feature: MA Experiment 108605 PARAMETER Experiment Name: At_100uM_ABA_cDNA_P Parameter: Treatment Value: 100uM ABA vs. No Treatment
  misc_feature: MA Experiment ID: 108607 Result: Down-regulated in Transcription
  misc_feature: MA Experiment 108607 PARAMETER Experiment Name: At_100uM_ABA_cDNA_P Parameter: Timepoint (hr) Value: 4
  misc_feature: MA Experiment 108607 PARAMETER Experiment Name: At_100uM_ABA_cDNA_P Parameter: Tissue Value: Aerial
  misc_feature: MA Experiment 108607 PARAMETER Experiment Name: At_100uM_ABA_cDNA_P Parameter: Treatment Value: 100uM ABA vs. No Treatment
  misc_feature: MA Experiment ID: 20000071 Result: Down-regulated in Transcription
  misc_feature: MA Experiment 20000071 PARAMETER Experiment Name: At_100uM_ABA_Mutants_cDNA_P Parameter: Plant Line Value: CS8104
  misc_feature: MA Experiment 20000071 PARAMETER Experiment Name: At_100uM_ABA_Mutants_cDNA_P Parameter: Timepoint (hr) Value: 6
  misc_feature: MA Experiment 20000071 PARAMETER Experiment Name: At_100uM_ABA_Mutants_cDNA_P Parameter: Tissue Value: Aerial
  misc_feature: MA Experiment 20000071 PARAMETER Experiment Name: At_100uM_ABA_Mutants_cDNA_P Parameter: Treatment Value: 100uM ABA vs. No Treatment
  misc_feature: MA Experiment ID: 20000117 Result: Down-regulated in Transcription
  misc_feature: MA Experiment 20000117 PARAMETER Experiment Name: At_100uM_ABA_Mutants_cDNA_P Parameter: Plant Line Value: Columbia
  misc_feature: MA Experiment 20000117 PARAMETER Experiment Name: At_100uM_ABA_Mutants_cDNA_P Parameter: Timepoint (hr) Value: 6
  misc_feature: MA Experiment 20000117 PARAMETER Experiment Name: At_100uM_ABA_Mutants_cDNA_P Parameter: Tissue Value: Aerial
  misc_feature: MA Experiment 20000117 PARAMETER Experiment Name: At_100uM_ABA_Mutants_cDNA_P Parameter: Treatment Value: 100uM ABA vs. No Treatment
  misc_feature: MA Experiment ID: 20000169 Result: Down-regulated in Transcription
  misc_feature: MA Experiment 20000169 PARAMETER Experiment Name: At_100uM_ABA_P Parameter: Age (day) Value: 14
  misc_feature: MA Experiment 20000169 PARAMETER Experiment Name: At_100uM_ABA_P Parameter: Organism Value: A. thaliana
  misc_feature: MA Experiment 20000169 PARAMETER Experiment Name: At_100uM_ABA_P Parameter: Plant Line Value: WS
  misc_feature: MA Experiment 20000169 PARAMETER Experiment Name: At_100uM_ABA_P Parameter: Timepoint (hr) Value: 6
  misc_feature: MA Experiment 20000169 PARAMETER Experiment Name: At_100uM_ABA_P Parameter: Tissue Value: Aerial
  misc_feature: MA Experiment 20000169 PARAMETER Experiment Name: At_100uM_ABA_P Parameter: Treatment Value: 100uM ABA vs. No Treatment
  misc_feature: MA Experiment ID: 20000180 Result: Up-regulated in Transcription
  misc_feature: MA Experiment 20000180 PARAMETER Experiment Name: At_Germinating_Seeds_P Parameter: Age (hr) Value: 24 vs. 0
  misc_feature: MA Experiment 20000180 PARAMETER Experiment Name: At_Germinating_Seeds_P Parameter: Tissue Value: Germinating Seeds
  misc_feature: MA Experiment ID: 20000224 Result: Up-regulated in Transcription
  misc_feature: MA Experiment ID: 20000264 Result: Up-regulated in Transcription
  misc_feature: MA Experiment 20000264 PARAMETER Experiment Name: At_Open_Flower_P Parameter: Age (day) Value: 21
  misc_feature: MA Experiment 20000264 PARAMETER Experiment Name: At_Open_Flower_P Parameter: Plant Line Value: WS
  misc_feature: MA Experiment 20000264 PARAMETER Experiment Name: At_Open_Flower_P Parameter: Tissue Value: Open Flower vs. Whole Plant
  misc_feature: MA Experiment ID: 20000267 Result: Down-regulated in Transcription
  misc_feature: MA Experiment 20000267 PARAMETER Experiment Name: At_Drought_P Parameter: Age (day) Value: 7
  misc_feature: MA Experiment 20000267 PARAMETER Experiment Name: At_Drought_P Parameter: Organism Value: A. thaliana
  misc_feature: MA Experiment 20000267 PARAMETER Experiment Name: At_Drought_P Parameter: Plant Line Value: WS
  misc_feature: MA Experiment 20000267 PARAMETER Experiment Name: At_Drought_P Parameter: Timepoint (hr) Value: 6
  misc_feature: MA Experiment 20000267 PARAMETER Experiment Name: At_Drought_P Parameter: Tissue Value: Whole Plant
  misc_feature: MA Experiment 20000267 PARAMETER Experiment Name: At_Drought_P Parameter: Treatment Value: Drought vs. No Drought
  misc_feature: MA Experiment ID: 20000436 Result: Down-regulated in Transcription
  misc_feature: MA Experiment 20000436 PARAMETER Experiment Name: At_Drought_P Parameter: Age (day) Value: 7
  misc_feature: MA Experiment 20000436 PARAMETER Experiment Name: At_Drought_P Parameter: Organism Value: A. thaliana
  misc_feature: MA Experiment 20000436 PARAMETER Experiment Name: At_Drought_P Parameter: Plant Line Value: WS
  misc_feature: MA Experiment 20000436 PARAMETER Experiment Name: At_Drought_P Parameter: Timepoint (hr) Value: 12
  misc_feature: MA Experiment 20000436 PARAMETER Experiment Name: At_Drought_P Parameter: Tissue Value: Whole Plant
  misc_feature: MA Experiment 20000436 PARAMETER Experiment Name: At_Drought_P Parameter: Treatment Value: Drought vs. No Drought
  misc_feature: MA Experiment ID: 20000437 Result: Down-regulated in Transcription
  misc_feature: MA Experiment 20000437 PARAMETER Experiment Name: At_Drought_P Parameter: Age (day) Value: 8
  misc_feature: MA Experiment 20000437 PARAMETER Experiment Name: At_Drought_P Parameter: Organism Value: A. thaliana
  misc_feature: MA Experiment 20000437 PARAMETER Experiment Name: At_Drought_P Parameter: Plant Line Value: WS
  misc_feature: MA Experiment 20000437 PARAMETER Experiment Name: At_Drought_P Parameter: Timepoint (hr) Value: 24
  misc_feature: MA Experiment 20000437 PARAMETER Experiment Name: At_Drought_P Parameter: Tissue Value: Whole Plant
  misc_feature: MA Experiment 20000437 PARAMETER Experiment Name: At_Drought_P Parameter: Treatment Value: Drought vs. No Drought
  misc_feature: MA Experiment ID: 20000438 Result: Up-regulated in Transcription
  misc_feature: MA Experiment 20000438 PARAMETER Experiment Name: At_Shoots__P Parameter: Age (day) Value: 14
  misc_feature: MA Experiment 20000438 PARAMETER Experiment Name: At_Shoots__P Parameter: Tissue Value: Shoots vs. Whole Plant
  misc_feature: MA Experiment ID: 20000441 Result: Up-regulated in Transcription
  misc_feature: MA Experiment 20000441 PARAMETER Experiment Name: At_1uM_BR-BRZ__P Parameter: Tissue Value: Shoot Apices
  misc_feature: MA Experiment 20000441 PARAMETER Experiment Name: At_1uM_BR-BRZ__P Parameter: Treatment Value: 1uM BR vs. No Treatment
  misc_feature: MA Experiment ID: 20000443 Result: Up-regulated in Transcription
  misc_feature: MA Experiment 20000443 PARAMETER Experiment Name: At_1uM_BR-BRZ__P Parameter: Tissue Value: Shoot Apices
  misc_feature: MA Experiment 20000443 PARAMETER Experiment Name: At_1uM_BR-BRZ__P Parameter: Treatment Value: 1uM BRZ vs. No Treatment
  misc_feature: MA Experiment ID: 20000496 Result: Down-regulated in Transcription
  misc_feature: MA Experiment 20000496 PARAMETER Experiment Name: At_Guard_Cells_P Parameter: Harvest Date Value: 7/19/2002
  misc_feature: MA Experiment 20000496 PARAMETER Experiment Name: At_Guard_Cells_P Parameter: Organism Value: Canola
  misc_feature: MA Experiment 20000496 PARAMETER Experiment Name: At_Guard_Cells_P Parameter: Tissue Value: Guard Cells vs. Leaves
  misc_feature: MA Experiment ID: 20000794 Result: Up-regulated in Transcription
  misc_feature: MA Experiment 20000794 PARAMETER Experiment Name: At_Petals_P Parameter: Age (day) Value: 23-25 days
  misc_feature: MA Experiment 20000794 PARAMETER Experiment Name: At_Petals_P Parameter: Plant Line Value: WS
  misc_feature: MA Experiment 20000794 PARAMETER Experiment Name: At_Petals_P Parameter: Tissue Value: Petals vs. Whole plant
  misc_feature: MA Experiment ID: 20001451 Result: Down-regulated in Transcription
  misc_feature: MA Experiment 20001451 PARAMETER Experiment Name: At_Far-red-induction_P Parameter: Age (day) Value: 7
  misc_feature: MA Experiment 20001451 PARAMETER Experiment Name: At_Far-red-induction_P Parameter: Light Value: Far-red vs. White
  misc_feature: MA Experiment 20001451 PARAMETER Experiment Name: At_Far-red-induction_P Parameter: Organism Value: A. thaliana
  misc_feature: MA Experiment 20001451 PARAMETER Experiment Name: At_Far-red-induction_P Parameter: Plant Line Value: Columbia
  misc_feature: MA Experiment 20001451 PARAMETER Experiment Name: At_Far-red-induction_P Parameter: Timepoint (hr) Value: 24
  misc_feature: MA Experiment 20001451 PARAMETER Experiment Name: At_Far-red-induction_P Parameter: Tissue Value: Whole Plant
  misc_feature: MA Experiment ID: 20001554 Result: Down-regulated in Transcription
  misc_feature: MA Experiment 20001554 PARAMETER Experiment Name: At_Drought_Soil_Dry_P Parameter: Age (day) Value: 21
  misc_feature: MA Experiment 20001554 PARAMETER Experiment Name: At_Drought_Soil_Dry_P Parameter: Organism Value: A. thaliana
  misc_feature: MA Experiment 20001554 PARAMETER Experiment Name: At_Drought_Soil_Dry_P Parameter: Plant Line Value: WS
  misc_feature: MA Experiment 20001554 PARAMETER Experiment Name: At_Drought_Soil_Dry_P Parameter: Post Timepoint (hr) Value: None
  misc_feature: MA Experiment 20001554 PARAMETER Experiment Name: At_Drought_Soil_Dry_P Parameter: Post-Treatment Value: None
  misc_feature: MA Experiment 20001554 PARAMETER Experiment Name: At_Drought_Soil_Dry_P Parameter: Timepoint (day) Value: 7
  misc_feature: MA Experiment 20001554 PARAMETER Experiment Name: At_Drought_Soil_Dry_P Parameter: Treatment Value: Drought vs. No Drought
  misc_feature: MA Experiment ID: 20001555 Result: Down-regulated in Transcription
  misc_feature: MA Experiment 20001555 PARAMETER Experiment Name: At_Drought_Soil_Dry_P Parameter: Age (day) Value: 24
  misc_feature: MA Experiment 20001555 PARAMETER Experiment Name: At_Drought_Soil_Dry_P Parameter: Organism Value: A. thaliana
  misc_feature: MA Experiment 20001555 PARAMETER Experiment Name: At_Drought_Soil_Dry_P Parameter: Plant Line Value: WS
  misc_feature: MA Experiment 20001555 PARAMETER Experiment Name: At_Drought_Soil_Dry_P Parameter: Post Timepoint (hr) Value: None
  misc_feature: MA Experiment 20001555 PARAMETER Experiment Name: At_Drought_Soil_Dry_P Parameter: Post-Treatment Value: None
  misc_feature: MA Experiment 20001555 PARAMETER Experiment Name: At_Drought_Soil_Dry_P Parameter: Timepoint (day) Value: 10
  misc_feature: MA Experiment 20001555 PARAMETER Experiment Name: At_Drought_Soil_Dry_P Parameter: Treatment Value: Drought vs. No Drought
  misc_feature: MA Experiment ID: 20001556 Result: Down-regulated in Transcription
  misc_feature: MA Experiment 20001556 PARAMETER Experiment Name: At_Drought_Soil_Dry_P Parameter: Age (day) Value: 26
  misc_feature: MA Experiment 20001556 PARAMETER Experiment Name: At_Drought_Soil_Dry_P Parameter: Organism Value: A. thaliana
  misc_feature: MA Experiment 20001556 PARAMETER Experiment Name: At_Drought_Soil_Dry_P Parameter: Plant Line Value: WS
  misc_feature: MA Experiment 20001556 PARAMETER Experiment Name: At_Drought_Soil_Dry_P Parameter: Post Timepoint (hr) Value: None
  misc_feature: MA Experiment 20001556 PARAMETER Experiment Name: At_Drought_Soil_Dry_P Parameter: Post-Treatment Value: None
  misc_feature: MA Experiment 20001556 PARAMETER Experiment Name: At_Drought_Soil_Dry_P Parameter: Timepoint (day) Value: 12
  misc_feature: MA Experiment 20001556 PARAMETER Experiment Name: At_Drought_Soil_Dry_P Parameter: Treatment Value: Drought vs. No Drought
  misc_feature: MA Experiment ID: 20001559 Result: Down-regulated in Transcription
  misc_feature: MA Experiment 20001559 PARAMETER Experiment Name: At_Drought_Soil_Dry_P Parameter: Age (day) Value: 28
  misc_feature: MA Experiment 20001559 PARAMETER Experiment Name: At_Drought_Soil_Dry_P Parameter: Organism Value: A. thaliana
  misc_feature: MA Experiment 20001559 PARAMETER Experiment Name: At_Drought_Soil_Dry_P Parameter: Plant Line Value: WS
  misc_feature: MA Experiment 20001559 PARAMETER Experiment Name: At_Drought_Soil_Dry_P Parameter: Post Timepoint (hr) Value: 29
  misc_feature: MA Experiment 20001559 PARAMETER Experiment Name: At_Drought_Soil_Dry_P Parameter: Post-Treatment Value: Re-Water vs. No Drought
  misc_feature: MA Experiment 20001559 PARAMETER Experiment Name: At_Drought_Soil_Dry_P Parameter: Timepoint (day) Value: 14
  misc_feature: MA Experiment 20001559 PARAMETER Experiment Name: At_Drought_Soil_Dry_P Parameter: Treatment Value: Drought vs. No Drought
  misc_feature: MA Experiment ID: 20001771 Result: Up-regulated in Transcription
  misc_feature: MA Experiment 20001771 PARAMETER Experiment Name: At_Far-red-enriched-adult_P Parameter: Age (day) Value: 28
  misc_feature: MA Experiment 20001771 PARAMETER Experiment Name: At_Far-red-enriched-adult_P Parameter: Light Value: Far-red enriched vs. White
  misc_feature: MA Experiment 20001771 PARAMETER Experiment Name: At_Far-red-enriched-adult_P Parameter: Organism Value: A. thaliana
  misc_feature: MA Experiment 20001771 PARAMETER Experiment Name: At_Far-red-enriched-adult_P Parameter: Plant Line Value: Columbia
  misc_feature: MA Experiment 20001771 PARAMETER Experiment Name: At_Far-red-enriched-adult_P Parameter: Timepoint (hr) Value: 16
  misc_feature: MA Experiment 20001771 PARAMETER Experiment Name: At_Far-red-enriched-adult_P Parameter: Tissue Value: Aerial
  misc_feature: MA Experiment ID: 20001905 Result: Up-regulated in Transcription
  misc_feature: MA Experiment 20001905 PARAMETER Experiment Name: At_Drought_Reproduction_P Parameter: Age (day) Value: 40
  misc_feature: MA Experiment 20001905 PARAMETER Experiment Name: At_Drought_Reproduction_P Parameter: Organism Value: A. thaliana
  misc_feature: MA Experiment 20001905 PARAMETER Experiment Name: At_Drought_Reproduction_P Parameter: Plant Line Value: WS
  misc_feature: MA Experiment 20001905 PARAMETER Experiment Name: At_Drought_Reproduction_P Parameter: Timepoint (day) Value: 10
  misc_feature: MA Experiment 20001905 PARAMETER Experiment Name: At_Drought_Reproduction_P Parameter: Tissue Value: Rosettes
  misc_feature: MA Experiment 20001905 PARAMETER Experiment Name: At_Drought_Reproduction_P Parameter: Treatment Value: Drought vs. No Drought
  misc_feature: MA Experiment ID: 20001911 Result: Down-regulated in Transcription
  misc_feature: MA Experiment 20001911 PARAMETER Experiment Name: At_Drought_Reproduction_P Parameter: Age (day) Value: 40
  misc_feature: MA Experiment 20001911 PARAMETER Experiment Name: At_Drought_Reproduction_P Parameter: Organism Value: A. thaliana
  misc_feature: MA Experiment 20001911 PARAMETER Experiment Name: At_Drought_Reproduction_P Parameter: Plant Line Value: WS
  misc_feature: MA Experiment 20001911 PARAMETER Experiment Name: At_Drought_Reproduction_P Parameter: Timepoint (day) Value: 10
  misc_feature: MA Experiment 20001911 PARAMETER Experiment Name: At_Drought_Reproduction_P Parameter: Tissue Value: Flowers
  misc_feature: MA Experiment 20001911 PARAMETER Experiment Name: At_Drought_Reproduction_P Parameter: Treatment Value: Drought vs. No Drought
gcggccgcgcaaccctctctcattttacaagtctcacatcaaagcaattaacaaatacacaacttgtaacttcaaatagattattcaaagaagagagagagaaagaaagatggagaagaacatgaagtttccagtagtagacttgtccaagctcaatggggaagagagagaccaaaccatggctctaatcaatgaagcttgtgagaattggggcttctttgagatagtgaaccatggattaccacatgacttaatggacaagatcgagaagatgacaaaggaccattacaagacatgccaagaacaaaagttcaatgacatgctcaagtccaaaggtttggataatcttgagacagaagtcgaagatgtcgattgggaaagcactttctacgttcgtcacctccctcaatccaatctcaatgacatttcagatgtgtctgatgaatacaggacggccatgaaagactttggtaagagactggagaatcttgctgaggatttgttggatctactgtgtgagaatctagggttagagaaagggtatttgaagaaagtgtttcatggaacaaaaggcccaacctttgggacaaaggtgagcaattatccaccatgtcctaaaccagagatgatcaaaggtcttagggcccacactgatgcaggaggcatcatcttgttgtttcaagacgacaaggtcagtggtctccagcttcttaaagatggtgactggattgatgttcctcctctcaaccactctattgtcatcaatcttggtgaccaacttgaggtgataaccaacgggaagtataagagtgtgctgcaccgtgtggtgactcaacaagaaggaaacaggatgtcggttgcatcgttttacaacccgggaagcgatgcggacatctcaccagctacttcgcttgtggagaaagattccgagtacccgagtttcgtctttgatgactacatgaagctttatgcaggggtcaagtttcagcccaaggagccacggttcgcagcaatgaagaatgcttctgcagttacagaactgaatcctacagcagccgtagagactttctaaaaatggatttgagattcaagtgaagcagagaaagaaagatgagtttgtgttgtgtgttatggcaataagttaaaacttgtattagtgttgattaattttgtcaattggtgtgttttaaagtgtgggagataatactagtataaactaaaaagccttacatcattctaaaatatcatcactcaagtggcttcgtatttgggatcagcagttacgtagtgataagcaattaccaatgcgaagatgaagatgccaagaaagttggcaataaaccccaagtcctgatcatcgatcatcgttttatcgggacggaatcggtgggaaaggataaggcggccgc

SEQ ID NO: 76435 - protein, 320 aa, Arabidopsis thaliana
  peptide (1)..(320): Ceres Seq. ID no. 7107952
  misc_feature (156)..(256): Pfam Name: 2OG-Fe(II) oxygenase superfamily Pfam Description: 2OG-Fe(II) oxygenase superfamily
  misc_feature (1)..(320): Homolog of NCBI NO: 25285704 NR Description: 1-aminocyclopropane-1-carboxylate oxidase (EC
  misc_feature (1)..(320): Homolog of NCBI NO: 15220770 NR Description: ACC oxidase, putative; protein id: At1g62380.1, by cDNA: gi_15028038, supported by cDNA: gi_17065217, supported
  misc_feature (1)..(320): Homolog of NCBI NO: 587086 NR Description: ACC oxidase [Brassica oleracea]
  misc_feature (1)..(320): Homolog of NCBI NO: 728780 NR Description: 1-aminocyclopropane-1-carboxylate oxidase (ACC
  misc_feature (1)..(320): Homolog of NCBI NO: 7638440 NR Description: 1-aminocyclopropane-1-carboxylate oxidase
  misc_feature (1)..(320): Homolog of NCBI NO: 7433206 NR Description: probable 1-aminocyclopropane-1-carboxylate
  misc_feature (1)..(320): Homolog of NCBI NO: 15221170 NR Description: putative amino-cyclopropane-carboxylic acid (ACC oxidase); protein id: At1g12010.1, supported by cDNA: supported by cDNA: gi_17386121 [Arabidopsis thaliana]
  misc_feature (1)..(320): Homolog of NCBI NO: 7433194 NR Description: probable 1-aminocyclopropane-1-carboxylate
  misc_feature (1)..(320): Homolog of NCBI NO: 14148975 NR Description: ACC oxidase [Brassica rapa subsp. rapa]
  misc_feature (7)..(315): Homolog of NCBI NO: 18496053 NR Description: ACC oxidase 1 [Fagus sylvatica]
MEKNMKFPVVDLSKLNGEERDQTMALINEACENWGFFEIVNHGLPHDLMDKIEKMTKDHYKTCQEQKFNDMLKSKGLDNLETEVEDVDWESTFYVRHLPQSNLNDISDVSDEYRTAMKDFGKRLENLAEDLLDLLCENLGLEKGYLKKVFHGTKGPTFGTKVSNYPPCPKPEMIKGLRAHTDAGGIILLFQDDKVSGLQLLKDGDWIDVPPLNHSIVINLGDQLEVITNGKYKSVLHRVVTQQEGNRMSVASFYNPGSDADISPATSLVEKDSEYPSFVFDDYMKLYAGVKFQPKEPRFAAMKNASAVTELNPTAAVETF

SEQ ID NO: 76436 - protein, 316 aa, Arabidopsis thaliana
  peptide (1)..(316): Ceres Seq. ID no. 7107953
  misc_feature (152)..(252): Pfam Name: 2OG-Fe(II) oxygenase superfamily Pfam Description: 2OG-Fe(II) oxygenase superfamily
  misc_feature (1)..(316): Homolog of NCBI NO: 25285704 NR Description: 1-aminocyclopropane-1-carboxylate oxidase (EC
  misc_feature (1)..(316): Homolog of NCBI NO: 15220770 NR Description: ACC oxidase, putative; protein id: At1g62380.1, by cDNA: gi_15028038, supported by cDNA: gi_17065217, supported
  misc_feature (1)..(316): Homolog of NCBI NO: 587086 NR Description: ACC oxidase [Brassica oleracea]
  misc_feature (1)..(316): Homolog of NCBI NO: 728780 NR Description: 1-aminocyclopropane-1-carboxylate oxidase (ACC
  misc_feature (1)..(316): Homolog of NCBI NO: 7638440 NR Description: 1-aminocyclopropane-1-carboxylate oxidase
  misc_feature (1)..(316): Homolog of NCBI NO: 7433206 NR Description: probable 1-aminocyclopropane-1-carboxylate
  misc_feature (1)..(316): Homolog of NCBI NO: 15221170 NR Description: putative amino-cyclopropane-carboxylic acid (ACC oxidase); protein id: At1g12010.1, supported by cDNA: supported by cDNA: gi_17386121 [Arabidopsis thaliana]
  misc_feature (1)..(316): Homolog of NCBI NO: 7433194 NR Description: probable 1-aminocyclopropane-1-carboxylate
  misc_feature (1)..(316): Homolog of NCBI NO: 14148975 NR Description: ACC oxidase [Brassica rapa subsp. rapa]
  misc_feature (3)..(311): Homolog of NCBI NO: 18496053 NR Description: ACC oxidase 1 [Fagus sylvatica]
MKFPVVDLSKLNGEERDQTMALINEACENWGFFEIVNHGLPHDLMDKIEKMTKDHYKTCQEQKFNDMLKSKGLDNLETEVEDVDWESTFYVRHLPQSNLNDISDVSDEYRTAMKDFGKRLENLAEDLLDLLCENLGLEKGYLKKVFHGTKGPTFGTKVSNYPPCPKPEMIKGLRAHTDAGGIILLFQDDKVSGLQLLKDGDWIDVPPLNHSIVINLGDQLEVITNGKYKSVLHRVVTQQEGNRMSVASFYNPGSDADISPATSLVEKDSEYPSFVFDDYMKLYAGVKFQPKEPRFAAMKNASAVTELNPTAAVETF

SEQ ID NO: 76437 - protein, 297 aa, Arabidopsis thaliana
  peptide (1)..(297): Ceres Seq. ID no. 7107954
  misc_feature (133)..(233): Pfam Name: 2OG-Fe(II) oxygenase superfamily Pfam Description: 2OG-Fe(II) oxygenase superfamily
  misc_feature (1)..(297): Homolog of NCBI NO: 25285704 NR Description: 1-aminocyclopropane-1-carboxylate oxidase (EC
  misc_feature (1)..(297): Homolog of NCBI NO: 15220770 NR Description: ACC oxidase, putative; protein id: At1g62380.1, by cDNA: gi_15028038, supported by cDNA: gi_17065217, supported
  misc_feature (1)..(297): Homolog of NCBI NO: 587086 NR Description: ACC oxidase [Brassica oleracea]
  misc_feature (1)..(297): Homolog of NCBI NO: 728780 NR Description: 1-aminocyclopropane-1-carboxylate oxidase (ACC
  misc_feature (1)..(297): Homolog of NCBI NO: 7638440 NR Description: 1-aminocyclopropane-1-carboxylate oxidase
  misc_feature (1)..(297): Homolog of NCBI NO: 7433206 NR Description: probable 1-aminocyclopropane-1-carboxylate
  misc_feature (1)..(297): Homolog of NCBI NO: 15221170 NR Description: putative amino-cyclopropane-carboxylic acid (ACC oxidase); protein id: At1g12010.1, supported by cDNA: supported by cDNA: gi_17386121 [Arabidopsis thaliana]
  misc_feature (1)..(297): Homolog of NCBI NO: 7433194 NR Description: probable 1-aminocyclopropane-1-carboxylate
  misc_feature (1)..(297): Homolog of NCBI NO: 14148975 NR Description: ACC oxidase [Brassica rapa subsp. rapa]
  misc_feature (1)..(292): Homolog of NCBI NO: 18496053 NR Description: ACC oxidase 1 [Fagus sylvatica]
MALINEACENWGFFEIVNHGLPHDLMDKIEKMTKDHYKTCQEQKFNDMLKSKGLDNLETEVEDVDWESTFYVRHLPQSNLNDISDVSDEYRTAMKDFGKRLENLAEDLLDLLCENLGLEKGYLKKVFHGTKGPTFGTKVSNYPPCPKPEMIKGLRAHTDAGGIILLFQDDKVSGLQLLKDGDWIDVPPLNHSIVINLGDQLEVITNGKYKSVLHRVVTQQEGNRMSVASFYNPGSDADISPATSLVEKDSEYPSFVFDDYMKLYAGVKFQPKEPRFAAMKNASAVTELNPTAAVETF

SEQ ID NO: 76438 - DNA, 1512 bp, Arabidopsis thaliana
  misc_feature (1)..(1512): Ceres Seq. ID no. 7107997
  misc_feature: MA Experiment ID: 20000173 Result: Up-regulated in Transcription
  misc_feature: MA Experiment 20000173 PARAMETER Experiment Name: At_42deg_Heat_P Parameter: Age (day) Value: 14
  misc_feature: MA Experiment 20000173 PARAMETER Experiment Name: At_42deg_Heat_P Parameter: Organism Value: A. thaliana
  misc_feature: MA Experiment 20000173 PARAMETER Experiment Name: At_42deg_Heat_P Parameter: Plant Line Value: WS
  misc_feature: MA Experiment 20000173 PARAMETER Experiment Name: At_42deg_Heat_P Parameter: Temperature (deg C) Value: 42 vs. 22
  misc_feature: MA Experiment 20000173 PARAMETER Experiment Name: At_42deg_Heat_P Parameter: Timepoint (hr) Value: 6
  misc_feature: MA Experiment 20000173 PARAMETER Experiment Name: At_42deg_Heat_P Parameter: Tissue Value: Aerial
  misc_feature: MA Experiment ID: 20000179 Result: Down-regulated in Transcription
  misc_feature: MA Experiment 20000179 PARAMETER Experiment Name: At_Germinating_Seeds_P Parameter: Age (hr) Value: 6 vs. 0
  misc_feature: MA Experiment 20000179 PARAMETER Experiment Name: At_Germinating_Seeds_P Parameter: Tissue Value: Germinating Seeds
  misc_feature: MA Experiment ID: 20000180 Result: Down-regulated in Transcription
  misc_feature: MA Experiment 20000180 PARAMETER Experiment Name: At_Germinating_Seeds_P Parameter: Age (hr) Value: 24 vs. 0
  misc_feature: MA Experiment 20000180 PARAMETER Experiment Name: At_Germinating_Seeds_P Parameter: Tissue Value: Germinating Seeds
tcgacccacgcgtccgtcttcttcttatttcttctataccgtcgtcgaaaagctttaccaaaatctcacgcccccgacgattcatcgggatttgagtttgcactaaacccacaatggtttcctatcgtgctaccacagagacgatttccctggctttagaagccaacagctcggaggctattacgatactgtaccaggttttggaagacccttcttcatctcctgaggctatacggatcaaggagcaagcgattacaaacctttgtgatcgattgactgaagagaagagaggtgaggatctccggaaactgttgaccaagttgaggcctttcttttccttaatccccaaggcgaaaactgcgaaaatcgtcagaagaatcattgatgctgtggcaaagattcctggaacaactgatctccagatcactctctgcaaagagatggtcgaatggacccgcgctgagaagcgtactttcctcaggcagcgagtagaggctaggcttgcagctcttttgatggagaacaaggagtatgttgaagctttggcgctgttgagtactttggtaaaagaggttaggagattagatgataagctccttctggtcgacatagacttgctggagagcaaacttcacttctcattgagaaacttacccaaggcaaaagctgcactcactgcagctaggacagctgctaacgctatatatgtcccaccagctcaacaaggcacgatagatctgcagagtgggattcttcacgctgaagagaaggactacaaaaccggatacagttacttctttgaagcctttgaatccttcaacgctctcggagatccaagagccgttttcagtctgaagtacatgttactgtgcaagatcatggttagccaagctgatgatgttgcagggaataatctcctcaaaggctggactacagtcggccctgacctggatgccatgaaagcagtcgctgatgctcactcgaagaggtccttgaagttgtttgagaacgcactccgtgactacaaagcacagcttgaagatgacccaattgtccacaggcatctctcttctctctatgacacgcttctggagcaaaatctgtgtcgtttgatcgagcccttctcaagagttgagatagctcacattgctgagctcattggattgccgctcgaccatgtggaaaagaagctatctcagatgatactcgacaagaaatttgcaggtaccttggatcaaggagctggatgcctcatcatcttcgaagacccaaaggcagatgctatctactcggctaccctcgaaaccattgcaaacatggggaaggtcgtcgacagcctttatgttccggtctgccaaaatcatgttcctgaaaaatgaatctcattctatcgttctttctttctggttttagatatcgtttggactcaaagaaactgatgtttctcaatggagaaagtaaacttgtctgaattgttcacattactcgttttgcttatgatcttattatgtc

SEQ ID NO: 76439 - protein, 421 aa, Arabidopsis thaliana
  peptide (1)..(421): Ceres Seq. ID no. 7107998
  misc_feature (280)..(384): Pfam Name: PCI domain Pfam Description: PCI domain
  misc_feature (1)..(421): Homolog of NCBI NO: 25332510 NR Description: 19S proteosome subunit 9 [imported] - Arabidopsis >gi|3450889|gb|AAC34120.1| 19S proteosome subunit 9 [Arabidopsis
  misc_feature (1)..(411): Homolog of NCBI NO: 15218845 NR Description: 26S proteasome regulatory subunit (RPN6), protein id: At1g29150.1, supported by cDNA: 39755., supported by gi_15810544, supported by cDNA: gi_3450888 [Arabidopsis thaliana]
  misc_feature (6)..(411): Homolog of NCBI NO: 38344536 NR Description: OSJNBa0027P08.4 [Oryza sativa (japonica
  misc_feature (110)..(411): Homolog of NCBI NO: 38093742 NR Description: putative proteosome subunit [Oryza sativa
  misc_feature (12)..(410): Homolog of NCBI NO: 17137740 NR Description: Proteasome p44.5 subunit CG10149-PB [Drosophila
  misc_feature (30)..(410): Homolog of NCBI NO: 31242521 NR Description: ENSANGP00000015227 [Anopheles gambiae]
  misc_feature (15)..(410): Homolog of NCBI NO: 2150046 NR Description: 26S proteasome subunit 9 [Homo sapiens]
  misc_feature (15)..(410): Homolog of NCBI NO: 26342168 NR Description: unnamed protein product [Mus musculus]
  misc_feature (15)..(410): Homolog of NCBI NO: 28872725 NR Description: proteasome 26S non-ATPase subunit 11; 26S regulatory subunit 9 [Homo sapiens]
  misc_feature (15)..(410): Homolog of NCBI NO: 33585718 NR Description: Unknown (protein for IMAGE:3964625) [Mus musculus]
MVSYRATTETISLALEANSSEAITILYQVLEDPSSSPEAIRIKEQAITNLCDRLTEEKRGEDLRKLLTKLRPFFSLIPKAKTAKIVRRIIDAVAKIPGTTDLQITLCKEMVEWTRAEKRTFLRQRVEARLAALLMENKEYVEALALLSTLVKEVRRLDDKLLLVDIDLLESKLHFSLRNLPKAKAALTAARTAANAIYVPPAQQGTIDLQSGILHAEEKDYKTGYSYFFEAFESFNALGDPRAVFSLKYMLLCKIMVSQADDVAGNNLLKGWTTVGPDLDAMKAVADAHSKRSLKLFENALRDYKAQLEDDPIVHRHLSSLYDTLLEQNLCRLIEPFSRVEIAHIAELIGLPLDHVEKKLSQMILDKKFAGTLDQGAGCLIIFEDPKADAIYSATLETIANMGKVVDSLYVPVCQNHVPEK

SEQ ID NO: 76440 - protein, 312 aa, Arabidopsis thaliana
  peptide (1)..(312): Ceres Seq. ID no. 7107999
  misc_feature (171)..(275): Pfam Name: PCI domain Pfam Description: PCI domain
  misc_feature (1)..(312): Homolog of NCBI NO: 25332510 NR Description: 19S proteosome subunit 9 [imported] - Arabidopsis >gi|3450889|gb|AAC34120.1| 19S proteosome subunit 9 [Arabidopsis
  misc_feature (1)..(302): Homolog of NCBI NO: 15218845 NR Description: 26S proteasome regulatory subunit (RPN6), protein id: At1g29150.1, supported by cDNA: 39755., supported by gi_15810544, supported by cDNA: gi_3450888 [Arabidopsis thaliana]
  misc_feature (1)..(302): Homolog of NCBI NO: 38344536 NR Description: OSJNBa0027P08.4 [Oryza sativa (japonica
  misc_feature (1)..(302): Homolog of NCBI NO: 38093742 NR Description: putative proteosome subunit [Oryza sativa
  misc_feature (1)..(301): Homolog of NCBI NO: 17137740 NR Description: Proteasome p44.5 subunit CG10149-PB [Drosophila
  misc_feature (1)..(301): Homolog of NCBI NO: 31242521 NR Description: ENSANGP00000015227 [Anopheles gambiae]
  misc_feature (1)..(301): Homolog of NCBI NO: 2150046 NR Description: 26S proteasome subunit 9 [Homo sapiens]
  misc_feature (1)..(301): Homolog of NCBI NO: 28872725 NR Description: proteasome 26S non-ATPase subunit 11; 26S regulatory subunit 9 [Homo sapiens]
  misc_feature (1)..(301): Homolog of NCBI NO: 26342168 NR Description: unnamed protein product [Mus musculus]
  misc_feature (1)..(301): Homolog of NCBI NO: 33585718 NR Description: Unknown (protein for IMAGE:3964625) [Mus musculus]
MVEWTRAEKRTFLRQRVEARLAALLMENKEYVEALALLSTLVKEVRRLDDKLLLVDIDLLESKLHFSLRNLPKAKAALTAARTAANAIYVPPAQQGTIDLQSGILHAEEKDYKTGYSYFFEAFESFNALGDPRAVFSLKYMLLCKIMVSQADDVAGNNLLKGWTTVGPDLDAMKAVADAHSKRSLKLFENALRDYKAQLEDDPIVHRHLSSLYDTLLEQNLCRLIEPFSRVEIAHIAELIGLPLDHVEKKLSQMILDKKFAGTLDQGAGCLIIFEDPKADAIYSATLETIANMGKVVDSLYVPVCQNHVPEK

SEQ ID NO: 76441 - protein, 287 aa, Arabidopsis thaliana
  peptide (1)..(287): Ceres Seq. ID no. 7108000
  misc_feature (146)..(250): Pfam Name: PCI domain Pfam Description: PCI domain
  misc_feature (1)..(287): Homolog of NCBI NO: 25332510 NR Description: 19S proteosome subunit 9 [imported] - Arabidopsis >gi|3450889|gb|AAC34120.1| 19S proteosome subunit 9 [Arabidopsis
  misc_feature (1)..(277): Homolog of NCBI NO: 15218845 NR Description: 26S proteasome regulatory subunit (RPN6), protein id: At1g29150.1, supported by cDNA: 39755., supported by gi_15810544, supported by cDNA: gi_3450888 [Arabidopsis thaliana]
  misc_feature (1)..(277): Homolog of NCBI NO: 38344536 NR Description: OSJNBa0027P08.4 [Oryza sativa (japonica
  misc_feature (1)..(277): Homolog of NCBI NO: 38093742 NR Description: putative proteosome subunit [Oryza sativa
  misc_feature (1)..(276): Homolog of NCBI NO: 17137740 NR Description: Proteasome p44.5 subunit CG10149-PB [Drosophila
  misc_feature (1)..(276): Homolog of NCBI NO: 31242521 NR Description: ENSANGP00000015227 [Anopheles gambiae]
  misc_feature (1)..(276): Homolog of NCBI NO: 2150046 NR Description: 26S proteasome subunit 9 [Homo sapiens]
  misc_feature (1)..(276): Homolog of NCBI NO: 28872725 NR Description: proteasome 26S non-ATPase subunit 11; 26S regulatory subunit 9 [Homo sapiens]
  misc_feature (1)..(276): Homolog of NCBI NO: 26342168 NR Description: unnamed protein product [Mus musculus]
  misc_feature (1)..(276): Homolog of NCBI NO: 33585718 NR Description: Unknown (protein for IMAGE:3964625) [Mus musculus]
MENKEYVEALALLSTLVKEVRRLDDKLLLVDIDLLESKLHFSLRNLPKAKAALTAARTAANAIYVPPAQQGTIDLQSGILHAEEKDYKTGYSYFFEAFESFNALGDPRAVFSLKYMLLCKIMVSQADDVAGNNLLKGWTTVGPDLDAMKAVADAHSKRSLKLFENALRDYKAQLEDDPIVHRHLSSLYDTLLEQNLCRLIEPFSRVEIAHIAELIGLPLDHVEKKLSQMILDKKFAGTLDQGAGCLIIFEDPKADAIYSATLETIANMGKVVDSLYVPVCQNHVPEK

SEQ ID NO: 76442 - DNA, 903 bp, Arabidopsis thaliana
  misc_feature (1)..(903): Ceres Seq. ID no. 7108005
  misc_feature: MA Experiment ID: 108434 Result: Up-regulated in Transcription
  misc_feature: MA Experiment 108434 PARAMETER Experiment Name: At_Root_Tips_cDNA_P Parameter: Tissue Value: Root Tips
  misc_feature: MA Experiment ID: 108462 Result: Down-regulated in Transcription
  misc_feature: MA Experiment 108462 PARAMETER Experiment Name: At_Germinating_Seeds_cDNA_P Parameter: Age (day) Value: 2 vs. 0
  misc_feature: MA Experiment 108462 PARAMETER Experiment Name: At_Germinating_Seeds_cDNA_P Parameter: Tissue Value: Germinating Seeds
  misc_feature: MA Experiment ID: 108463 Result: Down-regulated in Transcription
  misc_feature: MA Experiment 108463 PARAMETER Experiment Name: At_Germinating_Seeds_cDNA_P Parameter: Age (day) Value: 3 vs. 0
  misc_feature: MA Experiment 108463 PARAMETER Experiment Name: At_Germinating_Seeds_cDNA_P Parameter: Tissue Value: Germinating Seeds
  misc_feature: MA Experiment ID: 108464 Result: Down-regulated in Transcription
  misc_feature: MA Experiment 108464 PARAMETER Experiment Name: At_Germinating_Seeds_cDNA_P Parameter: Age (day) Value: 4 vs. 0
  misc_feature: MA Experiment 108464 PARAMETER Experiment Name: At_Germinating_Seeds_cDNA_P Parameter: Tissue Value: Germinating Seeds
  misc_feature: MA Experiment ID: 20000180 Result: Down-regulated in Transcription
  misc_feature: MA Experiment 20000180 PARAMETER Experiment Name: At_Germinating_Seeds_P Parameter: Age (hr) Value: 24 vs. 0
  misc_feature: MA Experiment 20000180 PARAMETER Experiment Name: At_Germinating_Seeds_P Parameter: Tissue Value: Germinating Seeds
  misc_feature: MA Experiment ID: 20000184 Result: Down-regulated in Transcription
  misc_feature: MA Experiment 20000184 PARAMETER Experiment Name: At_Shoots__P Parameter: Age (day) Value: 7
  misc_feature: MA Experiment 20000184 PARAMETER Experiment Name: At_Shoots__P Parameter: Tissue Value: Shoots vs. Whole Plant
  misc_feature: MA Experiment ID: 20000227 Result: Down-regulated in Transcription
  misc_feature: MA Experiment 20000227 PARAMETER Experiment Name: At_Root-Tips-vs-Tops_P Parameter: Tissue Value: Root Tips vs. Root Tops
  misc_feature: MA Experiment ID: 20001557 Result: Up-regulated in Transcription
  misc_feature: MA Experiment 20001557 PARAMETER Experiment Name: At_Drought_Soil_Dry_P Parameter: Age (day) Value: 27
  misc_feature: MA Experiment 20001557 PARAMETER Experiment Name: At_Drought_Soil_Dry_P Parameter: Organism Value: A. thaliana
  misc_feature: MA Experiment 20001557 PARAMETER Experiment Name: At_Drought_Soil_Dry_P Parameter: Plant Line Value: WS
  misc_feature: MA Experiment 20001557 PARAMETER Experiment Name: At_Drought_Soil_Dry_P Parameter: Post Timepoint (hr) Value: 3
  misc_feature: MA Experiment 20001557 PARAMETER Experiment Name: At_Drought_Soil_Dry_P Parameter: Post-Treatment Value: Re-Water vs. No Drought
  misc_feature: MA Experiment 20001557 PARAMETER Experiment Name: At_Drought_Soil_Dry_P Parameter: Timepoint (day) Value: 13
  misc_feature: MA Experiment 20001557 PARAMETER Experiment Name: At_Drought_Soil_Dry_P Parameter: Treatment Value: Drought vs. No Drought
  misc_feature: MA Experiment ID: 20001558 Result: Up-regulated in Transcription
  misc_feature: MA Experiment 20001558 PARAMETER Experiment Name: At_Drought_Soil_Dry_P Parameter: Age (day) Value: 27
  misc_feature: MA Experiment 20001558 PARAMETER Experiment Name: At_Drought_Soil_Dry_P Parameter: Organism Value: A. thaliana
  misc_feature: MA Experiment 20001558 PARAMETER Experiment Name: At_Drought_Soil_Dry_P Parameter: Plant Line Value: WS
  misc_feature: MA Experiment 20001558 PARAMETER Experiment Name: At_Drought_Soil_Dry_P Parameter: Post Timepoint (hr) Value: 6
  misc_feature: MA Experiment 20001558 PARAMETER Experiment Name: At_Drought_Soil_Dry_P Parameter: Post-Treatment Value: Re-Water vs. No Drought
  misc_feature: MA Experiment 20001558 PARAMETER Experiment Name: At_Drought_Soil_Dry_P Parameter: Timepoint (day) Value: 13
  misc_feature: MA Experiment 20001558 PARAMETER Experiment Name: At_Drought_Soil_Dry_P Parameter: Treatment Value: Drought vs. No Drought
  misc_feature: MA Experiment ID: 20001757 Result: Up-regulated in Transcription
  misc_feature: MA Experiment 20001757 PARAMETER Experiment Name: At_50mM_NH4NO3_L-to-H_P Parameter: Timepoint (hr) Value: 6
  misc_feature: MA Experiment 20001757 PARAMETER Experiment Name: At_50mM_NH4NO3_L-to-H_P Parameter: Tissue Value: Leaf
  misc_feature: MA Experiment 20001757 PARAMETER Experiment Name: At_50mM_NH4NO3_L-to-H_P Parameter: Treatment Value: 50mM NH4NO3 vs 100mM Mannitol
gtgtgagtaatttaggccgcttcttcttcttcttcttccactgtcgttctctctgtaaatcgcttcttcaatcatctctgtggatttgtctctattcataacttggtgaagaagatgttgacggaagaggagctcaaaagattgtacagaatccagaagacgttgatgcagatgttaagggatcgtggatattttatcgcggattctgaacttacgatgactaaacaacagtttattaggaaacatggtgataacatgaaaagagaggatcttgttactcttaaggctaagcgaaatgataatagtgatcagctctatatattcttccctgatgaggcgaaagttggtgtgaagacgatgaaaatgtacacgaacaggatgaaatcagagaatgtgttcagagctattttggttgtgcaacagaacttgaccccgtttgctcgaacttgcattagtgagatctcttctaagtttcatctggaagttttccaggaggcggaaatgctagtgaacattaaagaacatgttcttgttcctgagcatcaagttcttaccactgaagagaagaaaactttactggagagatacacagtgaaggagacacagcttccaaggatccaagtgactgatccaatcgcaagatactttggactaaaacgtgggcaagtcgtgaagatcattcgtccgagtgaaacggctggtcgttatgttacctatcgttatgttgtataagccaaagcaaaaggcttttgtggattgtaatgcgaattgaacgctgagagttgtgaaacataagagtaatgcttttgtactaaaccaaactgatgactgtgttttatttttgtttgtccgataggagaaattaaagcttgaaacaacttatttgctaaattactcacactg

SEQ ID NO: 76443 - protein, 205 aa, Arabidopsis thaliana; identical to SEQ ID NO: 29287
  peptide (1)..(205): Ceres Seq. ID no. 7108006
  misc_feature (1)..(90): Pfam Name: RNA polymerase Rpb5, N-terminal domain Pfam Description: RNA polymerase Rpb5, N-terminal domain
  misc_feature (1)..(205): Homolog of NCBI NO: 15228724 NR Description: RNA polymerase I, II and III 24.3 kDa subunit; id: At3g22320.1, supported by cDNA: 21828., supported by cDNA: supported by cDNA: gi_15724321, supported by cDNA: gi_3372232
  misc_feature (1)..(205): Homolog of NCBI NO: 38344231 NR Description: OJ991113_30.8 [Oryza sativa (japonica
  misc_feature (4)..(204): Homolog of NCBI NO: 1173134 NR Description: DNA-directed RNA polymerase II 23 kDa polypeptide
  misc_feature (4)..(204): Homolog of NCBI NO: 2135016 NR Description: DNA-directed RNA polymerase (EC 2.7.7.6) II 23K
  misc_feature (4)..(204): Homolog of NCBI NO: 28497750 NR Description: polymerase (RNA) II (DNA directed) polypeptide E musculus] >gi|28374319|gb|AAH45521.1| similar to DNA directed RNA
  misc_feature (4)..(204): Homolog of NCBI NO: 2896797 NR Description: RPB5_Human [Homo sapiens]
  misc_feature (4)..(204): Homolog of NCBI NO: 14589951 NR Description: DNA directed RNA polymerase II polypeptide E; (RNA) II (DNA directed) polypeptide E (25kD); DNA directed RNA II 23 kda polypeptide [Homo sapiens] >gi|678549|gb|AAA62401.1|
  misc_feature (2)..(205): Homolog of NCBI NO: 17507947 NR Description: RNA polymerase Rpb5, N-terminal domain and RNA
  misc_feature (4)..(204): Homolog of NCBI NO: 31235339 NR Description: ENSANGP00000006082 [Anopheles gambiae]
  misc_feature (2)..(205): Homolog of NCBI NO: 39595790 NR Description: Hypothetical protein CBG12745 [Caenorhabditis

SEQ ID NO: 76444 - protein, 188 aa, Arabidopsis thaliana; identical to SEQ ID NO: 29288
  peptide (1)..(188): Ceres Seq. ID no. 7108007
  misc_feature (1)..(73): Pfam Name: RNA polymerase Rpb5, N-terminal domain Pfam Description: RNA polymerase Rpb5, N-terminal domain
  misc_feature (1)..(188): Homolog of NCBI NO: 15228724 NR Description: RNA polymerase I, II and III 24.3 kDa subunit; id: At3g22320.1, supported by cDNA: 21828., supported by cDNA: supported by cDNA: gi_15724321, supported by cDNA: gi_3372232
  misc_feature (1)..(188): Homolog of NCBI NO: 38344231 NR Description: OJ991113_30.8 [Oryza sativa (japonica
  misc_feature (1)..(187): Homolog of NCBI NO: 1173134 NR Description: DNA-directed RNA polymerase II 23 kDa polypeptide
  misc_feature (1)..(187): Homolog of NCBI NO: 2135016 NR Description: DNA-directed RNA polymerase (EC 2.7.7.6) II 23K
  misc_feature (1)..(187): Homolog of NCBI NO: 28497750 NR Description: polymerase (RNA) II (DNA directed) polypeptide E musculus] >gi|28374319|gb|AAH45521.1| similar to DNA directed RNA
  misc_feature (1)..(187): Homolog of NCBI NO: 2896797 NR Description: RPB5_Human [Homo sapiens]
  misc_feature (1)..(187): Homolog of NCBI NO: 14589951 NR Description: DNA directed RNA polymerase II polypeptide E; (RNA) II (DNA directed) polypeptide E (25kD); DNA directed RNA II 23 kda polypeptide [Homo sapiens] >gi|678549|gb|AAA62401.1|
  misc_feature (1)..(188): Homolog of NCBI NO: 17507947 NR Description: RNA polymerase Rpb5, N-terminal domain and RNA
  misc_feature (1)..(187): Homolog of NCBI NO: 31235339 NR Description: ENSANGP00000006082 [Anopheles gambiae]
  misc_feature (1)..(188): Homolog of NCBI NO: 39595790 NR Description: Hypothetical protein CBG12745 [Caenorhabditis

SEQ ID NO: 76445 - protein, 186 aa, Arabidopsis thaliana; identical to SEQ ID NO: 35158
  peptide (1)..(186): Ceres Seq. ID no. 7108008
  misc_feature (1)..(71): Pfam Name: RNA polymerase Rpb5, N-terminal domain Pfam Description: RNA polymerase Rpb5, N-terminal domain
  misc_feature (1)..(186): Homolog of NCBI NO: 15228724 NR Description: RNA polymerase I, II and III 24.3 kDa subunit; id: At3g22320.1, supported by cDNA: 21828., supported by cDNA: supported by cDNA: gi_15724321, supported by cDNA: gi_3372232
  misc_feature (1)..(186): Homolog of NCBI NO: 38344231 NR Description: OJ991113_30.8 [Oryza sativa (japonica
  misc_feature (1)..(185): Homolog of NCBI NO: 1173134 NR Description: DNA-directed RNA polymerase II 23 kDa polypeptide
  misc_feature (1)..(185): Homolog of NCBI NO: 2135016 NR Description: DNA-directed RNA polymerase (EC 2.7.7.6) II 23K
  misc_feature (1)..(185): Homolog of NCBI NO: 28497750 NR Description: polymerase (RNA) II (DNA directed) polypeptide E musculus] >gi|28374319|gb|AAH45521.1| similar to DNA directed RNA
  misc_feature (1)..(185): Homolog of NCBI NO: 2896797 NR Description: RPB5_Human [Homo sapiens]
  misc_feature (1)..(185): Homolog of NCBI NO: 14589951 NR Description: DNA directed RNA polymerase II polypeptide E; (RNA) II (DNA directed) polypeptide E (25kD); DNA directed RNA II 23 kda polypeptide [Homo sapiens] >gi|678549|gb|AAA62401.1|
  misc_feature (1)..(186): Homolog of NCBI NO: 17507947 NR Description: RNA polymerase Rpb5, N-terminal domain and RNA
  misc_feature (1)..(185): Homolog of NCBI NO: 31235339 NR Description: ENSANGP00000006082 [Anopheles gambiae]
  misc_feature (1)..(186): Homolog of NCBI NO: 39595790 NR Description: Hypothetical protein CBG12745 [Caenorhabditis

SEQ ID NO: 76446 - DNA, 2668 bp, Arabidopsis thaliana
  misc_feature (1)..(2668): Ceres Seq. ID no. 7108009
  misc_feature: MA Experiment ID: 108433 Result: Down-regulated in Transcription
  misc_feature: MA Experiment 108433 PARAMETER Experiment Name: At_rhl_Mutant2_cDNA_P Parameter: Age (day) Value: 7
  misc_feature: MA Experiment 108433 PARAMETER Experiment Name: At_rhl_Mutant2_cDNA_P Parameter: Organism Value: A. thaliana
  misc_feature: MA Experiment 108433 PARAMETER Experiment Name: At_rhl_Mutant2_cDNA_P Parameter: Plant Line Value: rhl Mutant vs. wt landsburg
  misc_feature: MA Experiment 108433 PARAMETER Experiment Name: At_rhl_Mutant2_cDNA_P Parameter: Tissue Value: Roots
  misc_feature: MA Experiment ID: 108462 Result: Down-regulated in Transcription
  misc_feature: MA Experiment 108462 PARAMETER Experiment Name: At_Germinating_Seeds_cDNA_P Parameter: Age (day) Value: 2 vs. 0
  misc_feature: MA Experiment 108462 PARAMETER Experiment Name: At_Germinating_Seeds_cDNA_P Parameter: Tissue Value: Germinating Seeds
gcttgattaattcggcacgaggtcttctcttctccacgaacttaattttttcaaaaccctagcaactttgattcattcaaaatccgatccaacgatgactattgaagaagtttccggtgagactcctccgtctacgcctccttcttcttctacgccttctccgtcttcctccaccaccaacgccgcgccgttgggatcctctgtgattccgattgtaaacaagctacaagacatattcgctcagctcggaagccagtctacgatcgcgcttcctcaggttgttgttgttggaagccaaagcagtggcaagtctagcgtccttgaagcactcgtcggccgtgactttctccctcgtggtaatgatatctgcacacgtcgtcctcttgttctccagctcctccagactaaaagccgcgctaatggcggatccgatgatgagtggggggagtttcgtcaccttcctgaaactcgtttctatgatttctctgagattcgtcgagaaattgaggctgagacgaatagattagttggagagaacaaaggtgtagcagatacacagattcgtcttaaaatttcttcacctaatgtattgaacatcacgcttgtggatctgcctggtattaccaaggtgccagttggtgaccagccatccgacattgaagcacgtataagaacgatgatcttgtcttacatcaagcaagatacttgcttgatattggctgttacccctgctaataccgatctagcaaactctgatgcccttcaaattgctagcattgtagatcctgatggtcacagaacgataggtgtaatcacaaagttggatattatggacaaaggtactgatgctcgaaaactccttcttggaaatgttgttcctcttcgacttggatacgtgggagttgtaaatcgttgccaggaggatattttgctaaaccgcacagtcaaggaagcacttctcgcagaggagaagttcttccggagtcacccggtttaccatggtcttgccgatcgtttgggtgttcctcagctagcaaagaagttaaatcagatccttgttcaacatatcaaggtcttgcttccggatctgaagtcgcggataagtaatgctttggttgctacagcaaaagagcatcagagctatggtgaattaacagaatcaagggctgggcaaggagctcttctcctcaactttctctccaaatactgtgaagcatactcttcattgctggaagggaaaagtgaagaaatgtctacgtcagagctctctggaggagcaagaattcactatattttccagtcaatctttgttaagagtttggaggaggttgatccatgcgaggacttgacagatgatgatattcggactgcaattcagaatgcaactggtccaagatctgcattatttgttccagatgttccatttgaagttcttgttaggaggcagatatctcgtttgttagatcctagccttcagtgtgcccggttcatttttgaagagctaataaagattagccatagatgtatgatgaatgagttacaacgatttccagtcctacgaaagcgcatggatgagttatcggggagggatttcctgcgagaaggtcttgaaccctcagaaacaatgatcggggatatcattgatatggagatggattacataaacacttcacatccaaattttattggtggaaccaaggccgtggaagctgcaatgcatcaagtgaagtcttcgaggattccccatcctgtggcacgaccaaaggacactgtggagcctgatagaacatcttcttccacgagtcaagtgaaatctagatcgtttctcggcaggcaagctaatggagttgttactgatcagggagttgtatctgcagatgctgaaaaagctcaacctgctgcaaatgcgaatgatacaaggtggggtatcccttcaattttccgagggggtgatactagagcagttactaaagatagcttattaaacaaaccattcagcgaagctgttgaagatatgtctcacaacttatccatgatctatctaaaggagcccccagctgtcttgaggccaaccgaaacccattcagaacaggaagcagttgagattcagataacaaagctgttactaagatcatactatgacattgtaaggaagaatattgaggattcggtaccaaaagcaatcatgcatttcctggtaaaccacacaaaacgtgagctgcataacgtcttcatcaagaagctttacagggagaacttgtttgaagaaatgttgcaagagccagatgagatagcagttaagaggaaacgcacacaagagactctccacgttcttcagcaagcttacaggacactagatgagttgccactggaagcagattcggtgtcagcaggaatgtcaaaacatcaggagttactgacatcttcaaagtattcgacaagcagctcatactcggcatctccaagtacgacaagaagatcgagaagagcaggagatcaacaccaaaatggatacggattctaacaggatccaaatatcttgcatatctctcgactgtgataacgcatttcattcatttaatggctctttcaggttttggtattaaattatgtgttggtcatatgaagaatttatataggaaaccagtacacagtgtgggttttggtc

SEQ ID NO: 76447 - protein, 809 aa, Arabidopsis thaliana
  peptide (1)..(809): Ceres Seq. ID no. 7108010
  misc_feature (252)..(546): Pfam Name: Dynamin central region Pfam Description: Dynamin central region
  misc_feature (23)..(785): Homolog of NCBI NO: 19032339 NR Description: dynamin like protein 2b [Arabidopsis thaliana]
  misc_feature (23)..(785): Homolog of NCBI NO: 20466604 NR Description: dynamin-like protein [Arabidopsis thaliana]
  misc_feature (1)..(474): Homolog of NCBI NO: 14334428 NR Description: putative dynamin protein ADL2 [Arabidopsis >gi|17104743|gb|AAL34260.1| putative dynamin protein ADL2
  misc_feature (17)..(373): Homolog of NCBI NO: 19386736 NR Description: putative dynamin-like protein ADL2 [Oryza sativa
  misc_feature (571)..(802): Homolog of NCBI NO: 19386736 NR Description: putative dynamin-like protein ADL2 [Oryza sativa
  misc_feature (410)..(576): Homolog of NCBI NO: 19386736 NR Description: putative dynamin-like protein ADL2 [Oryza sativa
  misc_feature (37)..(539): Homolog of NCBI NO: 2689219 NR Description: dynamin like protein [Dictyostelium discoideum]
  misc_feature (650)..(757): Homolog of NCBI NO: 2689219 NR Description: dynamin like protein [Dictyostelium discoideum]
  misc_feature (12)..(547): Homolog of NCBI NO: 30048092 NR Description: DNM1 protein [Homo sapiens]
  misc_feature (663)..(796): Homolog of NCBI NO: 30048092 NR Description: DNM1 protein [Homo sapiens]
MTIEEVSGETPPSTPPSSSTPSPSSSTTNAAPLGSSVIPIVNKLQDIFAQLGSQSTIALPQVVVVGSQSSGKSSVLEALVGRDFLPRGNDICTRRPLVLQLLQTKSRANGGSDDEWGEFRHLPETRFYDFSEIRREIEAETNRLVGENKGVADTQIRLKISSPNVLNITLVDLPGITKVPVGDQPSDIEARIRTMILSYIKQDTCLILAVTPANTDLANSDALQIASIVDPDGHRTIGVITKLDIMDKGTDARKLLLGNVVPLRLGYVGVVNRCQEDILLNRTVKEALLAEEKFFRSHPVYHGLADRLGVPQLAKKLNQILVQHIKVLLPDLKSRISNALVATAKEHQSYGELTESRAGQGALLLNFLSKYCEAYSSLLEGKSEEMSTSELSGGARIHYIFQSIFVKSLEEVDPCEDLTDDDIRTAIQNATGPRSALFVPDVPFEVLVRRQISRLLDPSLQCARFIFEELIKISHRCMMNELQRFPVLRKRMDELSGRDFLREGLEPSETMIGDIIDMEMDYINTSHPNFIGGTKAVEAAMHQVKSSRIPHPVARPKDTVEPDRTSSSTSQVKSRSFLGRQANGVVTDQGVVSADAEKAQPAANANDTRWGIPSIFRGGDTRAVTKDSLLNKPFSEAVEDMSHNLSMIYLKEPPAVLRPTETHSEQEAVEIQITKLLLRSYYDIVRKNIEDSVPKAIMHFLVNHTKRELHNVFIKKLYRENLFEEMLQEPDEIAVKRKRTQETLHVLQQAYRTLDELPLEADSVSAGMSKHQELLTSSKYSTSSSYSASPSTTRRSRRAGDQHQNGYGF

SEQ ID NO: 76448 - protein, 615 aa, Arabidopsis thaliana
  peptide (1)..(615): Ceres Seq. ID no. 7108011
  misc_feature (58)..(352): Pfam Name: Dynamin central region Pfam Description: Dynamin central region
  misc_feature (1)..(591): Homolog of NCBI NO: 19032339 NR Description: dynamin like protein 2b [Arabidopsis thaliana]
  misc_feature (1)..(591): Homolog of NCBI NO: 20466604 NR Description: dynamin-like protein [Arabidopsis thaliana]
  misc_feature (1)..(280): Homolog of NCBI NO: 14334428 NR Description: putative dynamin protein ADL2 [Arabidopsis >gi|17104743|gb|AAL34260.1| putative dynamin protein ADL2
  misc_feature (1)..(179): Homolog of NCBI NO: 19386736 NR Description: putative dynamin-like protein ADL2 [Oryza sativa
  misc_feature (377)..(608): Homolog of NCBI NO: 19386736 NR Description: putative dynamin-like protein ADL2 [Oryza sativa
  misc_feature (216)..(382): Homolog of NCBI NO: 19386736 NR Description: putative dynamin-like protein ADL2 [Oryza sativa
  misc_feature (1)..(345): Homolog of NCBI NO: 2689219 NR Description: dynamin like protein [Dictyostelium discoideum]
  misc_feature (456)..(563): Homolog of NCBI NO: 2689219 NR Description: dynamin like protein [Dictyostelium discoideum]
  misc_feature (1)..(353): Homolog of NCBI NO: 30048092 NR Description: DNM1 protein [Homo sapiens]
  misc_feature (469)..(602): Homolog of NCBI NO: 30048092 NR Description: DNM1 protein [Homo sapiens]
MILSYIKQDTCLILAVTPANTDLANSDALQIASIVDPDGHRTIGVITKLDIMDKGTDARKLLLGNVVPLRLGYVGVVNRCQEDILLNRTVKEALLAEEKFFRSHPVYHGLADRLGVPQLAKKLNQILVQHIKVLLPDLKSRISNALVATAKEHQSYGELTESRAGQGALLLNFLSKYCEAYSSLLEGKSEEMSTSELSGGARIHYIFQSIFVKSLEEVDPCEDLTDDDIRTAIQNATGPRSALFVPDVPFEVLVRRQISRLLDPSLQCARFIFEELIKISHRCMMNELQRFPVLRKRMDELSGRDFLREGLEPSETMIGDIIDMEMDYINTSHPNFIGGTKAVEAAMHQVKSSRIPHPVARPKDTVEPDRTSSSTSQVKSRSFLGRQANGVVTDQGVVSADAEKAQPAANANDTRWGIPSIFRGGDTRAVTKDSLLNKPFSEAVEDMSHNLSMIYLKEPPAVLRPTETHSEQEAVEIQITKLLLRSYYDIVRKNIEDSVPKAIMHFLVNHTKRELHNVFIKKLYRENLFEEMLQEPDEIAVKRKRTQETLHVLQQAYRTLDELPLEADSVSAGMSKHQELLTSSKYSTSSSYSASPSTTRRSRRAGDQHQNGYGF

SEQ ID NO: 76449 - protein, 564 aa, Arabidopsis thaliana
  peptide (1)..(564): Ceres Seq. ID no. 7108012
  misc_feature (7)..(301): Pfam Name: Dynamin central region Pfam Description: Dynamin central region
  misc_feature (1)..(540): Homolog of NCBI NO: 19032339 NR Description: dynamin like protein 2b [Arabidopsis thaliana]
  misc_feature (1)..(540): Homolog of NCBI NO: 20466604 NR Description: dynamin-like protein [Arabidopsis thaliana]
  misc_feature (1)..(229): Homolog of NCBI NO: 14334428 NR Description: putative dynamin protein ADL2 [Arabidopsis >gi|17104743|gb|AAL34260.1| putative dynamin protein ADL2
  misc_feature (1)..(128): Homolog of NCBI NO: 19386736 NR Description: putative dynamin-like protein ADL2 [Oryza sativa
  misc_feature (326)..(557): Homolog of NCBI NO: 19386736 NR Description: putative dynamin-like protein ADL2 [Oryza sativa
  misc_feature (165)..(331): Homolog of NCBI NO: 19386736 NR Description: putative dynamin-like protein ADL2 [Oryza sativa
  misc_feature (1)..(294): Homolog of NCBI NO: 2689219 NR Description: dynamin like protein [Dictyostelium discoideum]
  misc_feature (405)..(512): Homolog of NCBI NO: 2689219 NR Description: dynamin like protein [Dictyostelium discoideum]
  misc_feature (1)..(302): Homolog of NCBI NO: 30048092 NR Description: DNM1 protein [Homo sapiens]
  misc_feature (418)..(551): Homolog of NCBI NO: 30048092 NR Description: DNM1 protein [Homo sapiens]
MDKGTDARKLLLGNVVPLRLGYVGVVNRCQEDILLNRTVKEALLAEEKFFRSHPVYHGLADRLGVPQLAKKLNQILVQHIKVLLPDLKSRISNALVATAKEHQSYGELTESRAGQGALLLNFLSKYCEAYSSLLEGKSEEMSTSELSGGARIHYIFQSIFVKSLEEVDPCEDLTDDDIRTAIQNATGPRSALFVPDVPFEVLVRRQISRLLDPSLQCARFIFEELIKISHRCMMNELQRFPVLRKRMDELSGRDFLREGLEPSETMIGDIIDMEMDYINTSHPNFIGGTKAVEAAMHQVKSSRIPHPVARPKDTVEPDRTSSSTSQVKSRSFLGRQANGVVTDQGVVSADAEKAQPAANANDTRWGIPSIFRGGDTRAVTKDSLLNKPFSEAVEDMSHNLSMIYLKEPPAVLRPTETHSEQEAVEIQITKLLLRSYYDIVRKNIEDSVPKAIMHFLVNHTKRELHNVFIKKLYRENLFEEMLQEPDEIAVKRKRTQETLHVLQQAYRTLDELPLEADSVSAGMSKHQELLTSSKYSTSSSYSASPSTTRRSRRAGDQHQNGYGF

SEQ ID NO: 76450 - DNA, 727 bp, Arabidopsis thaliana
  misc_feature (1)..(727): Ceres Seq. ID no. 7108024
  misc_feature: MA Experiment ID: 20000112 Result: Up-regulated in Transcription
  misc_feature: MA Experiment 20000112 PARAMETER Experiment Name: At_42deg_Heat_cDNA_P Parameter: Temperature (deg C) Value: 42 vs. 22
  misc_feature: MA Experiment 20000112 PARAMETER Experiment Name: At_42deg_Heat_cDNA_P Parameter: Timepoint (hr) Value: 2
  misc_feature: MA Experiment 20000112 PARAMETER Experiment Name: At_42deg_Heat_cDNA_P Parameter: Tissue Value: Aerial
  misc_feature: MA Experiment ID: 20001451 Result: Up-regulated in Transcription
  misc_feature: MA Experiment 20001451 PARAMETER Experiment Name: At_Far-red-induction_P Parameter: Age (day) Value: 7
  misc_feature: MA Experiment 20001451 PARAMETER Experiment Name: At_Far-red-induction_P Parameter: Light Value: Far-red vs. White
  misc_feature: MA Experiment 20001451 PARAMETER Experiment Name: At_Far-red-induction_P Parameter: Organism Value: A. thaliana
  misc_feature: MA Experiment 20001451 PARAMETER Experiment Name: At_Far-red-induction_P Parameter: Plant Line Value: Columbia
  misc_feature: MA Experiment 20001451 PARAMETER Experiment Name: At_Far-red-induction_P Parameter: Timepoint (hr) Value: 24
  misc_feature: MA Experiment 20001451 PARAMETER Experiment Name: At_Far-red-induction_P Parameter: Tissue Value: Whole Plant
gaattcggcacgaggcttctggagatctcttctgggaatcgagcttcactgttaaagattttccttcaatcggctaaaaatgatacatttcgtgttactagtcagtcgacaagggaaagtaaggctcaccaagtggtattcgccgtatacgcagaaggaaagatctaaggtcatacgtgaactcagcggagtgattctgaaccgaggtcccaagctctgcaattttattgaatggagaggatacaaggttgtctacaaaagatatgcaagcttgtacttctgcatgtgcattgatgaggcggataacgcgttagaggtactggagataattcatcactacgtcgagattcttgaccgttactttggcagtgtgtgtgaactcgatttgatttttaacttccacaaggcgtattatatactggacgagctgttgatcgccggagaacttcaagagtcaagcaagaaaacagttgcaaggataatatcagcccaggatcaattggtggaagttgcgaaagaggaggcgagttccataagtaatataattgctcaggctaccaagtagtccttctctgaacttctcttatgcagctgaaacaatcgtaaatgagttaatattttccttcaactctgagaaattctcttctgaatcacactttgtttgtcatgccatgtcatgtgattgtttgattgattagaagaaagaagcattcatcgttttgggttt

SEQ ID NO: 76451 - protein, 161 aa, Arabidopsis thaliana
  peptide (1)..(161): Ceres Seq. ID no. 7108025
  misc_feature (1)..(142): Pfam Name: Clathrin adaptor complex small chain Pfam Description: Clathrin adaptor complex small chain
  misc_feature (1)..(161): Homolog of NCBI NO: 2231698 NR Description: clathrin assembly protein AP19 [Arabidopsis >gi|2231700|gb|AAB96888.1| clathrin assembly protein AP19 homolog
  misc_feature (1)..(161): Homolog of NCBI NO: 18398407 NR Description: clathrin assembly protein AP19, small subunit; id: At2g17380.1, supported by cDNA: 13246., supported by cDNA: [Arabidopsis thaliana] >gi|25345213|pir||E84551 clathrin subunit
  misc_feature (1)..(160): Homolog of NCBI NO: 15237005 NR Description: clathrin assembly protein AP19 homolog; protein
  misc_feature (1)..(161): Homolog of NCBI NO: 1762309 NR Description: AP-1 Golgi-related complex component; clathrin
  misc_feature (1)..(161): Homolog of NCBI NO: 34897116 NR Description: putative clathrin assembly protein [Oryza sativa]
  misc_feature (1)..(161): Homolog of NCBI NO: 32129329 NR Description: putative clathrin assembly protein [Oryza sativa
  misc_feature (1)..(143): Homolog of NCBI NO: 23508378 NR Description: clathrin assembly protein AP19, putative falciparum 3D7] >gi|23496110|gb|AAN35771.1|AE014838_49 clathrin
  misc_feature (1)..(156): Homolog of NCBI NO: 23480730 NR Description: clathrin assembly protein AP19, small subunit
  misc_feature (1)..(109): Homolog of NCBI NO: 30690340 NR Description: clathrin assembly protein AP19 homolog
  misc_feature (2)..(147): Homolog of NCBI NO: 34880078 NR Description: similar to Adapter-related protein complex 1
MIHFVLLVSRQGKVRLTKWYSPYTQKERSKVIRELSGVILNRGPKLCNFIEWRGYKVVYKRYASLYFCMCIDEADNALEVLEIIHHYVEILDRYFGSVCELDLIFNFHKAYYILDELLIAGELQESSKKTVARIISAQDQLVEVAKEEASSISNIIAQATK

SEQ ID NO: 76452 - protein, 93 aa, Arabidopsis thaliana
  peptide (1)..(93): Ceres Seq. ID no. 7108026
  misc_feature (1)..(74): Pfam Name: Clathrin adaptor complex small chain Pfam Description: Clathrin adaptor complex small chain
  misc_feature (1)..(93): Homolog of NCBI NO: 2231698 NR Description: clathrin assembly protein AP19 [Arabidopsis >gi|2231700|gb|AAB96888.1| clathrin assembly protein AP19 homolog
  misc_feature (1)..(93): Homolog of NCBI NO: 18398407 NR Description: clathrin assembly protein AP19, small subunit; id: At2g17380.1, supported by cDNA: 13246., supported by cDNA: [Arabidopsis thaliana] >gi|25345213|pir||E84551 clathrin subunit
  misc_feature (1)..(92): Homolog of NCBI NO: 15237005 NR Description: clathrin assembly protein AP19 homolog; protein
  misc_feature (1)..(93): Homolog of NCBI NO: 1762309 NR Description: AP-1 Golgi-related complex component; clathrin
  misc_feature (1)..(93): Homolog of NCBI NO: 34897116 NR Description: putative clathrin assembly protein [Oryza sativa]
  misc_feature (1)..(93): Homolog of NCBI NO: 32129329 NR Description: putative clathrin assembly protein [Oryza sativa
  misc_feature (1)..(75): Homolog of NCBI NO: 23508378 NR Description: clathrin assembly protein AP19, putative falciparum 3D7] >gi|23496110|gb|AAN35771.1|AE014838_49 clathrin
  misc_feature (1)..(88): Homolog of NCBI NO: 23480730 NR Description: clathrin assembly protein AP19, small subunit
  misc_feature (1)..(41): Homolog of NCBI NO: 30690340 NR Description: clathrin assembly protein AP19 homolog
  misc_feature (1)..(79): Homolog of NCBI NO: 34880078 NR Description: similar to Adapter-related protein complex 1
MCIDEADNALEVLEIIHHYVEILDRYFGSVCELDLIFNFHKAYYILDELLIAGELQESSKKTVARIISAQDQLVEVAKEEASSISNIIAQATK

SEQ ID NO: 76453 - DNA, 1311 bp, Arabidopsis thaliana
  misc_feature (1)..(1311): Ceres Seq. ID no. 7108027
  misc_feature: MA Experiment ID: 20000171 Result: Down-regulated in Transcription
  misc_feature: MA Experiment 20000171 PARAMETER Experiment Name: At_42deg_Heat_P Parameter: Age (day) Value: 14
  misc_feature: MA Experiment 20000171 PARAMETER Experiment Name: At_42deg_Heat_P Parameter: Organism Value: A. thaliana
  misc_feature: MA Experiment 20000171 PARAMETER Experiment Name: At_42deg_Heat_P Parameter: Plant Line Value: WS
  misc_feature: MA Experiment 20000171 PARAMETER Experiment Name: At_42deg_Heat_P Parameter: Temperature (deg C) Value: 42 vs. 22
  misc_feature: MA Experiment 20000171 PARAMETER Experiment Name: At_42deg_Heat_P Parameter: Timepoint (hr) Value: 1
  misc_feature: MA Experiment 20000171 PARAMETER Experiment Name: At_42deg_Heat_P Parameter: Tissue Value: Aerial
  misc_feature: MA Experiment ID: 20000173 Result: Down-regulated in Transcription
  misc_feature: MA Experiment 20000173 PARAMETER Experiment Name: At_42deg_Heat_P Parameter: Age (day) Value: 14
  misc_feature: MA Experiment 20000173 PARAMETER Experiment Name: At_42deg_Heat_P Parameter: Organism Value: A. thaliana
  misc_feature: MA Experiment 20000173 PARAMETER Experiment Name: At_42deg_Heat_P Parameter: Plant Line Value: WS
  misc_feature: MA Experiment 20000173 PARAMETER Experiment Name: At_42deg_Heat_P Parameter: Temperature (deg C) Value: 42 vs. 22
  misc_feature: MA Experiment 20000173 PARAMETER Experiment Name: At_42deg_Heat_P Parameter: Timepoint (hr) Value: 6
  misc_feature: MA Experiment 20000173 PARAMETER Experiment Name: At_42deg_Heat_P Parameter: Tissue Value: Aerial
  misc_feature: MA Experiment ID: 20000180 Result: Up-regulated in Transcription
  misc_feature: MA Experiment 20000180 PARAMETER Experiment Name: At_Germinating_Seeds_P Parameter: Age (hr) Value: 24 vs. 0
  misc_feature: MA Experiment 20000180 PARAMETER Experiment Name: At_Germinating_Seeds_P Parameter: Tissue Value: Germinating Seeds
  misc_feature: MA Experiment ID: 20000184 Result: Down-regulated in Transcription
  misc_feature: MA Experiment 20000184 PARAMETER Experiment Name: At_Shoots__P Parameter: Age (day) Value: 7
  misc_feature: MA Experiment 20000184 PARAMETER Experiment Name: At_Shoots__P Parameter: Tissue Value: Shoots vs. Whole Plant
  misc_feature: MA Experiment ID: 20000211 Result: Up-regulated in Transcription
  misc_feature: MA Experiment 20000211 PARAMETER Experiment Name: At_0.001percent_MeJA__P Parameter: Age (day) Value: 14
  misc_feature: MA Experiment 20000211 PARAMETER Experiment Name: At_0.001percent_MeJA__P Parameter: Organism Value: A. thaliana
  misc_feature: MA Experiment 20000211 PARAMETER Experiment Name: At_0.001percent_MeJA__P Parameter: Plant Line Value: WS
  misc_feature: MA Experiment 20000211 PARAMETER Experiment Name: At_0.001percent_MeJA__P Parameter: Timepoint (hr) Value: 1
  misc_feature: MA Experiment 20000211 PARAMETER Experiment Name: At_0.001percent_MeJA__P Parameter: Tissue Value: Aerial
  misc_feature: MA Experiment 20000211 PARAMETER Experiment Name: At_0.001percent_MeJA__P Parameter: Treatment Value: 0.001percent MeJA vs. No Treatment
  misc_feature: MA Experiment ID: 20000227 Result: Down-regulated in Transcription
  misc_feature: MA Experiment 20000227 PARAMETER Experiment Name: At_Root-Tips-vs-Tops_P Parameter: Tissue Value: Root Tips vs. Root Tops
  misc_feature: MA Experiment ID: 20000234 Result: Down-regulated in Transcription
  misc_feature: MA Experiment 20000234 PARAMETER Experiment Name: At_Siliques_P Parameter: Age (day) Value: 21
  misc_feature: MA Experiment 20000234 PARAMETER Experiment Name: At_Siliques_P Parameter: Organism Value: A. thaliana
  misc_feature: MA Experiment 20000234 PARAMETER Experiment Name: At_Siliques_P Parameter: Plant Line Value: WS
  misc_feature: MA Experiment 20000234 PARAMETER Experiment Name: At_Siliques_P Parameter: Tissue Value: Less Than 5mm Siliques vs. Whole Plant
  misc_feature: MA Experiment ID: 20000264 Result: Down-regulated in Transcription
  misc_feature: MA Experiment 20000264 PARAMETER Experiment Name: At_Open_Flower_P Parameter: Age (day) Value: 21
  misc_feature: MA Experiment 20000264 PARAMETER Experiment Name: At_Open_Flower_P Parameter: Plant Line Value: WS
  misc_feature: MA Experiment 20000264 PARAMETER Experiment Name: At_Open_Flower_P Parameter: Tissue Value: Open Flower vs. Whole Plant
  misc_feature: MA Experiment ID: 20000265 Result: Down-regulated in Transcription
  misc_feature: MA Experiment 20000265 PARAMETER Experiment Name: At_Open_Flower_P Parameter: Age (day) Value: 21
  misc_feature: MA Experiment 20000265 PARAMETER Experiment Name: At_Open_Flower_P Parameter: Plant Line Value: WS
  misc_feature: MA Experiment 20000265 PARAMETER Experiment Name: At_Open_Flower_P Parameter: Tissue Value: Closed Flower vs. Whole Plant
  misc_feature: MA Experiment ID: 20000286 Result: Down-regulated in Transcription
  misc_feature: MA Experiment 20000286 PARAMETER Experiment Name: At_Open_Flower_P Parameter: Age (day) Value: 21
  misc_feature: MA Experiment 20000286 PARAMETER Experiment Name: At_Open_Flower_P Parameter: Plant Line Value: WS
  misc_feature: MA Experiment 20000286 PARAMETER Experiment Name: At_Open_Flower_P Parameter: Tissue Value: Half Open vs. Whole Plant
  misc_feature: MA Experiment ID: 20000437 Result: Down-regulated in Transcription
  misc_feature: MA Experiment 20000437 PARAMETER Experiment Name: At_Drought_P Parameter: Age (day) Value: 8
  misc_feature: MA Experiment 20000437 PARAMETER Experiment Name: At_Drought_P Parameter: Organism Value: A. thaliana
  misc_feature: MA Experiment 20000437 PARAMETER Experiment Name: At_Drought_P Parameter: Plant Line Value: WS
  misc_feature: MA Experiment 20000437 PARAMETER Experiment Name: At_Drought_P Parameter: Timepoint (hr) Value: 24
  misc_feature: MA Experiment 20000437 PARAMETER Experiment Name: At_Drought_P Parameter: Tissue Value: Whole Plant
  misc_feature: MA Experiment 20000437 PARAMETER Experiment Name: At_Drought_P Parameter: Treatment Value: Drought vs. No Drought
  misc_feature: MA Experiment ID: 20000496 Result: Down-regulated in Transcription
  misc_feature: MA Experiment 20000496 PARAMETER Experiment Name: At_Guard_Cells_P Parameter: Harvest Date Value: 7/19/2002
  misc_feature: MA Experiment 20000496 PARAMETER Experiment Name: At_Guard_Cells_P Parameter: Organism Value: Canola
  misc_feature: MA Experiment 20000496 PARAMETER Experiment Name: At_Guard_Cells_P Parameter: Tissue Value: Guard Cells vs. Leaves
  misc_feature: MA Experiment ID: 20000794 Result: Down-regulated in Transcription
  misc_feature: MA Experiment 20000794 PARAMETER Experiment Name: At_Petals_P Parameter: Age (day) Value: 23-25 days
  misc_feature: MA Experiment 20000794 PARAMETER Experiment Name: At_Petals_P Parameter: Plant Line Value: WS
  misc_feature: MA Experiment 20000794 PARAMETER Experiment Name: At_Petals_P Parameter: Tissue Value: Petals vs. Whole plant
  misc_feature: MA Experiment ID: 20001247 Result: Down-regulated in Transcription
  misc_feature: MA Experiment 20001247 PARAMETER Experiment Name: At_Far-red-induction_P Parameter: Age (day) Value: 7
  misc_feature: MA Experiment 20001247 PARAMETER Experiment Name: At_Far-red-induction_P Parameter: Light Value: Far-red vs. White
  misc_feature: MA Experiment 20001247 PARAMETER Experiment Name: At_Far-red-induction_P Parameter: Organism Value: A. thaliana
  misc_feature: MA Experiment 20001247 PARAMETER Experiment Name: At_Far-red-induction_P Parameter: Plant Line Value: Columbia
  misc_feature: MA Experiment 20001247 PARAMETER Experiment Name: At_Far-red-induction_P Parameter: Timepoint (hr) Value: 1
  misc_feature: MA Experiment 20001247 PARAMETER Experiment Name: At_Far-red-induction_P Parameter: Tissue Value: Whole Plant
  misc_feature: MA Experiment ID: 20001248 Result: Down-regulated in Transcription
  misc_feature: MA Experiment 20001248 PARAMETER Experiment Name: At_Far-red-induction_P Parameter: Age (day) Value: 7
  misc_feature: MA Experiment 20001248 PARAMETER Experiment Name: At_Far-red-induction_P Parameter: Light Value: Far-red vs. White
  misc_feature: MA Experiment 20001248 PARAMETER Experiment Name: At_Far-red-induction_P Parameter: Organism Value: A. thaliana
  misc_feature: MA Experiment 20001248 PARAMETER Experiment Name: At_Far-red-induction_P Parameter: Plant Line Value: Columbia
  misc_feature: MA Experiment 20001248 PARAMETER Experiment Name: At_Far-red-induction_P Parameter: Timepoint (hr) Value: 4
  misc_feature: MA Experiment 20001248 PARAMETER Experiment Name: At_Far-red-induction_P Parameter: Tissue Value: Whole Plant
  misc_feature: MA Experiment ID: 20001450 Result: Down-regulated in Transcription
  misc_feature: MA Experiment 20001450 PARAMETER Experiment Name: At_Far-red-induction_P Parameter: Age (day) Value: 7
  misc_feature: MA Experiment 20001450 PARAMETER Experiment Name: At_Far-red-induction_P Parameter: Light Value: Far-red vs. White
  misc_feature: MA Experiment 20001450 PARAMETER Experiment Name: At_Far-red-induction_P Parameter: Organism Value: A. thaliana
  misc_feature: MA Experiment 20001450 PARAMETER Experiment Name: At_Far-red-induction_P Parameter: Plant Line Value: Columbia
  misc_feature: MA Experiment 20001450 PARAMETER Experiment Name: At_Far-red-induction_P Parameter: Timepoint (hr) Value: 8
  misc_feature: MA Experiment 20001450 PARAMETER Experiment Name: At_Far-red-induction_P Parameter: Tissue Value: Whole Plant
  misc_feature: MA Experiment ID: 20001451 Result: Down-regulated in Transcription
  misc_feature: MA Experiment 20001451 PARAMETER Experiment Name: At_Far-red-induction_P Parameter: Age (day) Value: 7
  misc_feature: MA Experiment 20001451 PARAMETER Experiment Name: At_Far-red-induction_P Parameter: Light Value: Far-red vs. White
  misc_feature: MA Experiment 20001451 PARAMETER Experiment Name: At_Far-red-induction_P Parameter: Organism Value: A. thaliana
  misc_feature: MA Experiment 20001451 PARAMETER Experiment Name: At_Far-red-induction_P Parameter: Plant Line Value: Columbia
  misc_feature: MA Experiment 20001451 PARAMETER Experiment Name: At_Far-red-induction_P Parameter: Timepoint (hr) Value: 24
  misc_feature: MA Experiment 20001451 PARAMETER Experiment Name: At_Far-red-induction_P Parameter: Tissue Value: Whole Plant
  misc_feature: MA Experiment ID: 20001756 Result: Up-regulated in Transcription
  misc_feature: MA Experiment 20001756 PARAMETER Experiment Name: At_50mM_NH4NO3_L-to-H_P Parameter: Timepoint (hr) Value: 4
  misc_feature: MA Experiment 20001756 PARAMETER Experiment Name: At_50mM_NH4NO3_L-to-H_P Parameter: Tissue Value: Leaf
  misc_feature: MA Experiment 20001756 PARAMETER Experiment Name: At_50mM_NH4NO3_L-to-H_P Parameter: Treatment Value: 50mM NH4NO3 vs 100mM Mannitol
  misc_feature: MA Experiment ID: 20001757 Result: Up-regulated in Transcription
  misc_feature: MA Experiment 20001757 PARAMETER Experiment Name: At_50mM_NH4NO3_L-to-H_P Parameter: Timepoint (hr) Value: 6
  misc_feature: MA Experiment 20001757 PARAMETER Experiment Name: At_50mM_NH4NO3_L-to-H_P Parameter: Tissue Value: Leaf
  misc_feature: MA Experiment 20001757 PARAMETER Experiment Name: At_50mM_NH4NO3_L-to-H_P Parameter: Treatment Value: 50mM NH4NO3 vs 100mM Mannitol
  misc_feature: MA Experiment ID: 20001905 Result: Down-regulated in Transcription
  misc_feature: MA Experiment 20001905 PARAMETER Experiment Name: At_Drought_Reproduction_P Parameter: Age (day) Value: 40
  misc_feature: MA Experiment 20001905 PARAMETER Experiment Name: At_Drought_Reproduction_P Parameter: Organism Value: A. thaliana
  misc_feature: MA Experiment 20001905 PARAMETER Experiment Name: At_Drought_Reproduction_P Parameter: Plant Line Value: WS
  misc_feature: MA Experiment 20001905 PARAMETER Experiment Name: At_Drought_Reproduction_P Parameter: Timepoint (day) Value: 10
  misc_feature: MA Experiment 20001905 PARAMETER Experiment Name: At_Drought_Reproduction_P Parameter: Tissue Value: Rosettes
  misc_feature: MA Experiment 20001905 PARAMETER Experiment Name: At_Drought_Reproduction_P Parameter: Treatment Value: Drought vs. No Drought
  misc_feature: MA Experiment ID: 20001910 Result: Down-regulated in Transcription
  misc_feature: MA Experiment 20001910 PARAMETER Experiment Name: At_Drought_Reproduction_P Parameter: Age (day) Value: 37
  misc_feature: MA Experiment 20001910 PARAMETER Experiment Name: At_Drought_Reproduction_P Parameter: Organism Value: A. thaliana
  misc_feature: MA Experiment 20001910 PARAMETER Experiment Name: At_Drought_Reproduction_P Parameter: Plant Line Value: WS
  misc_feature: MA Experiment 20001910 PARAMETER Experiment Name: At_Drought_Reproduction_P Parameter: Timepoint (day) Value: 7
  misc_feature: MA Experiment 20001910 PARAMETER Experiment Name: At_Drought_Reproduction_P Parameter: Tissue Value: Flowers
  misc_feature: MA Experiment 20001910 PARAMETER Experiment Name: At_Drought_Reproduction_P Parameter: Treatment Value: Drought vs. No Drought
gaattcgcggccgcgtcgacaaactgtaaacccccacacagttattggccgtcggattcaatggaaggattagctatcagagcatctcgaccgtcggttttctgttctattccaggtctcggcggcgattcccaccgaaaacctccaagtgacggtttcctcaagctgcctgcgtcgtctattccggcggacagccgaaaattagtagcgaattctacttcctttcatccaatctcagccgttaacgtctctgctcaagcttccctcaccgctgattttcccgccctttcagaaactatactgaaagagggaagaaataacggaaaagagaaagcagagaacatcgtgtggcacgagagttcgatatgcagatgcgacagacaacaacttcttcaacaaaagggttgtgtcgtttggatcactggtctcagtggttcagggaaaagcactgttgcttgtgcactaagtaaagcattgtttgaaagaggcaaacttacttacacactcgacggcgacaatgtccgtcacggccttaaccgtgacctcactttcaaagcagagcaccgcaccgaaaacattagaagaattggtgaggtggctaagttgtttgctgacgtcggagtcatttgtatagcaagtttgatttctccgtaccggagagacagagacgcgtgccggtccttgttacctgacggcgatttcgtcgaggtcttcatggacgttcctcttcatgtgtgcgagtcgagagatccaaaggggttgtacaagcttgcacgtgcaggcaaaatcaaaggcttcactggaatcgacgacccttacgaggcaccagtgaattgcgaggtagtgctgaaacacacaggagacgacgagtcgtgttcgccacgtcagatggctgagaacatcatctcttacctgcaaaacaaaggttatcttgagggctaagtcaaagtcggaaaaatcaacccaatttgtcgattctatatatggctaaaggattgttctccctgattcggtcagaagcttgagacctggaaacgatgtcgtctcgcttcgtcacactatcatttgttcttgaattgtgttgaagtcaaaagccaaagggaatatatctatatttgttctaatcatcatttagttagtttataaagagtttttgctccaatgatatcgactgtgttgtataatgtgaattaataaagtggatttcgttgaaaaaaaaaaaaaaaaaaaaaaagtcgacgcggccgcgaattccagatctatgaatcgtagatactgaaaancccgcaagttcacttcaactgtgaattc

SEQ ID NO: 76454 - protein, 313 aa, Arabidopsis thaliana
  peptide (1)..(313): Ceres Seq. ID no. 7108028
  misc_feature (134)..(290): Pfam Name: Adenylylsulphate kinase Pfam Description: Adenylylsulphate kinase
  misc_feature (21)..(313): Homolog of NCBI NO: 15236087 NR Description: adenosine-5-phosphosulfate-kinase; protein id: supported by cDNA: gi_18087562, supported by cDNA: gi_20453396, by cDNA: gi_2829132 [Arabidopsis thaliana]
  misc_feature (102)..(312): Homolog of NCBI NO: 15225999 NR Description: putative adenosine phosphosulfate kinase; protein At2g14750.1, supported by cDNA: 14216., supported by cDNA: supported by cDNA: gi_450234 [Arabidopsis thaliana]
  misc_feature (102)..(312): Homolog of NCBI NO: 21553403 NR Description: putative adenosine phosphosulfate kinase
  misc_feature (35)..(312): Homolog of NCBI NO: 9757873 NR Description: adenylylsulfate kinase-like protein [Arabidopsis
  misc_feature (35)..(312): Homolog of NCBI NO: 18425199 NR Description: adenylylsulfate kinase-like protein; protein id: supported by cDNA: 125039. [Arabidopsis thaliana] putative adenylylsulfate kinase [Arabidopsis thaliana]
  misc_feature (35)..(312): Homolog of NCBI NO: 21537248 NR Description: adenylylsulfate kinase-like protein [Arabidopsis
  misc_feature (114)..(312): Homolog of NCBI NO: 7387809 NR Description: Adenylylsulfate kinase, chloroplast precursor
  misc_feature (111)..(311): Homolog of NCBI NO: 34393551 NR Description: putative adenosine-5'-phosphosulfate kinase
  misc_feature (114)..(312): Homolog of NCBI NO: 15228666 NR Description: putative adenylylsulfate kinase; protein id: [Arabidopsis thaliana] >gi|6006852|gb|AAF00628.1|AC009540_5
  misc_feature (111)..(311): Homolog of NCBI NO: 6563285 NR Description: adenosine-5'-phosphosulfate kinase [Zea mays]
EFAAASTNCKPPHSYWPSDSMEGLAIRASRPSVFCSIPGLGGDSHRKPPSDGFLKLPASSIPADSRKLVANSTSFHPISAVNVSAQASLTADFPALSETILKEGRNNGKEKAENIVWHESSICRCDRQQLLQQKGCVVWITGLSGSGKSTVACALSKALFERGKLTYTLDGDNVRHGLNRDLTFKAEHRTENIRRIGEVAKLFADVGVICIASLISPYRRDRDACRSLLPDGDFVEVFMDVPLHVCESRDPKGLYKLARAGKIKGFTGIDDPYEAPVNCEVVLKHTGDDESCSPRQMAENIISYLQNKGYLEG

SEQ ID NO: 76455 - protein, 293 aa, Arabidopsis thaliana; identical to SEQ ID NO: 40764
  peptide (1)..(293): Ceres Seq. ID no. 7108029
  misc_feature (114)..(270): Pfam Name: Adenylylsulphate kinase Pfam Description: Adenylylsulphate kinase
  misc_feature (1)..(293): Homolog of NCBI NO: 15236087 NR Description: adenosine-5-phosphosulfate-kinase; protein id: supported by cDNA: gi_18087562, supported by cDNA: gi_20453396, by cDNA: gi_2829132 [Arabidopsis thaliana]
  misc_feature (82)..(292): Homolog of NCBI NO: 15225999 NR Description: putative adenosine phosphosulfate kinase; protein At2g14750.1, supported by cDNA: 14216., supported by cDNA: supported by cDNA: gi_450234 [Arabidopsis thaliana]
  misc_feature (82)..(292): Homolog of NCBI NO: 21553403 NR Description: putative adenosine phosphosulfate kinase
  misc_feature (15)..(292): Homolog of NCBI NO: 9757873 NR Description: adenylylsulfate kinase-like protein [Arabidopsis
  misc_feature (15)..(292): Homolog of NCBI NO: 18425199 NR Description: adenylylsulfate kinase-like protein; protein id: supported by cDNA: 125039. [Arabidopsis thaliana] putative adenylylsulfate kinase [Arabidopsis thaliana]
  misc_feature (15)..(292): Homolog of NCBI NO: 21537248 NR Description: adenylylsulfate kinase-like protein [Arabidopsis
  misc_feature (94)..(292): Homolog of NCBI NO: 7387809 NR Description: Adenylylsulfate kinase, chloroplast precursor
  misc_feature (91)..(291): Homolog of NCBI NO: 34393551 NR Description: putative adenosine-5'-phosphosulfate kinase
  misc_feature (94)..(292): Homolog of NCBI NO: 15228666 NR Description: putative adenylylsulfate kinase; protein id: [Arabidopsis thaliana] >gi|6006852|gb|AAF00628.1|AC009540_5
  misc_feature (91)..(291): Homolog of NCBI NO: 6563285 NR Description: adenosine-5'-phosphosulfate kinase [Zea mays]

SEQ ID NO: 76456 - DNA, 939 bp, Arabidopsis thaliana
  misc_feature (1)..(939): Ceres Seq. ID no. 7108030
  misc_feature: MA Experiment ID: 108461 Result: Up-regulated in Transcription
  misc_feature: MA Experiment 108461 PARAMETER Experiment Name: At_Germinating_Seeds_cDNA_P Parameter: Age (day) Value: 1 vs. 0
  misc_feature: MA Experiment 108461 PARAMETER Experiment Name: At_Germinating_Seeds_cDNA_P Parameter: Tissue Value: Germinating Seeds
  misc_feature: MA Experiment ID: 108462 Result: Up-regulated in Transcription
  misc_feature: MA Experiment 108462 PARAMETER Experiment Name: At_Germinating_Seeds_cDNA_P Parameter: Age (day) Value: 2 vs. 0
  misc_feature: MA Experiment 108462 PARAMETER Experiment Name: At_Germinating_Seeds_cDNA_P Parameter: Tissue Value: Germinating Seeds
  misc_feature: MA Experiment ID: 108463 Result: Up-regulated in Transcription
  misc_feature: MA Experiment 108463 PARAMETER Experiment Name: At_Germinating_Seeds_cDNA_P Parameter: Age (day) Value: 3 vs. 0
  misc_feature: MA Experiment 108463 PARAMETER Experiment Name: At_Germinating_Seeds_cDNA_P Parameter: Tissue Value: Germinating Seeds
  misc_feature: MA Experiment ID: 108464 Result: Up-regulated in Transcription
  misc_feature: MA Experiment 108464 PARAMETER Experiment Name: At_Germinating_Seeds_cDNA_P Parameter: Age (day) Value: 4 vs. 0
  misc_feature: MA Experiment 108464 PARAMETER Experiment Name: At_Germinating_Seeds_cDNA_P Parameter: Tissue Value: Germinating Seeds
  misc_feature: MA Experiment ID: 108488 Result: Up-regulated in Transcription
  misc_feature: MA Experiment ID: 20000069 Result: Down-regulated in Transcription
  misc_feature: MA Experiment 20000069 PARAMETER Experiment Name: At_100uM_ABA_Mutants_cDNA_P Parameter: Plant Line Value: CS23
  misc_feature: MA Experiment 20000069 PARAMETER Experiment Name: At_100uM_ABA_Mutants_cDNA_P Parameter: Timepoint (hr) Value: 6
  misc_feature: MA Experiment 20000069 PARAMETER Experiment Name: At_100uM_ABA_Mutants_cDNA_P Parameter: Tissue Value: Aerial
  misc_feature: MA Experiment 20000069 PARAMETER Experiment Name: At_100uM_ABA_Mutants_cDNA_P Parameter: Treatment Value: 100uM ABA vs. No Treatment
  misc_feature: MA Experiment ID: 20000070 Result: Down-regulated in Transcription
  misc_feature: MA Experiment 20000070 PARAMETER Experiment Name: At_100uM_ABA_Mutants_cDNA_P Parameter: Plant Line Value: CS24
  misc_feature: MA Experiment 20000070 PARAMETER Experiment Name: At_100uM_ABA_Mutants_cDNA_P Parameter: Timepoint (hr) Value: 6
  misc_feature: MA Experiment 20000070 PARAMETER Experiment Name: At_100uM_ABA_Mutants_cDNA_P Parameter: Tissue Value: Aerial
  misc_feature: MA Experiment 20000070 PARAMETER Experiment Name: At_100uM_ABA_Mutants_cDNA_P Parameter: Treatment Value: 100uM ABA vs. No Treatment
  misc_feature: MA Experiment ID: 20000086 Result: Down-regulated in Transcription
  misc_feature: MA Experiment 20000086 PARAMETER Experiment Name: At_100uM_ABA_Mutants_cDNA_P Parameter: Plant Line Value: CS22
  misc_feature: MA Experiment 20000086 PARAMETER Experiment Name: At_100uM_ABA_Mutants_cDNA_P Parameter: Timepoint (hr) Value: 6
  misc_feature: MA Experiment 20000086 PARAMETER Experiment Name: At_100uM_ABA_Mutants_cDNA_P Parameter: Tissue Value: Aerial
  misc_feature: MA Experiment 20000086 PARAMETER Experiment Name: At_100uM_ABA_Mutants_cDNA_P Parameter: Treatment Value: 100uM ABA vs. No Treatment
  misc_feature: MA Experiment ID: 20000088 Result: Down-regulated in Transcription
  misc_feature: MA Experiment 20000088 PARAMETER Experiment Name: At_100uM_ABA_Mutants_cDNA_P Parameter: Plant Line Value: Landsberg
  misc_feature: MA Experiment 20000088 PARAMETER Experiment Name: At_100uM_ABA_Mutants_cDNA_P Parameter: Timepoint (hr) Value: 6
  misc_feature: MA Experiment 20000088 PARAMETER Experiment Name: At_100uM_ABA_Mutants_cDNA_P Parameter: Tissue Value: Aerial
  misc_feature: MA Experiment 20000088 PARAMETER Experiment Name: At_100uM_ABA_Mutants_cDNA_P Parameter: Treatment Value: 100uM ABA vs. No Treatment
  misc_feature: MA Experiment ID: 20000090 Result: Down-regulated in Transcription
  misc_feature: MA Experiment ID: 20000117 Result: Down-regulated in Transcription
  misc_feature: MA Experiment 20000117 PARAMETER Experiment Name: At_100uM_ABA_Mutants_cDNA_P Parameter: Plant Line Value: Columbia
  misc_feature: MA Experiment 20000117 PARAMETER Experiment Name: At_100uM_ABA_Mutants_cDNA_P Parameter: Timepoint (hr) Value: 6
  misc_feature: MA Experiment 20000117 PARAMETER Experiment Name: At_100uM_ABA_Mutants_cDNA_P Parameter: Tissue Value: Aerial
  misc_feature: MA Experiment 20000117 PARAMETER Experiment Name: At_100uM_ABA_Mutants_cDNA_P Parameter: Treatment Value: 100uM ABA vs. No Treatment
  misc_feature: MA Experiment ID: 20000180 Result: Up-regulated in Transcription
  misc_feature: MA Experiment 20000180 PARAMETER Experiment Name: At_Germinating_Seeds_P Parameter: Age (hr) Value: 24 vs. 0
  misc_feature: MA Experiment 20000180 PARAMETER Experiment Name: At_Germinating_Seeds_P Parameter: Tissue Value: Germinating Seeds
  misc_feature: MA Experiment ID: 20000224 Result: Down-regulated in Transcription
  misc_feature: MA Experiment ID: 20000264 Result: Down-regulated in Transcription
  misc_feature: MA Experiment 20000264 PARAMETER Experiment Name: At_Open_Flower_P Parameter: Age (day) Value: 21
  misc_feature: MA Experiment 20000264 PARAMETER Experiment Name: At_Open_Flower_P Parameter: Plant Line Value: WS
  misc_feature: MA Experiment 20000264 PARAMETER Experiment Name: At_Open_Flower_P Parameter: Tissue Value: Open Flower vs. Whole Plant
  misc_feature: MA Experiment ID: 20000267 Result: Down-regulated in Transcription
  misc_feature: MA Experiment 20000267 PARAMETER Experiment Name: At_Drought_P Parameter: Age (day) Value: 7
  misc_feature: MA Experiment 20000267 PARAMETER Experiment Name: At_Drought_P Parameter: Organism Value: A. thaliana
  misc_feature: MA Experiment 20000267 PARAMETER Experiment Name: At_Drought_P Parameter: Plant Line Value: WS
  misc_feature: MA Experiment 20000267 PARAMETER Experiment Name: At_Drought_P Parameter: Timepoint (hr) Value: 6
  misc_feature: MA Experiment 20000267 PARAMETER Experiment Name: At_Drought_P Parameter: Tissue Value: Whole Plant
  misc_feature: MA Experiment 20000267 PARAMETER Experiment Name: At_Drought_P Parameter: Treatment Value: Drought vs. No Drought
  misc_feature: MA Experiment ID: 20000268 Result: Down-regulated in Transcription
  misc_feature: MA Experiment 20000268 PARAMETER Experiment Name: At_100mM_NaCl__P Parameter: Age (day) Value: 14
  misc_feature: MA Experiment 20000268 PARAMETER Experiment Name: At_100mM_NaCl__P Parameter: Organism Value: A. thaliana
  misc_feature: MA Experiment 20000268 PARAMETER Experiment Name: At_100mM_NaCl__P Parameter: Plant Line Value: WS
  misc_feature: MA Experiment 20000268 PARAMETER Experiment Name: At_100mM_NaCl__P Parameter: Timepoint (hr) Value: 6
  misc_feature: MA Experiment 20000268 PARAMETER Experiment Name: At_100mM_NaCl__P Parameter: Tissue Value: Whole Plant
  misc_feature: MA Experiment 20000268 PARAMETER Experiment Name: At_100mM_NaCl__P Parameter: Treatment Value: 100mM NaCl vs. No Treatment
  misc_feature: MA Experiment ID: 20000436 Result: Down-regulated in Transcription
  misc_feature: MA Experiment 20000436 PARAMETER Experiment Name: At_Drought_P Parameter: Age (day) Value: 7
  misc_feature: MA Experiment 20000436 PARAMETER Experiment Name: At_Drought_P Parameter: Organism Value: A. thaliana
  misc_feature: MA Experiment 20000436 PARAMETER Experiment Name: At_Drought_P Parameter: Plant Line Value: WS
  misc_feature: MA Experiment 20000436 PARAMETER Experiment Name: At_Drought_P Parameter: Timepoint (hr) Value: 12
  misc_feature: MA Experiment 20000436 PARAMETER Experiment Name: At_Drought_P Parameter: Tissue Value: Whole Plant
  misc_feature: MA Experiment 20000436 PARAMETER Experiment Name: At_Drought_P Parameter: Treatment Value: Drought vs. No Drought
  misc_feature: MA Experiment ID: 20000437 Result: Down-regulated in Transcription
  misc_feature: MA Experiment 20000437 PARAMETER Experiment Name: At_Drought_P Parameter: Age (day) Value: 8
  misc_feature: MA Experiment 20000437 PARAMETER Experiment Name: At_Drought_P Parameter: Organism Value: A. thaliana
  misc_feature: MA Experiment 20000437 PARAMETER Experiment Name: At_Drought_P Parameter: Plant Line Value: WS
  misc_feature: MA Experiment 20000437 PARAMETER Experiment Name: At_Drought_P Parameter: Timepoint (hr) Value: 24
  misc_feature: MA Experiment 20000437 PARAMETER Experiment Name: At_Drought_P Parameter: Tissue Value: Whole Plant
  misc_feature: MA Experiment 20000437 PARAMETER Experiment Name: At_Drought_P Parameter: Treatment Value: Drought vs. No Drought
  misc_feature: MA Experiment ID: 20000439 Result: Down-regulated in Transcription
  misc_feature: MA Experiment 20000439 PARAMETER Experiment Name: At_Roots__P Parameter: Age (day) Value: 14 vs. 21
  misc_feature: MA Experiment 20000439 PARAMETER Experiment Name: At_Roots__P Parameter: Organism Value: A. thaliana
  misc_feature: MA Experiment 20000439 PARAMETER Experiment Name: At_Roots__P Parameter: Tissue Value: Roots vs. Whole Plant
  misc_feature: MA Experiment ID: 20000794 Result: Down-regulated in Transcription
  misc_feature: MA Experiment 20000794 PARAMETER Experiment Name: At_Petals_P Parameter: Age (day) Value: 23-25 days
  misc_feature: MA Experiment 20000794 PARAMETER Experiment Name: At_Petals_P Parameter: Plant Line Value: WS
  misc_feature: MA Experiment 20000794 PARAMETER Experiment Name: At_Petals_P Parameter: Tissue Value: Petals vs. Whole plant
  misc_feature: MA Experiment ID: 20001247 Result: Up-regulated in Transcription
  misc_feature: MA Experiment 20001247 PARAMETER Experiment Name: At_Far-red-induction_P Parameter: Age (day) Value: 7
  misc_feature: MA Experiment 20001247 PARAMETER Experiment Name: At_Far-red-induction_P Parameter: Light Value: Far-red vs. White
  misc_feature: MA Experiment 20001247 PARAMETER Experiment Name: At_Far-red-induction_P Parameter: Organism Value: A. thaliana
  misc_feature: MA Experiment 20001247 PARAMETER Experiment Name: At_Far-red-induction_P Parameter: Plant Line Value: Columbia
  misc_feature: MA Experiment 20001247 PARAMETER Experiment Name: At_Far-red-induction_P Parameter: Timepoint (hr) Value: 1
  misc_feature: MA Experiment 20001247 PARAMETER Experiment Name: At_Far-red-induction_P Parameter: Tissue Value: Whole Plant
  misc_feature: MA Experiment ID: 20001450 Result: Up-regulated in Transcription
  misc_feature: MA Experiment 20001450 PARAMETER Experiment Name: At_Far-red-induction_P Parameter: Age (day) Value: 7
  misc_feature: MA Experiment 20001450 PARAMETER Experiment Name: At_Far-red-induction_P Parameter: Light Value: Far-red vs. White
  misc_feature: MA Experiment 20001450 PARAMETER Experiment Name: At_Far-red-induction_P Parameter: Organism Value: A. thaliana
  misc_feature: MA Experiment 20001450 PARAMETER Experiment Name: At_Far-red-induction_P Parameter: Plant Line Value: Columbia
  misc_feature: MA Experiment 20001450 PARAMETER Experiment Name: At_Far-red-induction_P Parameter: Timepoint (hr) Value: 8
  misc_feature: MA Experiment 20001450 PARAMETER Experiment Name: At_Far-red-induction_P Parameter: Tissue Value: Whole Plant
  misc_feature: MA Experiment ID: 20001451 Result: Up-regulated in Transcription
  misc_feature: MA Experiment 20001451 PARAMETER Experiment Name: At_Far-red-induction_P Parameter: Age (day) Value: 7
  misc_feature: MA Experiment 20001451 PARAMETER Experiment Name: At_Far-red-induction_P Parameter: Light Value: Far-red vs. White
  misc_feature: MA Experiment 20001451 PARAMETER Experiment Name: At_Far-red-induction_P Parameter: Organism Value: A. thaliana
  misc_feature: MA Experiment 20001451 PARAMETER Experiment Name: At_Far-red-induction_P Parameter: Plant Line Value: Columbia
  misc_feature: MA Experiment 20001451 PARAMETER Experiment Name: At_Far-red-induction_P Parameter: Timepoint (hr) Value: 24
  misc_feature: MA Experiment 20001451 PARAMETER Experiment Name: At_Far-red-induction_P Parameter: Tissue Value: Whole Plant
  misc_feature: MA Experiment ID: 20001554 Result: Down-regulated in Transcription
  misc_feature: MA Experiment 20001554 PARAMETER Experiment Name: At_Drought_Soil_Dry_P Parameter: Age (day) Value: 21
  misc_feature: MA Experiment 20001554 PARAMETER Experiment Name: At_Drought_Soil_Dry_P Parameter: Organism Value: A. thaliana
  misc_feature: MA Experiment 20001554 PARAMETER Experiment Name: At_Drought_Soil_Dry_P Parameter: Plant Line Value: WS
  misc_feature: MA Experiment 20001554 PARAMETER Experiment Name: At_Drought_Soil_Dry_P Parameter: Post Timepoint (hr) Value: None
  misc_feature: MA Experiment 20001554 PARAMETER Experiment Name: At_Drought_Soil_Dry_P Parameter: Post-Treatment Value: None
  misc_feature: MA Experiment 20001554 PARAMETER Experiment Name: At_Drought_Soil_Dry_P Parameter: Timepoint (day) Value: 7
  misc_feature: MA Experiment 20001554 PARAMETER Experiment Name: At_Drought_Soil_Dry_P Parameter: Treatment Value: Drought vs. No Drought
  misc_feature: MA Experiment ID: 20001555 Result: Down-regulated in Transcription
  misc_feature: MA Experiment 20001555 PARAMETER Experiment Name: At_Drought_Soil_Dry_P Parameter: Age (day) Value: 24
  misc_feature: MA Experiment 20001555 PARAMETER Experiment Name: At_Drought_Soil_Dry_P Parameter: Organism Value: A. thaliana
  misc_feature: MA Experiment 20001555 PARAMETER Experiment Name: At_Drought_Soil_Dry_P Parameter: Plant Line Value: WS
  misc_feature: MA Experiment 20001555 PARAMETER Experiment Name: At_Drought_Soil_Dry_P Parameter: Post Timepoint (hr) Value: None
  misc_feature: MA Experiment 20001555 PARAMETER Experiment Name: At_Drought_Soil_Dry_P Parameter: Post-Treatment Value: None
  misc_feature: MA Experiment 20001555 PARAMETER Experiment Name: At_Drought_Soil_Dry_P Parameter: Timepoint (day) Value: 10
  misc_feature: MA Experiment 20001555 PARAMETER Experiment Name: At_Drought_Soil_Dry_P Parameter: Treatment Value: Drought vs. No Drought
  misc_feature: MA Experiment ID: 20001556 Result: Down-regulated in Transcription
  misc_feature: MA Experiment 20001556 PARAMETER Experiment Name: At_Drought_Soil_Dry_P Parameter: Age (day) Value: 26
  misc_feature: MA Experiment 20001556 PARAMETER Experiment Name: At_Drought_Soil_Dry_P Parameter: Organism Value: A. thaliana
  misc_feature: MA Experiment 20001556 PARAMETER Experiment Name: At_Drought_Soil_Dry_P Parameter: Plant Line Value: WS
  misc_feature: MA Experiment 20001556 PARAMETER Experiment Name: At_Drought_Soil_Dry_P Parameter: Post Timepoint (hr) Value: None
  misc_feature: MA Experiment 20001556 PARAMETER Experiment Name: At_Drought_Soil_Dry_P Parameter: Post-Treatment Value: None
  misc_feature: MA Experiment 20001556 PARAMETER Experiment Name: At_Drought_Soil_Dry_P Parameter: Timepoint (day) Value: 12
  misc_feature: MA Experiment 20001556 PARAMETER Experiment Name: At_Drought_Soil_Dry_P Parameter: Treatment Value: Drought vs. No Drought
  misc_feature: MA Experiment ID: 20001558 Result: Up-regulated in Transcription
  misc_feature: MA Experiment 20001558 PARAMETER Experiment Name: At_Drought_Soil_Dry_P Parameter: Age (day) Value: 27
  misc_feature: MA Experiment 20001558 PARAMETER Experiment Name: At_Drought_Soil_Dry_P Parameter: Organism Value: A. thaliana
  misc_feature: MA Experiment 20001558 PARAMETER Experiment Name: At_Drought_Soil_Dry_P Parameter: Plant Line Value: WS
  misc_feature: MA Experiment 20001558 PARAMETER Experiment Name: At_Drought_Soil_Dry_P Parameter: Post Timepoint (hr) Value: 6
  misc_feature: MA Experiment 20001558 PARAMETER Experiment Name: At_Drought_Soil_Dry_P Parameter: Post-Treatment Value: Re-Water vs. No Drought
  misc_feature: MA Experiment 20001558 PARAMETER Experiment Name: At_Drought_Soil_Dry_P Parameter: Timepoint (day) Value: 13
  misc_feature: MA Experiment 20001558 PARAMETER Experiment Name: At_Drought_Soil_Dry_P Parameter: Treatment Value: Drought vs. No Drought
  misc_feature: MA Experiment ID: 20001559 Result: Down-regulated in Transcription
  misc_feature: MA Experiment 20001559 PARAMETER Experiment Name: At_Drought_Soil_Dry_P Parameter: Age (day) Value: 28
  misc_feature: MA Experiment 20001559 PARAMETER Experiment Name: At_Drought_Soil_Dry_P Parameter: Organism Value: A. thaliana
  misc_feature: MA Experiment 20001559 PARAMETER Experiment Name: At_Drought_Soil_Dry_P Parameter: Plant Line Value: WS
  misc_feature: MA Experiment 20001559 PARAMETER Experiment Name: At_Drought_Soil_Dry_P Parameter: Post Timepoint (hr) Value: 29
  misc_feature: MA Experiment 20001559 PARAMETER Experiment Name: At_Drought_Soil_Dry_P Parameter: Post-Treatment Value: Re-Water vs. No Drought
  misc_feature: MA Experiment 20001559 PARAMETER Experiment Name: At_Drought_Soil_Dry_P Parameter: Timepoint (day) Value: 14
  misc_feature: MA Experiment 20001559 PARAMETER Experiment Name: At_Drought_Soil_Dry_P Parameter: Treatment Value: Drought vs. No Drought
  misc_feature: MA Experiment ID: 20001560 Result: Up-regulated in Transcription
  misc_feature: MA Experiment 20001560 PARAMETER Experiment Name: At_Drought_Soil_Dry_P Parameter: Age (day) Value: 28
  misc_feature: MA Experiment 20001560 PARAMETER Experiment Name: At_Drought_Soil_Dry_P Parameter: Organism Value: A. thaliana
  misc_feature: MA Experiment 20001560 PARAMETER Experiment Name: At_Drought_Soil_Dry_P Parameter: Plant Line Value: WS
  misc_feature: MA Experiment 20001560 PARAMETER Experiment Name: At_Drought_Soil_Dry_P Parameter: Post Timepoint (hr) Value: None
  misc_feature: MA Experiment 20001560 PARAMETER Experiment Name: At_Drought_Soil_Dry_P Parameter: Post-Treatment Value: None
  misc_feature: MA Experiment 20001560 PARAMETER Experiment Name: At_Drought_Soil_Dry_P Parameter: Timepoint (day) Value: 14
  misc_feature: MA Experiment 20001560 PARAMETER Experiment Name: At_Drought_Soil_Dry_P Parameter: Treatment Value: Drought vs. No Drought
  misc_feature: MA Experiment ID: 20001757 Result: Up-regulated in Transcription
  misc_feature: MA Experiment 20001757 PARAMETER Experiment Name: At_50mM_NH4NO3_L-to-H_P Parameter: Timepoint (hr) Value: 6
  misc_feature: MA Experiment 20001757 PARAMETER Experiment Name: At_50mM_NH4NO3_L-to-H_P Parameter: Tissue Value: Leaf
  misc_feature: MA Experiment 20001757 PARAMETER Experiment Name: At_50mM_NH4NO3_L-to-H_P Parameter: Treatment Value: 50mM NH4NO3 vs 100mM Mannitol
  misc_feature: MA Experiment ID: 20001904 Result: Down-regulated in Transcription
  misc_feature: MA Experiment 20001904 PARAMETER Experiment Name: At_Drought_Reproduction_P Parameter: Age (day) Value: 37
  misc_feature: MA Experiment 20001904 PARAMETER Experiment Name: At_Drought_Reproduction_P Parameter: Organism Value: A. thaliana
  misc_feature: MA Experiment 20001904 PARAMETER Experiment Name: At_Drought_Reproduction_P Parameter: Plant Line Value: WS
  misc_feature: MA Experiment 20001904 PARAMETER Experiment Name: At_Drought_Reproduction_P Parameter: Timepoint (day) Value: 7
  misc_feature: MA Experiment 20001904 PARAMETER Experiment Name: At_Drought_Reproduction_P Parameter: Tissue Value: Rosettes
  misc_feature: MA Experiment 20001904 PARAMETER Experiment Name: At_Drought_Reproduction_P Parameter: Treatment Value: Drought vs. No Drought
  misc_feature: MA Experiment ID: 20001905 Result: Down-regulated in Transcription
  misc_feature: MA Experiment 20001905 PARAMETER Experiment Name: At_Drought_Reproduction_P Parameter: Age (day) Value: 40
  misc_feature: MA Experiment 20001905 PARAMETER Experiment Name: At_Drought_Reproduction_P Parameter: Organism Value: A. thaliana
  misc_feature: MA Experiment 20001905 PARAMETER Experiment Name: At_Drought_Reproduction_P Parameter: Plant Line Value: WS
  misc_feature: MA Experiment 20001905 PARAMETER Experiment Name: At_Drought_Reproduction_P Parameter: Timepoint (day) Value: 10
  misc_feature: MA Experiment 20001905 PARAMETER Experiment Name: At_Drought_Reproduction_P Parameter: Tissue Value: Rosettes
  misc_feature: MA Experiment 20001905 PARAMETER Experiment Name: At_Drought_Reproduction_P Parameter: Treatment Value: Drought vs. No Drought
  misc_feature: MA Experiment ID: 20001906 Result: Down-regulated in Transcription
  misc_feature: MA Experiment 20001906 PARAMETER Experiment Name: At_Drought_Reproduction_P Parameter: Age (day) Value: 35
  misc_feature: MA Experiment 20001906 PARAMETER Experiment Name: At_Drought_Reproduction_P Parameter: Organism Value: A. thaliana
  misc_feature: MA Experiment 20001906 PARAMETER Experiment Name: At_Drought_Reproduction_P Parameter: Plant Line Value: WS
  misc_feature: MA Experiment 20001906 PARAMETER Experiment Name: At_Drought_Reproduction_P Parameter: Timepoint (day) Value: 5
  misc_feature: MA Experiment 20001906 PARAMETER Experiment Name: At_Drought_Reproduction_P Parameter: Tissue Value: Siliques
  misc_feature: MA Experiment 20001906 PARAMETER Experiment Name: At_Drought_Reproduction_P Parameter: Treatment Value: Drought vs. No Drought
  misc_feature: MA Experiment ID: 20001908 Result: Down-regulated in Transcription
  misc_feature: MA Experiment 20001908 PARAMETER Experiment Name: At_Drought_Reproduction_P Parameter: Age (day) Value: 40
  misc_feature: MA Experiment 20001908 PARAMETER Experiment Name: At_Drought_Reproduction_P Parameter: Organism Value: A. thaliana
  misc_feature: MA Experiment 20001908 PARAMETER Experiment Name: At_Drought_Reproduction_P Parameter: Plant Line Value: WS
  misc_feature: MA Experiment 20001908 PARAMETER Experiment Name: At_Drought_Reproduction_P Parameter: Timepoint (day) Value: 10
  misc_feature: MA Experiment 20001908 PARAMETER Experiment Name: At_Drought_Reproduction_P Parameter: Tissue Value: Siliques
  misc_feature: MA Experiment 20001908 PARAMETER Experiment Name: At_Drought_Reproduction_P Parameter: Treatment Value: Drought vs. No Drought
  misc_feature: MA Experiment ID: 20001911 Result: Down-regulated in Transcription
  misc_feature: MA Experiment 20001911 PARAMETER Experiment Name: At_Drought_Reproduction_P Parameter: Age (day) Value: 40
  misc_feature: MA Experiment 20001911 PARAMETER Experiment Name: At_Drought_Reproduction_P Parameter: Organism Value: A. thaliana
  misc_feature: MA Experiment 20001911 PARAMETER Experiment Name: At_Drought_Reproduction_P Parameter: Plant Line Value: WS
  misc_feature: MA Experiment 20001911 PARAMETER Experiment Name: At_Drought_Reproduction_P Parameter: Timepoint (day) Value: 10
  misc_feature: MA Experiment 20001911 PARAMETER Experiment Name: At_Drought_Reproduction_P Parameter: Tissue Value: Flowers
  misc_feature: MA Experiment 20001911 PARAMETER Experiment Name: At_Drought_Reproduction_P Parameter: Treatment Value: Drought vs. No Drought
cttcttcatctacaacaatggctggagttgcctttggttcctttgatgattcattcagcttggcttctctaagagcttacctcgctgagttcatctccactttactctttgttttcgctggtgttggctctgccattgcctacgcaaagctgacgtcggacgctgctcttgatacaccgggactagtggccatcgcggtttgtcatggttttgctctcttcgtggccgttgcaatcggagccaacatctccggtggccatgtgaacccagccgtcacttttggtcttgctgtcggtggtcaaatcacagtcatcaccggagttttctactggatcgctcagcttctcggctccaccgccgcttgtttcctccttaaatacgtcaccggtggattggcggttccaacccacagcgttgcggctggactaggatcgatagaaggagtagtgatggagatcatcatcaccttcgctttggtctacactgtctacgccaccgccgctgatcccaagaagggttctctcggaaccatcgctcctctcgccattggtcttatcgttggtgccaacatcctcgccgccggtccattctccggtggatccatgaacccagcacgttcctttggaccagctgttgctgccggagacttctctggtcactgggtctactgggttggaccactcatcggtggtggacttgccggacttatctacggaaatgtcttcatgggttcttccgaacatgttcctcttgcttctgctgatttctaaggaaacaagtgatgattcttgattcatgtttctgtgtttggttactttgcctcgatctttcttgttttgtttggagtttggtccggtttcgttgtaatttttatccaatttgtatgaatattatttaatggatggctgttttggttataaactaaattactcacactgg

SEQ ID NO: 76457 - protein, 255 aa, Arabidopsis thaliana
  peptide (1)..(255): Ceres Seq. ID no. 7108031
  misc_feature (6)..(255): Homolog of NCBI NO: 15233320 NR Description: delta tonoplast integral protein (delta-TIP); id: At3g16240.1, supported by cDNA: 19689., supported by cDNA: supported by cDNA: gi_17473871, supported by cDNA: tonoplast
  misc_feature (6)..(255): Homolog of NCBI NO: 17473872 NR Description: delta tonoplast intrinsic protein [Arabidopsis >gi|20148587|gb|AAM10184.1| delta tonoplast intrinsic protein
  misc_feature (6)..(252): Homolog of NCBI NO: 7441258 NR Description: probable water channel protein delta-VM23 - radish
  misc_feature (6)..(255): Homolog of NCBI NO: 7441289 NR Description: tonoplast intrinsic protein, delta type - upland
  misc_feature (6)..(252): Homolog of NCBI NO: 7441281 NR Description: water channel protein - common sunflower
  misc_feature (6)..(252): Homolog of NCBI NO: 7441273 NR Description: aquaporin TIP7 - common sunflower
  misc_feature (6)..(252): Homolog of NCBI NO: 7441271 NR Description: aquaporin TIP18 - common sunflower
  misc_feature (6)..(255): Homolog of NCBI NO: 11276920 NR Description: aquaporin [imported] - Vernicia fordii
  misc_feature (6)..(255): Homolog of NCBI NO: 12006841 NR Description: putative delta TIP [Nicotiana glauca]
  misc_feature (6)..(252): Homolog of NCBI NO: 11276919 NR Description: water channel protein MipK [imported] - common plant >gi|4884868|gb|AAD31848.1|AF133532_1 water channel protein
SSSTTMAGVAFGSFDDSFSLASLRAYLAEFISTLLFVFAGVGSAIAYAKLTSDAALDTPGLVAIAVCHGFALFVAVAIGANISGGHVNPAVTFGLAVGGQITVITGVFYWIAQLLGSTAACFLLKYVTGGLAVPTHSVAAGLGSIEGVVMEIIITFALVYTVYATAADPKKGSLGTIAPLAIGLIVGANILAAGPFSGGSMNPARSFGPAVAAGDFSGHWVYWVGPLIGGGLAGLIYGNVFMGSSEHVPLASADF

SEQ ID NO: 76458 - protein, 250 aa, Arabidopsis thaliana; identical to SEQ ID NO: 30966
  peptide (1)..(250): Ceres Seq. ID no. 7108032
  misc_feature (1)..(250): Homolog of NCBI NO: 15233320 NR Description: delta tonoplast integral protein (delta-TIP); id: At3g16240.1, supported by cDNA: 19689., supported by cDNA: supported by cDNA: gi_17473871, supported by cDNA: tonoplast
  misc_feature (1)..(250): Homolog of NCBI NO: 17473872 NR Description: delta tonoplast intrinsic protein [Arabidopsis >gi|20148587|gb|AAM10184.1| delta tonoplast intrinsic protein
  misc_feature (1)..(247): Homolog of NCBI NO: 7441258 NR Description: probable water channel protein delta-VM23 - radish
  misc_feature (1)..(250): Homolog of NCBI NO: 7441289 NR Description: tonoplast intrinsic protein, delta type - upland
  misc_feature (1)..(247): Homolog of NCBI NO: 7441281 NR Description: water channel protein - common sunflower
  misc_feature (1)..(247): Homolog of NCBI NO: 7441273 NR Description: aquaporin TIP7 - common sunflower
  misc_feature (1)..(247): Homolog of NCBI NO: 7441271 NR Description: aquaporin TIP18 - common sunflower
  misc_feature (1)..(250): Homolog of NCBI NO: 11276920 NR Description: aquaporin [imported] - Vernicia fordii
  misc_feature (1)..(250): Homolog of NCBI NO: 12006841 NR Description: putative delta TIP [Nicotiana glauca]
  misc_feature (1)..(247): Homolog of NCBI NO: 11276919 NR Description: water channel protein MipK [imported] - common plant >gi|4884868|gb|AAD31848.1|AF133532_1 water channel protein

SEQ ID NO: 76459 - DNA, 740 bp, Arabidopsis thaliana
  misc_feature (1)..(740): Ceres Seq. ID no. 7108041
  misc_feature: MA Experiment ID: 108435 Result: Down-regulated in Transcription
  misc_feature: MA Experiment 108435 PARAMETER Experiment Name: At_stm_Mutants_cDNA_P Parameter: Plant Line Value: wt Landsburg vs stm
  misc_feature: MA Experiment 108435 PARAMETER Experiment Name: At_stm_Mutants_cDNA_P Parameter: Tissue Value: Shoot Apical Meristem Region
  misc_feature: MA Experiment ID: 108488 Result: Up-regulated in Transcription
  misc_feature: MA Experiment ID: 108595 Result: Down-regulated in Transcription
  misc_feature: MA Experiment 108595 PARAMETER Experiment Name: At_Ler-pi_Ovule_cDNA_P Parameter: Plant Line Value: null
  misc_feature: MA Experiment ID: 20000070 Result: Down-regulated in Transcription
  misc_feature: MA Experiment 20000070 PARAMETER Experiment Name: At_100uM_ABA_Mutants_cDNA_P Parameter: Plant Line Value: CS24
  misc_feature: MA Experiment 20000070 PARAMETER Experiment Name: At_100uM_ABA_Mutants_cDNA_P Parameter: Timepoint (hr) Value: 6
  misc_feature: MA Experiment 20000070 PARAMETER Experiment Name: At_100uM_ABA_Mutants_cDNA_P Parameter: Tissue Value: Aerial
  misc_feature: MA Experiment 20000070 PARAMETER Experiment Name: At_100uM_ABA_Mutants_cDNA_P Parameter: Treatment Value: 100uM ABA vs. No Treatment
  misc_feature: MA Experiment ID: 20000180 Result: Up-regulated in Transcription
  misc_feature: MA Experiment 20000180 PARAMETER Experiment Name: At_Germinating_Seeds_P Parameter: Age (hr) Value: 24 vs. 0
  misc_feature: MA Experiment 20000180 PARAMETER Experiment Name: At_Germinating_Seeds_P Parameter: Tissue Value: Germinating Seeds
  misc_feature: MA Experiment ID: 20000185 Result: Down-regulated in Transcription
  misc_feature: MA Experiment 20000185 PARAMETER Experiment Name: At_Roots__P Parameter: Age (day) Value: 7 vs. 21
  misc_feature: MA Experiment 20000185 PARAMETER Experiment Name: At_Roots__P Parameter: Organism Value: A. thaliana
  misc_feature: MA Experiment 20000185 PARAMETER Experiment Name: At_Roots__P Parameter: Tissue Value: Roots vs. Whole Plant
  misc_feature: MA Experiment ID: 20000224 Result: Up-regulated in Transcription
  misc_feature: MA Experiment ID: 20000439 Result: Down-regulated in Transcription
  misc_feature: MA Experiment 20000439 PARAMETER Experiment Name: At_Roots__P Parameter: Age (day) Value: 14 vs. 21
  misc_feature: MA Experiment 20000439 PARAMETER Experiment Name: At_Roots__P Parameter: Organism Value: A. thaliana
  misc_feature: MA Experiment 20000439 PARAMETER Experiment Name: At_Roots__P Parameter: Tissue Value: Roots vs. Whole Plant
  misc_feature: MA Experiment ID: 20001450 Result: Down-regulated in Transcription
  misc_feature: MA Experiment 20001450 PARAMETER Experiment Name: At_Far-red-induction_P Parameter: Age (day) Value: 7
  misc_feature: MA Experiment 20001450 PARAMETER Experiment Name: At_Far-red-induction_P Parameter: Light Value: Far-red vs. White
  misc_feature: MA Experiment 20001450 PARAMETER Experiment Name: At_Far-red-induction_P Parameter: Organism Value: A. thaliana
  misc_feature: MA Experiment 20001450 PARAMETER Experiment Name: At_Far-red-induction_P Parameter: Plant Line Value: Columbia
  misc_feature: MA Experiment 20001450 PARAMETER Experiment Name: At_Far-red-induction_P Parameter: Timepoint (hr) Value: 8
  misc_feature: MA Experiment 20001450 PARAMETER Experiment Name: At_Far-red-induction_P Parameter: Tissue Value: Whole Plant
cagtgtgagtaatttaggagcgagaaaaaatggcaaccatgtctgctcttcagagctcttttacttctctttctctatctcccagctcttccttcctcggccagcgtttaatttccccgatttccctctccgtcacttctccggtcaagcccgctgagaacccatgtcttgttcttgcaaagctcaagcgttgggaacgaaaagaatgcaaaccaaacagtcttccgattctccacaaaatgcatgtcaagtttggagatacagtcaaagtaatatctggacgcgacaagggtaaaatcggagaggttactaagattttcactcacaacagtaccattgtgatcaaagatgtgaacctcaaaacaaaacacatgaagagccgagaagagggagagcctggtcaaattgtcaagatagaagcacctatccacagctcaaatgtgatgttgtattcaaaagaaaaagacatattaagccgggtgggtcacaaggtacttgaagatggacagaaggtaagatatctgatcaaaacaggggaactcatcgacaccattgagaagtggaagctacttaaggaggctaaggataaggaaaccacccaagttgcagttacctccgcatcttagcgtctcatttctttcttcttcagtgcacttttgatataatagacctatgcattggatggatgtattgaatcccttttaaggtaaattataatatttctgctaaactactcacac

SEQ ID NO: 76460 - protein, 198 aa, Arabidopsis thaliana
  peptide (1)..(198): Ceres Seq. ID no. 7108042
  misc_feature (73)..(106): Pfam Name: KOW motif Pfam Description: KOW motif
  misc_feature (1)..(198): Homolog of NCBI NO: 1694974 NR Description: plastid ribosomal protein [Arabidopsis thaliana]
  misc_feature (1)..(198): Homolog of NCBI NO: 30696483 NR Description: 50S ribosomal protein L24, chloroplast precursor [Arabidopsis thaliana] >gi|27735245|sp|P92959|RK24_ARATH 50S protein L24, chloroplast precursor >gi|9758952|dbj|BAB09339.1|
  misc_feature (4)..(195): Homolog of NCBI NO: 132819 NR Description: 50S RIBOSOMAL PROTEIN L24, CHLOROPLAST PRECURSOR
  misc_feature (4)..(198): Homolog of NCBI NO: 400989 NR Description: 50S RIBOSOMAL PROTEIN L24, CHLOROPLAST PRECURSOR
  misc_feature (1)..(196): Homolog of NCBI NO: 132821 NR Description: 50S RIBOSOMAL PROTEIN L24, CHLOROPLAST PRECURSOR
  misc_feature (1)..(103): Homolog of NCBI NO: 30696487 NR Description: 50S ribosomal protein L24, chloroplast precursor
  misc_feature (89)..(198): Homolog of NCBI NO: 30696487 NR Description: 50S ribosomal protein L24, chloroplast precursor
  misc_feature (61)..(173): Homolog of NCBI NO: 22297636 NR Description: 50S ribosomal protein L24 [Thermosynechococcus BP- 1] >gi|22293813|dbj|BAC07645.1| 50S ribosomal protein L24
  misc_feature (66)..(173): Homolog of NCBI NO: 23042779 NR Description: hypothetical protein [Trichodesmium erythraeum
  misc_feature (61)..(173): Homolog of NCBI NO: 16329930 NR Description: 50S ribosomal protein L24 [Synechocystis sp. PCC
MATMSALQSSFTSLSLSPSSSFLGQRLISPISLSVTSPVKPAENPCLVLAKLKRWERKECKPNSLPILHKMHVKFGDTVKVISGRDKGKIGEVTKIFTHNSTIVIKDVNLKTKHMKSREEGEPGQIVKIEAPIHSSNVMLYSKEKDILSRVGHKVLEDGQKVRYLIKTGELIDTIEKWKLLKEAKDKETTQVAVTSAS

SEQ ID NO: 76461 - protein, 195 aa, Arabidopsis thaliana
  peptide (1)..(195): Ceres Seq. ID no. 7108043
  misc_feature (70)..(103): Pfam Name: KOW motif Pfam Description: KOW motif
  misc_feature (1)..(195): Homolog of NCBI NO: 1694974 NR Description: plastid ribosomal protein [Arabidopsis thaliana]
  misc_feature (1)..(195): Homolog of NCBI NO: 30696483 NR Description: 50S ribosomal protein L24, chloroplast precursor [Arabidopsis thaliana] >gi|27735245|sp|P92959|RK24_ARATH 50S protein L24, chloroplast precursor >gi|9758952|dbj|BAB09339.1|
  misc_feature (1)..(192): Homolog of NCBI NO: 132819 NR Description: 50S RIBOSOMAL PROTEIN L24, CHLOROPLAST PRECURSOR
  misc_feature (1)..(195): Homolog of NCBI NO: 400989 NR Description: 50S RIBOSOMAL PROTEIN L24, CHLOROPLAST PRECURSOR
  misc_feature (1)..(193): Homolog of NCBI NO: 132821 NR Description: 50S RIBOSOMAL PROTEIN L24, CHLOROPLAST PRECURSOR
  misc_feature (1)..(100): Homolog of NCBI NO: 30696487 NR Description: 50S ribosomal protein L24, chloroplast precursor
  misc_feature (86)..(195): Homolog of NCBI NO: 30696487 NR Description: 50S ribosomal protein L24, chloroplast precursor
  misc_feature (58)..(170): Homolog of NCBI NO: 22297636 NR Description: 50S ribosomal protein L24 [Thermosynechococcus BP- 1] >gi|22293813|dbj|BAC07645.1| 50S ribosomal protein L24
  misc_feature (63)..(170): Homolog of NCBI NO: 23042779 NR Description: hypothetical protein [Trichodesmium erythraeum
  misc_feature (58)..(170): Homolog of NCBI NO: 16329930 NR Description: 50S ribosomal protein L24 [Synechocystis sp. PCC
MSALQSSFTSLSLSPSSSFLGQRLISPISLSVTSPVKPAENPCLVLAKLKRWERKECKPNSLPILHKMHVKFGDTVKVISGRDKGKIGEVTKIFTHNSTIVIKDVNLKTKHMKSREEGEPGQIVKIEAPIHSSNVMLYSKEKDILSRVGHKVLEDGQKVRYLIKTGELIDTIEKWKLLKEAKDKETTQVAVTSAS

SEQ ID NO: 76462 - protein, 128 aa, Arabidopsis thaliana
  peptide (1)..(128): Ceres Seq. ID no. 7108044
  misc_feature (3)..(36): Pfam Name: KOW motif Pfam Description: KOW motif
  misc_feature (1)..(128): Homolog of NCBI NO: 1694974 NR Description: plastid ribosomal protein [Arabidopsis thaliana]
  misc_feature (1)..(128): Homolog of NCBI NO: 30696483 NR Description: 50S ribosomal protein L24, chloroplast precursor [Arabidopsis thaliana] >gi|27735245|sp|P92959|RK24_ARATH 50S protein L24, chloroplast precursor >gi|9758952|dbj|BAB09339.1|
  misc_feature (1)..(125): Homolog of NCBI NO: 132819 NR Description: 50S RIBOSOMAL PROTEIN L24, CHLOROPLAST PRECURSOR
  misc_feature (1)..(128): Homolog of NCBI NO: 400989 NR Description: 50S RIBOSOMAL PROTEIN L24, CHLOROPLAST PRECURSOR
  misc_feature (1)..(126): Homolog of NCBI NO: 132821 NR Description: 50S RIBOSOMAL PROTEIN L24, CHLOROPLAST PRECURSOR
  misc_feature (1)..(33): Homolog of NCBI NO: 30696487 NR Description: 50S ribosomal protein L24, chloroplast precursor
  misc_feature (19)..(128): Homolog of NCBI NO: 30696487 NR Description: 50S ribosomal protein L24, chloroplast precursor
  misc_feature (1)..(103): Homolog of NCBI NO: 22297636 NR Description: 50S ribosomal protein L24 [Thermosynechococcus BP- 1] >gi|22293813|dbj|BAC07645.1| 50S ribosomal protein L24
  misc_feature (1)..(103): Homolog of NCBI NO: 23042779 NR Description: hypothetical protein [Trichodesmium erythraeum
  misc_feature (1)..(103): Homolog of NCBI NO: 16329930 NR Description: 50S ribosomal protein L24 [Synechocystis sp. PCC
MHVKFGDTVKVISGRDKGKIGEVTKIFTHNSTIVIKDVNLKTKHMKSREEGEPGQIVKIEAPIHSSNVMLYSKEKDILSRVGHKVLEDGQKVRYLIKTGELIDTIEKWKLLKEAKDKETTQVAVTSAS

SEQ ID NO: 76463 - DNA, 843 bp, Arabidopsis thaliana
  misc_feature (1)..(843): Ceres Seq. ID no. 7108088
  misc_feature: MA Experiment ID: 108434 Result: Up-regulated in Transcription
  misc_feature: MA Experiment 108434 PARAMETER Experiment Name: At_Root_Tips_cDNA_P Parameter: Tissue Value: Root Tips
  misc_feature: MA Experiment ID: 108595 Result: Down-regulated in Transcription
  misc_feature: MA Experiment 108595 PARAMETER Experiment Name: At_Ler-pi_Ovule_cDNA_P Parameter: Plant Line Value: null
  misc_feature: MA Experiment ID: 20000069 Result: Down-regulated in Transcription
  misc_feature: MA Experiment 20000069 PARAMETER Experiment Name: At_100uM_ABA_Mutants_cDNA_P Parameter: Plant Line Value: CS23
  misc_feature: MA Experiment 20000069 PARAMETER Experiment Name: At_100uM_ABA_Mutants_cDNA_P Parameter: Timepoint (hr) Value: 6
  misc_feature: MA Experiment 20000069 PARAMETER Experiment Name: At_100uM_ABA_Mutants_cDNA_P Parameter: Tissue Value: Aerial
  misc_feature: MA Experiment 20000069 PARAMETER Experiment Name: At_100uM_ABA_Mutants_cDNA_P Parameter: Treatment Value: 100uM ABA vs. No Treatment
  misc_feature: MA Experiment ID: 20000070 Result: Down-regulated in Transcription
  misc_feature: MA Experiment 20000070 PARAMETER Experiment Name: At_100uM_ABA_Mutants_cDNA_P Parameter: Plant Line Value: CS24
  misc_feature: MA Experiment 20000070 PARAMETER Experiment Name: At_100uM_ABA_Mutants_cDNA_P Parameter: Timepoint (hr) Value: 6
  misc_feature: MA Experiment 20000070 PARAMETER Experiment Name: At_100uM_ABA_Mutants_cDNA_P Parameter: Tissue Value: Aerial
  misc_feature: MA Experiment 20000070 PARAMETER Experiment Name: At_100uM_ABA_Mutants_cDNA_P Parameter: Treatment Value: 100uM ABA vs. No Treatment
  misc_feature: MA Experiment ID: 20000071 Result: Down-regulated in Transcription
  misc_feature: MA Experiment 20000071 PARAMETER Experiment Name: At_100uM_ABA_Mutants_cDNA_P Parameter: Plant Line Value: CS8104
  misc_feature: MA Experiment 20000071 PARAMETER Experiment Name: At_100uM_ABA_Mutants_cDNA_P Parameter: Timepoint (hr) Value: 6
  misc_feature: MA Experiment 20000071 PARAMETER Experiment Name: At_100uM_ABA_Mutants_cDNA_P Parameter: Tissue Value: Aerial
  misc_feature: MA Experiment 20000071 PARAMETER Experiment Name: At_100uM_ABA_Mutants_cDNA_P Parameter: Treatment Value: 100uM ABA vs. No Treatment
  misc_feature: MA Experiment ID: 20000072 Result: Down-regulated in Transcription
  misc_feature: MA Experiment 20000072 PARAMETER Experiment Name: At_100uM_ABA_Mutants_cDNA_P Parameter: Plant Line Value: CS8105
  misc_feature: MA Experiment 20000072 PARAMETER Experiment Name: At_100uM_ABA_Mutants_cDNA_P Parameter: Timepoint (hr) Value: 6
  misc_feature: MA Experiment 20000072 PARAMETER Experiment Name: At_100uM_ABA_Mutants_cDNA_P Parameter: Tissue Value: Aerial
  misc_feature: MA Experiment 20000072 PARAMETER Experiment Name: At_100uM_ABA_Mutants_cDNA_P Parameter: Treatment Value: 100uM ABA vs. No Treatment
  misc_feature: MA Experiment ID: 20000086 Result: Down-regulated in Transcription
  misc_feature: MA Experiment 20000086 PARAMETER Experiment Name: At_100uM_ABA_Mutants_cDNA_P Parameter: Plant Line Value: CS22
  misc_feature: MA Experiment 20000086 PARAMETER Experiment Name: At_100uM_ABA_Mutants_cDNA_P Parameter: Timepoint (hr) Value: 6
  misc_feature: MA Experiment 20000086 PARAMETER Experiment Name: At_100uM_ABA_Mutants_cDNA_P Parameter: Tissue Value: Aerial
  misc_feature: MA Experiment 20000086 PARAMETER Experiment Name: At_100uM_ABA_Mutants_cDNA_P Parameter: Treatment Value: 100uM ABA vs. No Treatment
  misc_feature: MA Experiment ID: 20000087 Result: Down-regulated in Transcription
  misc_feature: MA Experiment 20000087 PARAMETER Experiment Name: At_100uM_ABA_Mutants_cDNA_P Parameter: Plant Line Value: WS
  misc_feature: MA Experiment 20000087 PARAMETER Experiment Name: At_100uM_ABA_Mutants_cDNA_P Parameter: Timepoint (hr) Value: 6
  misc_feature: MA Experiment 20000087 PARAMETER Experiment Name: At_100uM_ABA_Mutants_cDNA_P Parameter: Tissue Value: Aerial
  misc_feature: MA Experiment 20000087 PARAMETER Experiment Name: At_100uM_ABA_Mutants_cDNA_P Parameter: Treatment Value: 100uM ABA vs. No Treatment
  misc_feature: MA Experiment ID: 20000088 Result: Down-regulated in Transcription
  misc_feature: MA Experiment 20000088 PARAMETER Experiment Name: At_100uM_ABA_Mutants_cDNA_P Parameter: Plant Line Value: Landsberg
  misc_feature: MA Experiment 20000088 PARAMETER Experiment Name: At_100uM_ABA_Mutants_cDNA_P Parameter: Timepoint (hr) Value: 6
  misc_feature: MA Experiment 20000088 PARAMETER Experiment Name: At_100uM_ABA_Mutants_cDNA_P Parameter: Tissue Value: Aerial
  misc_feature: MA Experiment 20000088 PARAMETER Experiment Name: At_100uM_ABA_Mutants_cDNA_P Parameter: Treatment Value: 100uM ABA vs. No Treatment
  misc_feature: MA Experiment ID: 20000117 Result: Down-regulated in Transcription
  misc_feature: MA Experiment 20000117 PARAMETER Experiment Name: At_100uM_ABA_Mutants_cDNA_P Parameter: Plant Line Value: Columbia
  misc_feature: MA Experiment 20000117 PARAMETER Experiment Name: At_100uM_ABA_Mutants_cDNA_P Parameter: Timepoint (hr) Value: 6
  misc_feature: MA Experiment 20000117 PARAMETER Experiment Name: At_100uM_ABA_Mutants_cDNA_P Parameter: Tissue Value: Aerial
  misc_feature: MA Experiment 20000117 PARAMETER Experiment Name: At_100uM_ABA_Mutants_cDNA_P Parameter: Treatment Value: 100uM ABA vs. No Treatment
  misc_feature: MA Experiment ID: 20000437 Result: Down-regulated in Transcription
  misc_feature: MA Experiment 20000437 PARAMETER Experiment Name: At_Drought_P Parameter: Age (day) Value: 8
  misc_feature: MA Experiment 20000437 PARAMETER Experiment Name: At_Drought_P Parameter: Organism Value: A. thaliana
  misc_feature: MA Experiment 20000437 PARAMETER Experiment Name: At_Drought_P Parameter: Plant Line Value: WS
  misc_feature: MA Experiment 20000437 PARAMETER Experiment Name: At_Drought_P Parameter: Timepoint (hr) Value: 24
  misc_feature: MA Experiment 20000437 PARAMETER Experiment Name: At_Drought_P Parameter: Tissue Value: Whole Plant
  misc_feature: MA Experiment 20000437 PARAMETER Experiment Name: At_Drought_P Parameter: Treatment Value: Drought vs. No Drought
  misc_feature: MA Experiment ID: 20000439 Result: Down-regulated in Transcription
  misc_feature: MA Experiment 20000439 PARAMETER Experiment Name: At_Roots__P Parameter: Age (day) Value: 14 vs. 21
  misc_feature: MA Experiment 20000439 PARAMETER Experiment Name: At_Roots__P Parameter: Organism Value: A. thaliana
  misc_feature: MA Experiment 20000439 PARAMETER Experiment Name: At_Roots__P Parameter: Tissue Value: Roots vs. Whole Plant
  misc_feature: MA Experiment ID: 20000794 Result: Down-regulated in Transcription
  misc_feature: MA Experiment 20000794 PARAMETER Experiment Name: At_Petals_P Parameter: Age (day) Value: 23-25 days
  misc_feature: MA Experiment 20000794 PARAMETER Experiment Name: At_Petals_P Parameter: Plant Line Value: WS
  misc_feature: MA Experiment 20000794 PARAMETER Experiment Name: At_Petals_P Parameter: Tissue Value: Petals vs. Whole plant
  misc_feature: MA Experiment ID: 20001451 Result: Down-regulated in Transcription
  misc_feature: MA Experiment 20001451 PARAMETER Experiment Name: At_Far-red-induction_P Parameter: Age (day) Value: 7
  misc_feature: MA Experiment 20001451 PARAMETER Experiment Name: At_Far-red-induction_P Parameter: Light Value: Far-red vs. White
  misc_feature: MA Experiment 20001451 PARAMETER Experiment Name: At_Far-red-induction_P Parameter: Organism Value: A. thaliana
  misc_feature: MA Experiment 20001451 PARAMETER Experiment Name: At_Far-red-induction_P Parameter: Plant Line Value: Columbia
  misc_feature: MA Experiment 20001451 PARAMETER Experiment Name: At_Far-red-induction_P Parameter: Timepoint (hr) Value: 24
  misc_feature: MA Experiment 20001451 PARAMETER Experiment Name: At_Far-red-induction_P Parameter: Tissue Value: Whole Plant
  misc_feature: MA Experiment ID: 20001557 Result: Down-regulated in Transcription
  misc_feature: MA Experiment 20001557 PARAMETER Experiment Name: At_Drought_Soil_Dry_P Parameter: Age (day) Value: 27
  misc_feature: MA Experiment 20001557 PARAMETER Experiment Name: At_Drought_Soil_Dry_P Parameter: Organism Value: A. thaliana
  misc_feature: MA Experiment 20001557 PARAMETER Experiment Name: At_Drought_Soil_Dry_P Parameter: Plant Line Value: WS
  misc_feature: MA Experiment 20001557 PARAMETER Experiment Name: At_Drought_Soil_Dry_P Parameter: Post Timepoint (hr) Value: 3
  misc_feature: MA Experiment 20001557 PARAMETER Experiment Name: At_Drought_Soil_Dry_P Parameter: Post-Treatment Value: Re-Water vs. No Drought
  misc_feature: MA Experiment 20001557 PARAMETER Experiment Name: At_Drought_Soil_Dry_P Parameter: Timepoint (day) Value: 13
  misc_feature: MA Experiment 20001557 PARAMETER Experiment Name: At_Drought_Soil_Dry_P Parameter: Treatment Value: Drought vs. No Drought
  misc_feature: MA Experiment ID: 20001757 Result: Up-regulated in Transcription
  misc_feature: MA Experiment 20001757 PARAMETER Experiment Name: At_50mM_NH4NO3_L-to-H_P Parameter: Timepoint (hr) Value: 6
  misc_feature: MA Experiment 20001757 PARAMETER Experiment Name: At_50mM_NH4NO3_L-to-H_P Parameter: Tissue Value: Leaf
  misc_feature: MA Experiment 20001757 PARAMETER Experiment Name: At_50mM_NH4NO3_L-to-H_P Parameter: Treatment Value: 50mM NH4NO3 vs 100mM Mannitol
  misc_feature: MA Experiment ID: 20001904 Result: Down-regulated in Transcription
  misc_feature: MA Experiment 20001904 PARAMETER Experiment Name: At_Drought_Reproduction_P Parameter: Age (day) Value: 37
  misc_feature: MA Experiment 20001904 PARAMETER Experiment Name: At_Drought_Reproduction_P Parameter: Organism Value: A. thaliana
  misc_feature: MA Experiment 20001904 PARAMETER Experiment Name: At_Drought_Reproduction_P Parameter: Plant Line Value: WS
  misc_feature: MA Experiment 20001904 PARAMETER Experiment Name: At_Drought_Reproduction_P Parameter: Timepoint (day) Value: 7
  misc_feature: MA Experiment 20001904 PARAMETER Experiment Name: At_Drought_Reproduction_P Parameter: Tissue Value: Rosettes
  misc_feature: MA Experiment 20001904 PARAMETER Experiment Name: At_Drought_Reproduction_P Parameter: Treatment Value: Drought vs. No Drought
  misc_feature: MA Experiment ID: 20001905 Result: Down-regulated in Transcription
  misc_feature: MA Experiment 20001905 PARAMETER Experiment Name: At_Drought_Reproduction_P Parameter: Age (day) Value: 40
  misc_feature: MA Experiment 20001905 PARAMETER Experiment Name: At_Drought_Reproduction_P Parameter: Organism Value: A. thaliana
  misc_feature: MA Experiment 20001905 PARAMETER Experiment Name: At_Drought_Reproduction_P Parameter: Plant Line Value: WS
  misc_feature: MA Experiment 20001905 PARAMETER Experiment Name: At_Drought_Reproduction_P Parameter: Timepoint (day) Value: 10
  misc_feature: MA Experiment 20001905 PARAMETER Experiment Name: At_Drought_Reproduction_P Parameter: Tissue Value: Rosettes
  misc_feature: MA Experiment 20001905 PARAMETER Experiment Name: At_Drought_Reproduction_P Parameter: Treatment Value: Drought vs. No Drought
  misc_feature: MA Experiment ID: 20001906 Result: Down-regulated in Transcription
  misc_feature: MA Experiment 20001906 PARAMETER Experiment Name: At_Drought_Reproduction_P Parameter: Age (day) Value: 35
  misc_feature: MA Experiment 20001906 PARAMETER Experiment Name: At_Drought_Reproduction_P Parameter: Organism Value: A. thaliana
  misc_feature: MA Experiment 20001906 PARAMETER Experiment Name: At_Drought_Reproduction_P Parameter: Plant Line Value: WS
  misc_feature: MA Experiment 20001906 PARAMETER Experiment Name: At_Drought_Reproduction_P Parameter: Timepoint (day) Value: 5
  misc_feature: MA Experiment 20001906 PARAMETER Experiment Name: At_Drought_Reproduction_P Parameter: Tissue Value: Siliques
  misc_feature: MA Experiment 20001906 PARAMETER Experiment Name: At_Drought_Reproduction_P Parameter: Treatment Value: Drought vs. No Drought
  misc_feature: MA Experiment ID: 20001908 Result: Down-regulated in Transcription
  misc_feature: MA Experiment 20001908 PARAMETER Experiment Name: At_Drought_Reproduction_P Parameter: Age (day) Value: 40
  misc_feature: MA Experiment 20001908 PARAMETER Experiment Name: At_Drought_Reproduction_P Parameter: Organism Value: A. thaliana
  misc_feature: MA Experiment 20001908 PARAMETER Experiment Name: At_Drought_Reproduction_P Parameter: Plant Line Value: WS
  misc_feature: MA Experiment 20001908 PARAMETER Experiment Name: At_Drought_Reproduction_P Parameter: Timepoint (day) Value: 10
  misc_feature: MA Experiment 20001908 PARAMETER Experiment Name: At_Drought_Reproduction_P Parameter: Tissue Value: Siliques
  misc_feature: MA Experiment 20001908 PARAMETER Experiment Name: At_Drought_Reproduction_P Parameter: Treatment Value: Drought vs. No Drought
  misc_feature: MA Experiment ID: 20001911 Result: Down-regulated in Transcription
  misc_feature: MA Experiment 20001911 PARAMETER Experiment Name: At_Drought_Reproduction_P Parameter: Age (day) Value: 40
  misc_feature: MA Experiment 20001911 PARAMETER Experiment Name: At_Drought_Reproduction_P Parameter: Organism Value: A. thaliana
  misc_feature: MA Experiment 20001911 PARAMETER Experiment Name: At_Drought_Reproduction_P Parameter: Plant Line Value: WS
  misc_feature: MA Experiment 20001911 PARAMETER Experiment Name: At_Drought_Reproduction_P Parameter: Timepoint (day) Value: 10
  misc_feature: MA Experiment 20001911 PARAMETER Experiment Name: At_Drought_Reproduction_P Parameter: Tissue Value: Flowers
  misc_feature: MA Experiment 20001911 PARAMETER Experiment Name: At_Drought_Reproduction_P Parameter: Treatment Value: Drought vs. No Drought
agagtcaagggatgcagcaatggcgtctgttgcttcttcaactactctcatctcttctccctcttctagggtttttccagcaaagtcttcactttcctctccatctgtttctttccttcgaaccctttcttctccttccgcatctgcttctctccgctccggatttgctcgacgctcttccctcagctccacttctcgtcggagctttgctgtcaaagcccaggccgatgatcttccactggttggaaacaaggcgcctgattttaaggcagaggctgtgtttgatcaagagttcatcaaggttaagctctctgattacaatgggaagaagtatgtgattctctttttctacccattggactttactttcgtctgcccaacagagattactgccttcagtgaccggcattcagaatttgagaagttgaacaccgaagtattaggtgtttctgtcgatagtgtgttctctcaccttgcatgggtccaaacagacaggaaatctggagggcttggtgatctgaactatccccttatttcagatgtcactaaatcaatctcaaagtcgttcggagtgctcatccatgatcagggaatagcactgagaggacttttcataatcgacaaggaaggagtgatccaacattccaccatcaacaatcttggtattggccgaagcgttgatgagacaatgagaaccctccaggcattacagtacacaggaaacccggatgaagtctgcccagcaggatggaagtcgggtgagaagtcaatgaaacccgacccaaaactcagcaaagagtacttctcagctatttagagcacactactatgcatatgcctggt

SEQ ID NO: 76464 - protein, 271 aa, Arabidopsis thaliana
  peptide (1)..(271): Ceres Seq. ID no. 7108089
  misc_feature (81)..(232): Pfam Name: AhpC/TSA family Pfam Description: AhpC/TSA family
  misc_feature (7)..(271): Homolog of NCBI NO: 1498198 NR Description: 2-Cys peroxiredoxin bas1 [Arabidopsis thaliana]
  misc_feature (7)..(271): Homolog of NCBI NO: 3121825 NR Description: 2-cys peroxiredoxin BAS1, chloroplast precursor
  misc_feature (7)..(271): Homolog of NCBI NO: 15229806 NR Description: putative 2-cys peroxiredoxin BAS1 precursor antioxidant protein); protein id: At3g11630.1, supported by cDNA:
  misc_feature (7)..(271): Homolog of NCBI NO: 7242491 NR Description: 2-Cys peroxiredoxin [Arabidopsis thaliana]
  misc_feature (7)..(271): Homolog of NCBI NO: 21592588 NR Description: putative 2-cys peroxiredoxin BAS1 precursor
  misc_feature (6)..(271): Homolog of NCBI NO: 18415155 NR Description: 2-cys peroxiredoxin-like protein; protein id: supported by cDNA: 15640., supported by cDNA: gi_11908047, by cDNA: gi_12642865, supported by cDNA: gi_13265489,
  misc_feature (7)..(271): Homolog of NCBI NO: 21553667 NR Description: 2-cys peroxiredoxin-like protein [Arabidopsis
  misc_feature (7)..(271): Homolog of NCBI NO: 9758409 NR Description: 2-cys peroxiredoxin-like protein [Arabidopsis
  misc_feature (7)..(271): Homolog of NCBI NO: 13265490 NR Description: AT5g06290 [Arabidopsis thaliana]
  misc_feature (7)..(271): Homolog of NCBI NO: 11119229 NR Description: 2-Cys peroxiredoxin [Brassica napus]
ESRDAAMASVASSTTLISSPSSRVFPAKSSLSSPSVSFLRTLSSPSASASLRSGFARRSSLSSTSRRSFAVKAQADDLPLVGNKAPDFKAEAVFDQEFIKVKLSDYNGKKYVILFFYPLDFTFVCPTEITAFSDRHSEFEKLNTEVLGVSVDSVFSHLAWVQTDRKSGGLGDLNYPLISDVTKSISKSFGVLIHDQGIALRGLFIIDKEGVIQHSTINNLGIGRSVDETMRTLQALQYTGNPDEVCPAGWKSGEKSMKPDPKLSKEYFSAI

SEQ ID NO: 76465 - protein, 265 aa, Arabidopsis thaliana
  peptide (1)..(265): Ceres Seq. ID no. 7108090
  misc_feature (75)..(226): Pfam Name: AhpC/TSA family Pfam Description: AhpC/TSA family
  misc_feature (1)..(265): Homolog of NCBI NO: 1498198 NR Description: 2-Cys peroxiredoxin bas1 [Arabidopsis thaliana]
  misc_feature (1)..(265): Homolog of NCBI NO: 3121825 NR Description: 2-cys peroxiredoxin BAS1, chloroplast precursor
  misc_feature (1)..(265): Homolog of NCBI NO: 15229806 NR Description: putative 2-cys peroxiredoxin BAS1 precursor antioxidant protein); protein id: At3g11630.1, supported by cDNA:
  misc_feature (1)..(265): Homolog of NCBI NO: 7242491 NR Description: 2-Cys peroxiredoxin [Arabidopsis thaliana]
  misc_feature (1)..(265): Homolog of NCBI NO: 21592588 NR Description: putative 2-cys peroxiredoxin BAS1 precursor
  misc_feature (1)..(265): Homolog of NCBI NO: 18415155 NR Description: 2-cys peroxiredoxin-like protein; protein id: supported by cDNA: 15640., supported by cDNA: gi_11908047, by cDNA: gi_12642865, supported by cDNA: gi_13265489,
  misc_feature (1)..(265): Homolog of NCBI NO: 21553667 NR Description: 2-cys peroxiredoxin-like protein [Arabidopsis
  misc_feature (1)..(265): Homolog of NCBI NO: 9758409 NR Description: 2-cys peroxiredoxin-like protein [Arabidopsis
  misc_feature (1)..(265): Homolog of NCBI NO: 13265490 NR Description: AT5g06290 [Arabidopsis thaliana]
  misc_feature (1)..(265): Homolog of NCBI NO: 11119229 NR Description: 2-Cys peroxiredoxin [Brassica napus]
MASVASSTTLISSPSSRVFPAKSSLSSPSVSFLRTLSSPSASASLRSGFARRSSLSSTSRRSFAVKAQADDLPLVGNKAPDFKAEAVFDQEFIKVKLSDYNGKKYVILFFYPLDFTFVCPTEITAFSDRHSEFEKLNTEVLGVSVDSVFSHLAWVQTDRKSGGLGDLNYPLISDVTKSISKSFGVLIHDQGIALRGLFIIDKEGVIQHSTINNLGIGRSVDETMRTLQALQYTGNPDEVCPAGWKSGEKSMKPDPKLSKEYFSAI

SEQ ID NO: 76466 - DNA, 734 bp, Arabidopsis thaliana
  misc_feature (1)..(734): Ceres Seq. ID no. 7108095
  misc_feature: MA Experiment ID: 20000169 Result: Up-regulated in Transcription
  misc_feature: MA Experiment 20000169 PARAMETER Experiment Name: At_100uM_ABA_P Parameter: Age (day) Value: 14
  misc_feature: MA Experiment 20000169 PARAMETER Experiment Name: At_100uM_ABA_P Parameter: Organism Value: A. thaliana
  misc_feature: MA Experiment 20000169 PARAMETER Experiment Name: At_100uM_ABA_P Parameter: Plant Line Value: WS
  misc_feature: MA Experiment 20000169 PARAMETER Experiment Name: At_100uM_ABA_P Parameter: Timepoint (hr) Value: 6
  misc_feature: MA Experiment 20000169 PARAMETER Experiment Name: At_100uM_ABA_P Parameter: Tissue Value: Aerial
  misc_feature: MA Experiment 20000169 PARAMETER Experiment Name: At_100uM_ABA_P Parameter: Treatment Value: 100uM ABA vs. No Treatment
  misc_feature: MA Experiment ID: 20000180 Result: Up-regulated in Transcription
  misc_feature: MA Experiment 20000180 PARAMETER Experiment Name: At_Germinating_Seeds_P Parameter: Age (hr) Value: 24 vs. 0
  misc_feature: MA Experiment 20000180 PARAMETER Experiment Name: At_Germinating_Seeds_P Parameter: Tissue Value: Germinating Seeds
  misc_feature: MA Experiment ID: 20000227 Result: Down-regulated in Transcription
  misc_feature: MA Experiment 20000227 PARAMETER Experiment Name: At_Root-Tips-vs-Tops_P Parameter: Tissue Value: Root Tips vs. Root Tops
  misc_feature: MA Experiment ID: 20000265 Result: Up-regulated in Transcription
  misc_feature: MA Experiment 20000265 PARAMETER Experiment Name: At_Open_Flower_P Parameter: Age (day) Value: 21
  misc_feature: MA Experiment 20000265 PARAMETER Experiment Name: At_Open_Flower_P Parameter: Plant Line Value: WS
  misc_feature: MA Experiment 20000265 PARAMETER Experiment Name: At_Open_Flower_P Parameter: Tissue Value: Closed Flower vs. Whole Plant
  misc_feature: MA Experiment ID: 20000267 Result: Up-regulated in Transcription
  misc_feature: MA Experiment 20000267 PARAMETER Experiment Name: At_Drought_P Parameter: Age (day) Value: 7
  misc_feature: MA Experiment 20000267 PARAMETER Experiment Name: At_Drought_P Parameter: Organism Value: A. thaliana
  misc_feature: MA Experiment 20000267 PARAMETER Experiment Name: At_Drought_P Parameter: Plant Line Value: WS
  misc_feature: MA Experiment 20000267 PARAMETER Experiment Name: At_Drought_P Parameter: Timepoint (hr) Value: 6
  misc_feature: MA Experiment 20000267 PARAMETER Experiment Name: At_Drought_P Parameter: Tissue Value: Whole Plant
  misc_feature: MA Experiment 20000267 PARAMETER Experiment Name: At_Drought_P Parameter: Treatment Value: Drought vs. No Drought
  misc_feature: MA Experiment ID: 20000308 Result: Up-regulated in Transcription
  misc_feature: MA Experiment 20000308 PARAMETER Experiment Name: At_100mM_NaCl__P Parameter: Age (day) Value: 17
  misc_feature: MA Experiment 20000308 PARAMETER Experiment Name: At_100mM_NaCl__P Parameter: Organism Value: A. thaliana
  misc_feature: MA Experiment 20000308 PARAMETER Experiment Name: At_100mM_NaCl__P Parameter: Plant Line Value: WS
  misc_feature: MA Experiment 20000308 PARAMETER Experiment Name: At_100mM_NaCl__P Parameter: Timepoint (hr) Value: 72
  misc_feature: MA Experiment 20000308 PARAMETER Experiment Name: At_100mM_NaCl__P Parameter: Tissue Value: Whole Plant
  misc_feature: MA Experiment 20000308 PARAMETER Experiment Name: At_100mM_NaCl__P Parameter: Treatment Value: 100mM NaCl vs. No Treatment
  misc_feature: MA Experiment ID: 20000436 Result: Up-regulated in Transcription
  misc_feature: MA Experiment 20000436 PARAMETER Experiment Name: At_Drought_P Parameter: Age (day) Value: 7
  misc_feature: MA Experiment 20000436 PARAMETER Experiment Name: At_Drought_P Parameter: Organism Value: A. thaliana
  misc_feature: MA Experiment 20000436 PARAMETER Experiment Name: At_Drought_P Parameter: Plant Line Value: WS
  misc_feature: MA Experiment 20000436 PARAMETER Experiment Name: At_Drought_P Parameter: Timepoint (hr) Value: 12
  misc_feature: MA Experiment 20000436 PARAMETER Experiment Name: At_Drought_P Parameter: Tissue Value: Whole Plant
  misc_feature: MA Experiment 20000436 PARAMETER Experiment Name: At_Drought_P Parameter: Treatment Value: Drought vs. No Drought
  misc_feature: MA Experiment ID: 20000437 Result: Up-regulated in Transcription
  misc_feature: MA Experiment 20000437 PARAMETER Experiment Name: At_Drought_P Parameter: Age (day) Value: 8
  misc_feature: MA Experiment 20000437 PARAMETER Experiment Name: At_Drought_P Parameter: Organism Value: A. thaliana
  misc_feature: MA Experiment 20000437 PARAMETER Experiment Name: At_Drought_P Parameter: Plant Line Value: WS
  misc_feature: MA Experiment 20000437 PARAMETER Experiment Name: At_Drought_P Parameter: Timepoint (hr) Value: 24
  misc_feature: MA Experiment 20000437 PARAMETER Experiment Name: At_Drought_P Parameter: Tissue Value: Whole Plant
  misc_feature: MA Experiment 20000437 PARAMETER Experiment Name: At_Drought_P Parameter: Treatment Value: Drought vs. No Drought
  misc_feature: MA Experiment ID: 20000451 Result: Up-regulated in Transcription
  misc_feature: MA Experiment 20000451 PARAMETER Experiment Name: At_CS6879_Shoots-Roots_P Parameter: Age (day) Value: 14
  misc_feature: MA Experiment 20000451 PARAMETER Experiment Name: At_CS6879_Shoots-Roots_P Parameter: Organism Value: A. thaliana
  misc_feature: MA Experiment 20000451 PARAMETER Experiment Name: At_CS6879_Shoots-Roots_P Parameter: Plant Line Value: CS6879 vs. WS
  misc_feature: MA Experiment 20000451 PARAMETER Experiment Name: At_CS6879_Shoots-Roots_P Parameter: Tissue Value: Roots
  misc_feature: MA Experiment ID: 20000453 Result: Up-regulated in Transcription
  misc_feature: MA Experiment 20000453 PARAMETER Experiment Name: At_100uM_ABA_P Parameter: Age (day) Value: 15
  misc_feature: MA Experiment 20000453 PARAMETER Experiment Name: At_100uM_ABA_P Parameter: Organism Value: A. thaliana
  misc_feature: MA Experiment 20000453 PARAMETER Experiment Name: At_100uM_ABA_P Parameter: Plant Line Value: WS
  misc_feature: MA Experiment 20000453 PARAMETER Experiment Name: At_100uM_ABA_P Parameter: Timepoint (hr) Value: 24
  misc_feature: MA Experiment 20000453 PARAMETER Experiment Name: At_100uM_ABA_P Parameter: Tissue Value: Aerial
  misc_feature: MA Experiment 20000453 PARAMETER Experiment Name: At_100uM_ABA_P Parameter: Treatment Value: 100uM ABA vs. No Treatment
  misc_feature: MA Experiment ID: 20000460 Result: Up-regulated in Transcription
  misc_feature: MA Experiment 20000460 PARAMETER Experiment Name: At_10percent_PEG_P Parameter: Age (day) Value: 12
  misc_feature: MA Experiment 20000460 PARAMETER Experiment Name: At_10percent_PEG_P Parameter: Organism Value: A. thaliana
  misc_feature: MA Experiment 20000460 PARAMETER Experiment Name: At_10percent_PEG_P Parameter: Plant Line Value: WS
  misc_feature: MA Experiment 20000460 PARAMETER Experiment Name: At_10percent_PEG_P Parameter: Timepoint (day) Value: 12
  misc_feature: MA Experiment 20000460 PARAMETER Experiment Name: At_10percent_PEG_P Parameter: Tissue Value: Whole Plant
  misc_feature: MA Experiment 20000460 PARAMETER Experiment Name: At_10percent_PEG_P Parameter: Treatment Value: 10percent PEG vs. No Treatment
  misc_feature: MA Experiment ID: 20000573 Result: Up-regulated in Transcription
  misc_feature: MA Experiment 20000573 PARAMETER Experiment Name: At_100uM_ABA_Mutants__P Parameter: Organism Value: A. thaliana
  misc_feature: MA Experiment 20000573 PARAMETER Experiment Name: At_100uM_ABA_Mutants__P Parameter: Plant Line Value: CS22 vs. Ler wt
  misc_feature: MA Experiment 20000573 PARAMETER Experiment Name: At_100uM_ABA_Mutants__P Parameter: Timepoint (hr) Value: N/A
  misc_feature: MA Experiment 20000573 PARAMETER Experiment Name: At_100uM_ABA_Mutants__P Parameter: Tissue Value: Whole Plant
  misc_feature: MA Experiment 20000573 PARAMETER Experiment Name: At_100uM_ABA_Mutants__P Parameter: Treatment Value: None
  misc_feature: MA Experiment ID: 20000576 Result: Up-regulated in Transcription
  misc_feature: MA Experiment 20000576 PARAMETER Experiment Name: At_100uM_ABA_Mutants__P Parameter: Organism Value: A. thaliana
  misc_feature: MA Experiment 20000576 PARAMETER Experiment Name: At_100uM_ABA_Mutants__P Parameter: Plant Line Value: CS23
  misc_feature: MA Experiment 20000576 PARAMETER Experiment Name: At_100uM_ABA_Mutants__P Parameter: Timepoint (hr) Value: 6
  misc_feature: MA Experiment 20000576 PARAMETER Experiment Name: At_100uM_ABA_Mutants__P Parameter: Tissue Value: Whole Plant
  misc_feature: MA Experiment 20000576 PARAMETER Experiment Name: At_100uM_ABA_Mutants__P Parameter: Treatment Value: 1uM ABA vs. No Treatment
  misc_feature: MA Experiment ID: 20000709 Result: Down-regulated in Transcription
  misc_feature: MA Experiment 20000709 PARAMETER Experiment Name: At_15mM_NH4NO3_L-to-H_P Parameter: Age (hr) Value: 14
  misc_feature: MA Experiment 20000709 PARAMETER Experiment Name: At_15mM_NH4NO3_L-to-H_P Parameter: Organism Value: A. thaliana
  misc_feature: MA Experiment 20000709 PARAMETER Experiment Name: At_15mM_NH4NO3_L-to-H_P Parameter: Plant Line Value: WS
  misc_feature: MA Experiment 20000709 PARAMETER Experiment Name: At_15mM_NH4NO3_L-to-H_P Parameter: Timepoint (hr) Value: 4
  misc_feature: MA Experiment 20000709 PARAMETER Experiment Name: At_15mM_NH4NO3_L-to-H_P Parameter: Tissue Value: Aerial
  misc_feature: MA Experiment 20000709 PARAMETER Experiment Name: At_15mM_NH4NO3_L-to-H_P Parameter: Treatment Value: 15mM NH4NO3 vs. 30mM Mannitol
  misc_feature: MA Experiment ID: 20001247 Result: Down-regulated in Transcription
  misc_feature: MA Experiment 20001247 PARAMETER Experiment Name: At_Far-red-induction_P Parameter: Age (day) Value: 7
  misc_feature: MA Experiment 20001247 PARAMETER Experiment Name: At_Far-red-induction_P Parameter: Light Value: Far-red vs. White
  misc_feature: MA Experiment 20001247 PARAMETER Experiment Name: At_Far-red-induction_P Parameter: Organism Value: A. thaliana
  misc_feature: MA Experiment 20001247 PARAMETER Experiment Name: At_Far-red-induction_P Parameter: Plant Line Value: Columbia
  misc_feature: MA Experiment 20001247 PARAMETER Experiment Name: At_Far-red-induction_P Parameter: Timepoint (hr) Value: 1
  misc_feature: MA Experiment 20001247 PARAMETER Experiment Name: At_Far-red-induction_P Parameter: Tissue Value: Whole Plant
  misc_feature: MA Experiment ID: 20001450 Result: Down-regulated in Transcription
  misc_feature: MA Experiment 20001450 PARAMETER Experiment Name: At_Far-red-induction_P Parameter: Age (day) Value: 7
  misc_feature: MA Experiment 20001450 PARAMETER Experiment Name: At_Far-red-induction_P Parameter: Light Value: Far-red vs. White
  misc_feature: MA Experiment 20001450 PARAMETER Experiment Name: At_Far-red-induction_P Parameter: Organism Value: A. thaliana
  misc_feature: MA Experiment 20001450 PARAMETER Experiment Name: At_Far-red-induction_P Parameter: Plant Line Value: Columbia
  misc_feature: MA Experiment 20001450 PARAMETER Experiment Name: At_Far-red-induction_P Parameter: Timepoint (hr) Value: 8
  misc_feature: MA Experiment 20001450 PARAMETER Experiment Name: At_Far-red-induction_P Parameter: Tissue Value: Whole Plant
  misc_feature: MA Experiment ID: 20001451 Result: Up-regulated in Transcription
  misc_feature: MA Experiment 20001451 PARAMETER Experiment Name: At_Far-red-induction_P Parameter: Age (day) Value: 7
  misc_feature: MA Experiment 20001451 PARAMETER Experiment Name: At_Far-red-induction_P Parameter: Light Value: Far-red vs. White
  misc_feature: MA Experiment 20001451 PARAMETER Experiment Name: At_Far-red-induction_P Parameter: Organism Value: A. thaliana
  misc_feature: MA Experiment 20001451 PARAMETER Experiment Name: At_Far-red-induction_P Parameter: Plant Line Value: Columbia
  misc_feature: MA Experiment 20001451 PARAMETER Experiment Name: At_Far-red-induction_P Parameter: Timepoint (hr) Value: 24
  misc_feature: MA Experiment 20001451 PARAMETER Experiment Name: At_Far-red-induction_P Parameter: Tissue Value: Whole Plant
  misc_feature: MA Experiment ID: 20001557 Result: Up-regulated in Transcription
  misc_feature: MA Experiment 20001557 PARAMETER Experiment Name: At_Drought_Soil_Dry_P Parameter: Age (day) Value: 27
  misc_feature: MA Experiment 20001557 PARAMETER Experiment Name: At_Drought_Soil_Dry_P Parameter: Organism Value: A. thaliana
  misc_feature: MA Experiment 20001557 PARAMETER Experiment Name: At_Drought_Soil_Dry_P Parameter: Plant Line Value: WS
  misc_feature: MA Experiment 20001557 PARAMETER Experiment Name: At_Drought_Soil_Dry_P Parameter: Post Timepoint (hr) Value: 3
  misc_feature: MA Experiment 20001557 PARAMETER Experiment Name: At_Drought_Soil_Dry_P Parameter: Post-Treatment Value: Re-Water vs. No Drought
  misc_feature: MA Experiment 20001557 PARAMETER Experiment Name: At_Drought_Soil_Dry_P Parameter: Timepoint (day) Value: 13
  misc_feature: MA Experiment 20001557 PARAMETER Experiment Name: At_Drought_Soil_Dry_P Parameter: Treatment Value: Drought vs. No Drought
  misc_feature: MA Experiment ID: 20001904 Result: Up-regulated in Transcription
  misc_feature: MA Experiment 20001904 PARAMETER Experiment Name: At_Drought_Reproduction_P Parameter: Age (day) Value: 37
  misc_feature: MA Experiment 20001904 PARAMETER Experiment Name: At_Drought_Reproduction_P Parameter: Organism Value: A. thaliana
  misc_feature: MA Experiment 20001904 PARAMETER Experiment Name: At_Drought_Reproduction_P Parameter: Plant Line Value: WS
  misc_feature: MA Experiment 20001904 PARAMETER Experiment Name: At_Drought_Reproduction_P Parameter: Timepoint (day) Value: 7
  misc_feature: MA Experiment 20001904 PARAMETER Experiment Name: At_Drought_Reproduction_P Parameter: Tissue Value: Rosettes
  misc_feature: MA Experiment 20001904 PARAMETER Experiment Name: At_Drought_Reproduction_P Parameter: Treatment Value: Drought vs. No Drought
  misc_feature: MA Experiment ID: 20001911 Result: Up-regulated in Transcription
  misc_feature: MA Experiment 20001911 PARAMETER Experiment Name: At_Drought_Reproduction_P Parameter: Age (day) Value: 40
  misc_feature: MA Experiment 20001911 PARAMETER Experiment Name: At_Drought_Reproduction_P Parameter: Organism Value: A. thaliana
  misc_feature: MA Experiment 20001911 PARAMETER Experiment Name: At_Drought_Reproduction_P Parameter: Plant Line Value: WS
  misc_feature: MA Experiment 20001911 PARAMETER Experiment Name: At_Drought_Reproduction_P Parameter: Timepoint (day) Value: 10
  misc_feature: MA Experiment 20001911 PARAMETER Experiment Name: At_Drought_Reproduction_P Parameter: Tissue Value: Flowers
  misc_feature: MA Experiment 20001911 PARAMETER Experiment Name: At_Drought_Reproduction_P Parameter: Treatment Value: Drought vs. No Drought
aggagctggtgctggtggagggtttggcggtggtgctggaggaggtcacggtggtggcgccggcgctggaggaggattaggcggtggtgctggaggaggatttggcggtggtgctggaggaggtggcggtgcaggaggaggatttggcggtggtgctggtggaggccacggtggaggtgctggtggaggatttggtggtggtgcaggaggtggaggaggtcacggtggaggtgctggtggaggatttggcggtggtgtaggaggtggaggaggccacggtggaggtgccgggggaggatttggcggtggtgcaggaggtggaggaggccacggtggaggtgccgggggaggatttggcggtggtgcaggaggtggaggaggccaaggtggaggtgctgggggaggttttggcggtggtgccggtgggggatttggcggtggtgcaggaggaggtgctggtggaggatttggcggtggtgcaggaggtggaggaggccatggtggtggtgccggtggtggagctggagggggctttggcggtggtgcaggaggtggaggaggccatggtggtggagctggtggaggttttggcggcggtgcaggaggaggaggaggccatggtggtcgtttttaaatatagctttatagggtaacttgcttgtgtctcaagccagattaaaaaggaagatatttgctggagaatcttattatgaatggaataaatgatatttagg

SEQ ID NO: 76467 - protein, 215 aa, Arabidopsis thaliana
  peptide (1)..(215): Ceres Seq. ID no. 7108096
  misc_feature (65)..(138): Pfam Name: TT viral orf 1 Pfam Description: TT viral orf 1
  misc_feature (1)..(28): Homolog of NCBI NO: 14549150 NR Description: glycine-rich protein LeGRP1 [Lycopersicon
RSWCWWRVWRWCWRRSRWWRRRWRRIRRWCWRRIWRWCWRRWRCRRRIWRWCWWRPRWRCWWRIWWWCRRWRRSRWRCWWRIWRWCRRWRRPRWRCRGRIWRWCRRWRRPRWRCRGRIWRWCRRWRRPRWRCWGRFWRWCRWGIWRWCRRRCWWRIWRWCRRWRRPWWWCRWWSWRGLWRWCRRWRRPWWWSWWRFWRRCRRRRRPWWSFLNIAL

SEQ ID NO: 76468 - protein, 210 aa, Arabidopsis thaliana
  peptide (1)..(210): Ceres Seq. ID no. 7108097
  misc_feature (1)..(206): Pfam Name: Dehydrin Pfam Description: Dehydrin
  misc_feature (1)..(210): Homolog of NCBI NO: 81623 NR Description: glycine-rich protein 1 - Arabidopsis thaliana
  misc_feature (3)..(207): Homolog of NCBI NO: 7488554 NR Description: glycine-rich protein - wild cabbage (fragment)
  misc_feature (1)..(210): Homolog of NCBI NO: 72320 NR Description: glycine-rich cell wall protein precursor - thaliana >gi|16293|emb|CAA41249.1| glycine rich protein
  misc_feature (1)..(210): Homolog of NCBI NO: 15228946 NR Description: unknown protein; protein id: At3g17050.1
  misc_feature (1)..(210): Homolog of NCBI NO: 72320 NR Description: glycine-rich cell wall protein precursor - thaliana >gi|16293|emb|CAA41249.1| glycine rich protein
  misc_feature (1)..(210): Homolog of NCBI NO: 15228946 NR Description: unknown protein; protein id: At3g17050.1
  misc_feature (1)..(210): Homolog of NCBI NO: 72320 NR Description: glycine-rich cell wall protein precursor - thaliana >gi|16293|emb|CAA41249.1| glycine rich protein
  misc_feature (1)..(210): Homolog of NCBI NO: 15228946 NR Description: unknown protein; protein id: At3g17050.1
  misc_feature (1)..(210): Homolog of NCBI NO: 72320 NR Description: glycine-rich cell wall protein precursor - thaliana >gi|16293|emb|CAA41249.1| glycine rich protein
  misc_feature (1)..(210): Homolog of NCBI NO: 15228946 NR Description: unknown protein; protein id: At3g17050.1
GAGAGGGFGGGAGGGHGGGAGAGGGLGGGAGGGFGGGAGGGGGAGGGFGGGAGGGHGGGAGGGFGGGAGGGGGHGGGAGGGFGGGVGGGGGHGGGAGGGFGGGAGGGGGHGGGAGGGFGGGAGGGGGQGGGAGGGFGGGAGGGFGGGAGGGAGGGFGGGAGGGGGHGGGAGGGAGGGFGGGAGGGGGHGGGAGGGFGGGAGGGGGHGGRF

SEQ ID NO: 76469 - DNA, 1222 bp, Arabidopsis thaliana
  misc_feature (1)..(1222): Ceres Seq. ID no. 7108117
  misc_feature: MA Experiment ID: 108435 Result: Up-regulated in Transcription
  misc_feature: MA Experiment 108435 PARAMETER Experiment Name: At_stm_Mutants_cDNA_P Parameter: Plant Line Value: wt Landsburg vs stm
  misc_feature: MA Experiment 108435 PARAMETER Experiment Name: At_stm_Mutants_cDNA_P Parameter: Tissue Value: Shoot Apical Meristem Region
  misc_feature: MA Experiment ID: 108461 Result: Up-regulated in Transcription
  misc_feature: MA Experiment 108461 PARAMETER Experiment Name: At_Germinating_Seeds_cDNA_P Parameter: Age (day) Value: 1 vs. 0
  misc_feature: MA Experiment 108461 PARAMETER Experiment Name: At_Germinating_Seeds_cDNA_P Parameter: Tissue Value: Germinating Seeds
  misc_feature: MA Experiment ID: 108462 Result: Up-regulated in Transcription
  misc_feature: MA Experiment 108462 PARAMETER Experiment Name: At_Germinating_Seeds_cDNA_P Parameter: Age (day) Value: 2 vs. 0
  misc_feature: MA Experiment 108462 PARAMETER Experiment Name: At_Germinating_Seeds_cDNA_P Parameter: Tissue Value: Germinating Seeds
  misc_feature: MA Experiment ID: 108469 Result: Down-regulated in Transcription
  misc_feature: MA Experiment ID: 108569 Result: Up-regulated in Transcription
  misc_feature: MA Experiment 108569 PARAMETER Experiment Name: At_0.001%_MeJA__cDNA_P Parameter: Timepoint (hr) Value: 6
  misc_feature: MA Experiment 108569 PARAMETER Experiment Name: At_0.001%_MeJA__cDNA_P Parameter: Tissue Value: Aerial
  misc_feature: MA Experiment 108569 PARAMETER Experiment Name: At_0.001%_MeJA__cDNA_P Parameter: Treatment Value: 0.001% MeJA vs. No Treatment
  misc_feature: MA Experiment ID: 108572 Result: Down-regulated in Transcription
  misc_feature: MA Experiment 108572 PARAMETER Experiment Name: At_Drought_cDNA_P Parameter: Timepoint (hr) Value: 1
  misc_feature: MA Experiment 108572 PARAMETER Experiment Name: At_Drought_cDNA_P Parameter: Tissue Value: Aerial
  misc_feature: MA Experiment 108572 PARAMETER Experiment Name: At_Drought_cDNA_P Parameter: Treatment Value: Drought vs. No Drought
  misc_feature: MA Experiment ID: 108573 Result: Down-regulated in Transcription
  misc_feature: MA Experiment 108573 PARAMETER Experiment Name: At_Drought_cDNA_P Parameter: Timepoint (hr) Value: 6
  misc_feature: MA Experiment 108573 PARAMETER Experiment Name: At_Drought_cDNA_P Parameter: Tissue Value: Aerial
  misc_feature: MA Experiment 108573 PARAMETER Experiment Name: At_Drought_cDNA_P Parameter: Treatment Value: Drought vs. No Drought
  misc_feature: MA Experiment ID: 108577 Result: Down-regulated in Transcription
  misc_feature: MA Experiment 108577 PARAMETER Experiment Name: At_42deg_Heat_cDNA_P Parameter: Temperature (deg C) Value: 42 vs. 22
  misc_feature: MA Experiment 108577 PARAMETER Experiment Name: At_42deg_Heat_cDNA_P Parameter: Timepoint (hr) Value: 6
  misc_feature: MA Experiment 108577 PARAMETER Experiment Name: At_42deg_Heat_cDNA_P Parameter: Tissue Value: Aerial
  misc_feature: MA Experiment ID: 108579 Result: Up-regulated in Transcription
  misc_feature: MA Experiment 108579 PARAMETER Experiment Name: At_4deg_Cold_cDNA_P Parameter: Temperature (deg C) Value: 4 vs. 22
  misc_feature: MA Experiment 108579 PARAMETER Experiment Name: At_4deg_Cold_cDNA_P Parameter: Timepoint (hr) Value: 6
  misc_feature: MA Experiment 108579 PARAMETER Experiment Name: At_4deg_Cold_cDNA_P Parameter: Tissue Value: Aerial
  misc_feature: MA Experiment ID: 108585 Result: Down-regulated in Transcription
  misc_feature: MA Experiment 108585 PARAMETER Experiment Name: At_5mM_NaNP_cDNA_P Parameter: Timepoint (hr) Value: 6
  misc_feature: MA Experiment 108585 PARAMETER Experiment Name: At_5mM_NaNP_cDNA_P Parameter: Tissue Value: Aerial
  misc_feature: MA Experiment 108585 PARAMETER Experiment Name: At_5mM_NaNP_cDNA_P Parameter: Treatment Value: null
  misc_feature: MA Experiment ID: 108594 Result: Down-regulated in Transcription
  misc_feature: MA Experiment 108594 PARAMETER Experiment Name: At_Ler-rhl_Root_cDNA_P Parameter: Plant Line Value: null
  misc_feature: MA Experiment ID: 108595 Result: Down-regulated in Transcription
  misc_feature: MA Experiment 108595 PARAMETER Experiment Name: At_Ler-pi_Ovule_cDNA_P Parameter: Plant Line Value: null
  misc_feature: MA Experiment ID: 108605 Result: Down-regulated in Transcription
  misc_feature: MA Experiment 108605 PARAMETER Experiment Name: At_100uM_ABA_cDNA_P Parameter: Timepoint (hr) Value: 6
  misc_feature: MA Experiment 108605 PARAMETER Experiment Name: At_100uM_ABA_cDNA_P Parameter: Tissue Value: Aerial
  misc_feature: MA Experiment 108605 PARAMETER Experiment Name: At_100uM_ABA_cDNA_P Parameter: Treatment Value: 100uM ABA vs. No Treatment
  misc_feature: MA Experiment ID: 108608 Result: Down-regulated in Transcription
  misc_feature: MA Experiment 108608 PARAMETER Experiment Name: At_100uM_ABA_cDNA_P Parameter: Timepoint (hr) Value: 1
  misc_feature: MA Experiment 108608 PARAMETER Experiment Name: At_100uM_ABA_cDNA_P Parameter: Tissue Value: Aerial
  misc_feature: MA Experiment 108608 PARAMETER Experiment Name: At_100uM_ABA_cDNA_P Parameter: Treatment Value: 100uM ABA vs. No Treatment
  misc_feature: MA Experiment ID: 108609 Result: Down-regulated in Transcription
  misc_feature: MA Experiment 108609 PARAMETER Experiment Name: At_100uM_ABA_cDNA_P Parameter: Timepoint (hr) Value: 24
  misc_feature: MA Experiment 108609 PARAMETER Experiment Name: At_100uM_ABA_cDNA_P Parameter: Tissue Value: Aerial
  misc_feature: MA Experiment 108609 PARAMETER Experiment Name: At_100uM_ABA_cDNA_P Parameter: Treatment Value: 100uM ABA vs. No Treatment
  misc_feature: MA Experiment ID: 108668 Result: Down-regulated in Transcription
  misc_feature: MA Experiment 108668 PARAMETER Experiment Name: At_2mM_SA_cDNA_P Parameter: Plant Line Value: WS
  misc_feature: MA Experiment 108668 PARAMETER Experiment Name: At_2mM_SA_cDNA_P Parameter: Timepoint (hr) Value: 6
  misc_feature: MA Experiment 108668 PARAMETER Experiment Name: At_2mM_SA_cDNA_P Parameter: Treatment Value: 2mM SA vs. No Treatment
  misc_feature: MA Experiment ID: 20000069 Result: Down-regulated in Transcription
  misc_feature: MA Experiment 20000069 PARAMETER Experiment Name: At_100uM_ABA_Mutants_cDNA_P Parameter: Plant Line Value: CS23
  misc_feature: MA Experiment 20000069 PARAMETER Experiment Name: At_100uM_ABA_Mutants_cDNA_P Parameter: Timepoint (hr) Value: 6
  misc_feature: MA Experiment 20000069 PARAMETER Experiment Name: At_100uM_ABA_Mutants_cDNA_P Parameter: Tissue Value: Aerial
  misc_feature: MA Experiment 20000069 PARAMETER Experiment Name: At_100uM_ABA_Mutants_cDNA_P Parameter: Treatment Value: 100uM ABA vs. No Treatment
  misc_feature: MA Experiment ID: 20000070 Result: Down-regulated in Transcription
  misc_feature: MA Experiment 20000070 PARAMETER Experiment Name: At_100uM_ABA_Mutants_cDNA_P Parameter: Plant Line Value: CS24
  misc_feature: MA Experiment 20000070 PARAMETER Experiment Name: At_100uM_ABA_Mutants_cDNA_P Parameter: Timepoint (hr) Value: 6
  misc_feature: MA Experiment 20000070 PARAMETER Experiment Name: At_100uM_ABA_Mutants_cDNA_P Parameter: Tissue Value: Aerial
  misc_feature: MA Experiment 20000070 PARAMETER Experiment Name: At_100uM_ABA_Mutants_cDNA_P Parameter: Treatment Value: 100uM ABA vs. No Treatment
  misc_feature: MA Experiment ID: 20000071 Result: Down-regulated in Transcription
  misc_feature: MA Experiment 20000071 PARAMETER Experiment Name: At_100uM_ABA_Mutants_cDNA_P Parameter: Plant Line Value: CS8104
  misc_feature: MA Experiment 20000071 PARAMETER Experiment Name: At_100uM_ABA_Mutants_cDNA_P Parameter: Timepoint (hr) Value: 6
  misc_feature: MA Experiment 20000071 PARAMETER Experiment Name: At_100uM_ABA_Mutants_cDNA_P Parameter: Tissue Value: Aerial
  misc_feature: MA Experiment 20000071 PARAMETER Experiment Name: At_100uM_ABA_Mutants_cDNA_P Parameter: Treatment Value: 100uM ABA vs. No Treatment
  misc_feature: MA Experiment ID: 20000072 Result: Down-regulated in Transcription
  misc_feature: MA Experiment 20000072 PARAMETER Experiment Name: At_100uM_ABA_Mutants_cDNA_P Parameter: Plant Line Value: CS8105
  misc_feature: MA Experiment 20000072 PARAMETER Experiment Name: At_100uM_ABA_Mutants_cDNA_P Parameter: Timepoint (hr) Value: 6
  misc_feature: MA Experiment 20000072 PARAMETER Experiment Name: At_100uM_ABA_Mutants_cDNA_P Parameter: Tissue Value: Aerial
  misc_feature: MA Experiment 20000072 PARAMETER Experiment Name: At_100uM_ABA_Mutants_cDNA_P Parameter: Treatment Value: 100uM ABA vs. No Treatment
  misc_feature: MA Experiment ID: 20000086 Result: Down-regulated in Transcription
  misc_feature: MA Experiment 20000086 PARAMETER Experiment Name: At_100uM_ABA_Mutants_cDNA_P Parameter: Plant Line Value: CS22
  misc_feature: MA Experiment 20000086 PARAMETER Experiment Name: At_100uM_ABA_Mutants_cDNA_P Parameter: Timepoint (hr) Value: 6
  misc_feature: MA Experiment 20000086 PARAMETER Experiment Name: At_100uM_ABA_Mutants_cDNA_P Parameter: Tissue Value: Aerial
  misc_feature: MA Experiment 20000086 PARAMETER Experiment Name: At_100uM_ABA_Mutants_cDNA_P Parameter: Treatment Value: 100uM ABA vs. No Treatment
  misc_feature: MA Experiment ID: 20000087 Result: Down-regulated in Transcription
  misc_feature: MA Experiment 20000087 PARAMETER Experiment Name: At_100uM_ABA_Mutants_cDNA_P Parameter: Plant Line Value: WS
  misc_feature: MA Experiment 20000087 PARAMETER Experiment Name: At_100uM_ABA_Mutants_cDNA_P Parameter: Timepoint (hr) Value: 6
  misc_feature: MA Experiment 20000087 PARAMETER Experiment Name: At_100uM_ABA_Mutants_cDNA_P Parameter: Tissue Value: Aerial
  misc_feature: MA Experiment 20000087 PARAMETER Experiment Name: At_100uM_ABA_Mutants_cDNA_P Parameter: Treatment Value: 100uM ABA vs. No Treatment
  misc_feature: MA Experiment ID: 20000088 Result: Down-regulated in Transcription
  misc_feature: MA Experiment 20000088 PARAMETER Experiment Name: At_100uM_ABA_Mutants_cDNA_P Parameter: Plant Line Value: Landsberg
  misc_feature: MA Experiment 20000088 PARAMETER Experiment Name: At_100uM_ABA_Mutants_cDNA_P Parameter: Timepoint (hr) Value: 6
  misc_feature: MA Experiment 20000088 PARAMETER Experiment Name: At_100uM_ABA_Mutants_cDNA_P Parameter: Tissue Value: Aerial
  misc_feature: MA Experiment 20000088 PARAMETER Experiment Name: At_100uM_ABA_Mutants_cDNA_P Parameter: Treatment Value: 100uM ABA vs. No Treatment
  misc_feature: MA Experiment ID: 20000090 Result: Down-regulated in Transcription
  misc_feature: MA Experiment ID: 20000093 Result: Down-regulated in Transcription
  misc_feature: MA Experiment 20000093 PARAMETER Experiment Name: At_42deg_Heat_cDNA_P Parameter: Temperature (deg C) Value: 42 vs. 22
  misc_feature: MA Experiment 20000093 PARAMETER Experiment Name: At_42deg_Heat_cDNA_P Parameter: Timepoint (hr) Value: 0.5
  misc_feature: MA Experiment 20000093 PARAMETER Experiment Name: At_42deg_Heat_cDNA_P Parameter: Tissue Value: Aerial
  misc_feature: MA Experiment ID: 20000111 Result: Down-regulated in Transcription
  misc_feature: MA Experiment 20000111 PARAMETER Experiment Name: At_42deg_Heat_cDNA_P Parameter: Temperature (deg C) Value: 42 vs. 22
  misc_feature: MA Experiment 20000111 PARAMETER Experiment Name: At_42deg_Heat_cDNA_P Parameter: Timepoint (hr) Value: 6
  misc_feature: MA Experiment 20000111 PARAMETER Experiment Name: At_42deg_Heat_cDNA_P Parameter: Tissue Value: Aerial
  misc_feature: MA Experiment ID: 20000112 Result: Down-regulated in Transcription
  misc_feature: MA Experiment 20000112 PARAMETER Experiment Name: At_42deg_Heat_cDNA_P Parameter: Temperature (deg C) Value: 42 vs. 22
  misc_feature: MA Experiment 20000112 PARAMETER Experiment Name: At_42deg_Heat_cDNA_P Parameter: Timepoint (hr) Value: 2
  misc_feature: MA Experiment 20000112 PARAMETER Experiment Name: At_42deg_Heat_cDNA_P Parameter: Tissue Value: Aerial
  misc_feature: MA Experiment ID: 20000117 Result: Down-regulated in Transcription
  misc_feature: MA Experiment 20000117 PARAMETER Experiment Name: At_100uM_ABA_Mutants_cDNA_P Parameter: Plant Line Value: Columbia
  misc_feature: MA Experiment 20000117 PARAMETER Experiment Name: At_100uM_ABA_Mutants_cDNA_P Parameter: Timepoint (hr) Value: 6
  misc_feature: MA Experiment 20000117 PARAMETER Experiment Name: At_100uM_ABA_Mutants_cDNA_P Parameter: Tissue Value: Aerial
  misc_feature: MA Experiment 20000117 PARAMETER Experiment Name: At_100uM_ABA_Mutants_cDNA_P Parameter: Treatment Value: 100uM ABA vs. No Treatment
  misc_feature: MA Experiment ID: 20000166 Result: Down-regulated in Transcription
  misc_feature: MA Experiment 20000166 PARAMETER Experiment Name: At_100uM_ABA_P Parameter: Age (day) Value: 14
  misc_feature: MA Experiment 20000166 PARAMETER Experiment Name: At_100uM_ABA_P Parameter: Organism Value: A. thaliana
  misc_feature: MA Experiment 20000166 PARAMETER Experiment Name: At_100uM_ABA_P Parameter: Plant Line Value: WS
  misc_feature: MA Experiment 20000166 PARAMETER Experiment Name: At_100uM_ABA_P Parameter: Timepoint (hr) Value: 1
  misc_feature: MA Experiment 20000166 PARAMETER Experiment Name: At_100uM_ABA_P Parameter: Tissue Value: Aerial
  misc_feature: MA Experiment 20000166 PARAMETER Experiment Name: At_100uM_ABA_P Parameter: Treatment Value: 100uM ABA vs. No Treatment
  misc_feature: MA Experiment ID: 20000169 Result: Down-regulated in Transcription
  misc_feature: MA Experiment 20000169 PARAMETER Experiment Name: At_100uM_ABA_P Parameter: Age (day) Value: 14
  misc_feature: MA Experiment 20000169 PARAMETER Experiment Name: At_100uM_ABA_P Parameter: Organism Value: A. thaliana
  misc_feature: MA Experiment 20000169 PARAMETER Experiment Name: At_100uM_ABA_P Parameter: Plant Line Value: WS
  misc_feature: MA Experiment 20000169 PARAMETER Experiment Name: At_100uM_ABA_P Parameter: Timepoint (hr) Value: 6
  misc_feature: MA Experiment 20000169 PARAMETER Experiment Name: At_100uM_ABA_P Parameter: Tissue Value: Aerial
  misc_feature: MA Experiment 20000169 PARAMETER Experiment Name: At_100uM_ABA_P Parameter: Treatment Value: 100uM ABA vs. No Treatment
  misc_feature: MA Experiment ID: 20000171 Result: Down-regulated in Transcription
  misc_feature: MA Experiment 20000171 PARAMETER Experiment Name: At_42deg_Heat_P Parameter: Age (day) Value: 14
  misc_feature: MA Experiment 20000171 PARAMETER Experiment Name: At_42deg_Heat_P Parameter: Organism Value: A. thaliana
  misc_feature: MA Experiment 20000171 PARAMETER Experiment Name: At_42deg_Heat_P Parameter: Plant Line Value: WS
  misc_feature: MA Experiment 20000171 PARAMETER Experiment Name: At_42deg_Heat_P Parameter: Temperature (deg C) Value: 42 vs. 22
  misc_feature: MA Experiment 20000171 PARAMETER Experiment Name: At_42deg_Heat_P Parameter: Timepoint (hr) Value: 1
  misc_feature: MA Experiment 20000171 PARAMETER Experiment Name: At_42deg_Heat_P Parameter: Tissue Value: Aerial
  misc_feature: MA Experiment ID: 20000173 Result: Down-regulated in Transcription
  misc_feature: MA Experiment 20000173 PARAMETER Experiment Name: At_42deg_Heat_P Parameter: Age (day) Value: 14
  misc_feature: MA Experiment 20000173 PARAMETER Experiment Name: At_42deg_Heat_P Parameter: Organism Value: A. thaliana
  misc_feature: MA Experiment 20000173 PARAMETER Experiment Name: At_42deg_Heat_P Parameter: Plant Line Value: WS
  misc_feature: MA Experiment 20000173 PARAMETER Experiment Name: At_42deg_Heat_P Parameter: Temperature (deg C) Value: 42 vs. 22
  misc_feature: MA Experiment 20000173 PARAMETER Experiment Name: At_42deg_Heat_P Parameter: Timepoint (hr) Value: 6
  misc_feature: MA Experiment 20000173 PARAMETER Experiment Name: At_42deg_Heat_P Parameter: Tissue Value: Aerial
  misc_feature: MA Experiment ID: 20000179 Result: Up-regulated in Transcription
  misc_feature: MA Experiment 20000179 PARAMETER Experiment Name: At_Germinating_Seeds_P Parameter: Age (hr) Value: 6 vs. 0
  misc_feature: MA Experiment 20000179 PARAMETER Experiment Name: At_Germinating_Seeds_P Parameter: Tissue Value: Germinating Seeds
  misc_feature: MA Experiment ID: 20000180 Result: Up-regulated in Transcription
  misc_feature: MA Experiment 20000180 PARAMETER Experiment Name: At_Germinating_Seeds_P Parameter: Age (hr) Value: 24 vs. 0
  misc_feature: MA Experiment 20000180 PARAMETER Experiment Name: At_Germinating_Seeds_P Parameter: Tissue Value: Germinating Seeds
  misc_feature: MA Experiment ID: 20000182 Result: Down-regulated in Transcription
  misc_feature: MA Experiment 20000182 PARAMETER Experiment Name: At_2mM_SA_P Parameter: Age (day) Value: 14
  misc_feature: MA Experiment 20000182 PARAMETER Experiment Name: At_2mM_SA_P Parameter: Organism Value: A. thaliana
  misc_feature: MA Experiment 20000182 PARAMETER Experiment Name: At_2mM_SA_P Parameter: Plant Line Value: WS
  misc_feature: MA Experiment 20000182 PARAMETER Experiment Name: At_2mM_SA_P Parameter: Timepoint (hr) Value: 6
  misc_feature: MA Experiment 20000182 PARAMETER Experiment Name: At_2mM_SA_P Parameter: Tissue Value: Aerial
  misc_feature: MA Experiment 20000182 PARAMETER Experiment Name: At_2mM_SA_P Parameter: Treatment Value: 2mM SA vs. No Treatment
  misc_feature: MA Experiment ID: 20000184 Result: Up-regulated in Transcription
  misc_feature: MA Experiment 20000184 PARAMETER Experiment Name: At_Shoots__P Parameter: Age (day) Value: 7
  misc_feature: MA Experiment 20000184 PARAMETER Experiment Name: At_Shoots__P Parameter: Tissue Value: Shoots vs. Whole Plant
  misc_feature: MA Experiment ID: 20000185 Result: Up-regulated in Transcription
  misc_feature: MA Experiment 20000185 PARAMETER Experiment Name: At_Roots__P Parameter: Age (day) Value: 7 vs. 21
  misc_feature: MA Experiment 20000185 PARAMETER Experiment Name: At_Roots__P Parameter: Organism Value: A. thaliana
  misc_feature: MA Experiment 20000185 PARAMETER Experiment Name: At_Roots__P Parameter: Tissue Value: Roots vs. Whole Plant
  misc_feature: MA Experiment ID: 20000224 Result: Up-regulated in Transcription
  misc_feature: MA Experiment ID: 20000227 Result: Down-regulated in Transcription
  misc_feature: MA Experiment 20000227 PARAMETER Experiment Name: At_Root-Tips-vs-Tops_P Parameter: Tissue Value: Root Tips vs. Root Tops
  misc_feature: MA Experiment ID: 20000267 Result: Down-regulated in Transcription
  misc_feature: MA Experiment 20000267 PARAMETER Experiment Name: At_Drought_P Parameter: Age (day) Value: 7
  misc_feature: MA Experiment 20000267 PARAMETER Experiment Name: At_Drought_P Parameter: Organism Value: A. thaliana
  misc_feature: MA Experiment 20000267 PARAMETER Experiment Name: At_Drought_P Parameter: Plant Line Value: WS
  misc_feature: MA Experiment 20000267 PARAMETER Experiment Name: At_Drought_P Parameter: Timepoint (hr) Value: 6
  misc_feature: MA Experiment 20000267 PARAMETER Experiment Name: At_Drought_P Parameter: Tissue Value: Whole Plant
  misc_feature: MA Experiment 20000267 PARAMETER Experiment Name: At_Drought_P Parameter: Treatment Value: Drought vs. No Drought
  misc_feature: MA Experiment ID: 20000269 Result: Down-regulated in Transcription
  misc_feature: MA Experiment 20000269 PARAMETER Experiment Name: At_1mM_KNO3_L-vs-H_Roots_P Parameter: Age (day) Value: 7,10,12
  misc_feature: MA Experiment 20000269 PARAMETER Experiment Name: At_1mM_KNO3_L-vs-H_Roots_P Parameter: Organism Value: A. thaliana
  misc_feature: MA Experiment 20000269 PARAMETER Experiment Name: At_1mM_KNO3_L-vs-H_Roots_P Parameter: Plant Line Value: WS
  misc_feature: MA Experiment 20000269 PARAMETER Experiment Name: At_1mM_KNO3_L-vs-H_Roots_P Parameter: Timepoint (day) Value: 7,10,12
  misc_feature: MA Experiment 20000269 PARAMETER Experiment Name: At_1mM_KNO3_L-vs-H_Roots_P Parameter: Tissue Value: Roots
  misc_feature: MA Experiment 20000269 PARAMETER Experiment Name: At_1mM_KNO3_L-vs-H_Roots_P Parameter: Treatment Value: 1mM KNO3 vs. 50mM KNO3
  misc_feature: MA Experiment ID: 20000436 Result: Down-regulated in Transcription
  misc_feature: MA Experiment 20000436 PARAMETER Experiment Name: At_Drought_P Parameter: Age (day) Value: 7
  misc_feature: MA Experiment 20000436 PARAMETER Experiment Name: At_Drought_P Parameter: Organism Value: A. thaliana
  misc_feature: MA Experiment 20000436 PARAMETER Experiment Name: At_Drought_P Parameter: Plant Line Value: WS
  misc_feature: MA Experiment 20000436 PARAMETER Experiment Name: At_Drought_P Parameter: Timepoint (hr) Value: 12
  misc_feature: MA Experiment 20000436 PARAMETER Experiment Name: At_Drought_P Parameter: Tissue Value: Whole Plant
  misc_feature: MA Experiment 20000436 PARAMETER Experiment Name: At_Drought_P Parameter: Treatment Value: Drought vs. No Drought
  misc_feature: MA Experiment ID: 20000437 Result: Down-regulated in Transcription
  misc_feature: MA Experiment 20000437 PARAMETER Experiment Name: At_Drought_P Parameter: Age (day) Value: 8
  misc_feature: MA Experiment 20000437 PARAMETER Experiment Name: At_Drought_P Parameter: Organism Value: A. thaliana
  misc_feature: MA Experiment 20000437 PARAMETER Experiment Name: At_Drought_P Parameter: Plant Line Value: WS
  misc_feature: MA Experiment 20000437 PARAMETER Experiment Name: At_Drought_P Parameter: Timepoint (hr) Value: 24
  misc_feature: MA Experiment 20000437 PARAMETER Experiment Name: At_Drought_P Parameter: Tissue Value: Whole Plant
  misc_feature: MA Experiment 20000437 PARAMETER Experiment Name: At_Drought_P Parameter: Treatment Value: Drought vs. No Drought
  misc_feature: MA Experiment ID: 20000438 Result: Up-regulated in Transcription
  misc_feature: MA Experiment 20000438 PARAMETER Experiment Name: At_Shoots__P Parameter: Age (day) Value: 14
  misc_feature: MA Experiment 20000438 PARAMETER Experiment Name: At_Shoots__P Parameter: Tissue Value: Shoots vs. Whole Plant
  misc_feature: MA Experiment ID: 20000439 Result: Up-regulated in Transcription
  misc_feature: MA Experiment 20000439 PARAMETER Experiment Name: At_Roots__P Parameter: Age (day) Value: 14 vs. 21
  misc_feature: MA Experiment 20000439 PARAMETER Experiment Name: At_Roots__P Parameter: Organism Value: A. thaliana
  misc_feature: MA Experiment 20000439 PARAMETER Experiment Name: At_Roots__P Parameter: Tissue Value: Roots vs. Whole Plant
  misc_feature: MA Experiment ID: 20000445 Result: Down-regulated in Transcription
  misc_feature: MA Experiment 20000445 PARAMETER Experiment Name: At_100uM_NAA__P Parameter: Age (day) Value: 14
  misc_feature: MA Experiment 20000445 PARAMETER Experiment Name: At_100uM_NAA__P Parameter: Organism Value: A. thaliana
  misc_feature: MA Experiment 20000445 PARAMETER Experiment Name: At_100uM_NAA__P Parameter: Plant Line Value: WS
  misc_feature: MA Experiment 20000445 PARAMETER Experiment Name: At_100uM_NAA__P Parameter: Timepoint (hr) Value: 6
  misc_feature: MA Experiment 20000445 PARAMETER Experiment Name: At_100uM_NAA__P Parameter: Tissue Value: Aerial
  misc_feature: MA Experiment 20000445 PARAMETER Experiment Name: At_100uM_NAA__P Parameter: Treatment Value: 100uM NAA vs. No Treatment
  misc_feature: MA Experiment ID: 20000452 Result: Up-regulated in Transcription
  misc_feature: MA Experiment 20000452 PARAMETER Experiment Name: At_CS6879_Shoots-Roots_P Parameter: Age (day) Value: 14
  misc_feature: MA Experiment 20000452 PARAMETER Experiment Name: At_CS6879_Shoots-Roots_P Parameter: Organism Value: A. thaliana
  misc_feature: MA Experiment 20000452 PARAMETER Experiment Name: At_CS6879_Shoots-Roots_P Parameter: Plant Line Value: CS6879 vs. WS
  misc_feature: MA Experiment 20000452 PARAMETER Experiment Name: At_CS6879_Shoots-Roots_P Parameter: Tissue Value: Shoots
  misc_feature: MA Experiment ID: 20000453 Result: Down-regulated in Transcription
  misc_feature: MA Experiment 20000453 PARAMETER Experiment Name: At_100uM_ABA_P Parameter: Age (day) Value: 15
  misc_feature: MA Experiment 20000453 PARAMETER Experiment Name: At_100uM_ABA_P Parameter: Organism Value: A. thaliana
  misc_feature: MA Experiment 20000453 PARAMETER Experiment Name: At_100uM_ABA_P Parameter: Plant Line Value: WS
  misc_feature: MA Experiment 20000453 PARAMETER Experiment Name: At_100uM_ABA_P Parameter: Timepoint (hr) Value: 24
  misc_feature: MA Experiment 20000453 PARAMETER Experiment Name: At_100uM_ABA_P Parameter: Tissue Value: Aerial
  misc_feature: MA Experiment 20000453 PARAMETER Experiment Name: At_100uM_ABA_P Parameter: Treatment Value: 100uM ABA vs. No Treatment
  misc_feature: MA Experiment ID: 20000456 Result: Up-regulated in Transcription
  misc_feature: MA Experiment 20000456 PARAMETER Experiment Name: At_100uM_BA_P Parameter: Age (day) Value: 14
  misc_feature: MA Experiment 20000456 PARAMETER Experiment Name: At_100uM_BA_P Parameter: Organism Value: A. thaliana
  misc_feature: MA Experiment 20000456 PARAMETER Experiment Name: At_100uM_BA_P Parameter: Plant Line Value: WS
  misc_feature: MA Experiment 20000456 PARAMETER Experiment Name: At_100uM_BA_P Parameter: Timepoint (hr) Value: 6
  misc_feature: MA Experiment 20000456 PARAMETER Experiment Name: At_100uM_BA_P Parameter: Tissue Value: Aerial
  misc_feature: MA Experiment 20000456 PARAMETER Experiment Name: At_100uM_BA_P Parameter: Treatment Value: 100uM BA vs. No Treatment
  misc_feature: MA Experiment ID: 20000496 Result: Up-regulated in Transcription
  misc_feature: MA Experiment 20000496 PARAMETER Experiment Name: At_Guard_Cells_P Parameter: Harvest Date Value: 7/19/2002
  misc_feature: MA Experiment 20000496 PARAMETER Experiment Name: At_Guard_Cells_P Parameter: Organism Value: Canola
  misc_feature: MA Experiment 20000496 PARAMETER Experiment Name: At_Guard_Cells_P Parameter: Tissue Value: Guard Cells vs. Leaves
  misc_feature: MA Experiment ID: 20000573 Result: Down-regulated in Transcription
  misc_feature: MA Experiment 20000573 PARAMETER Experiment Name: At_100uM_ABA_Mutants__P Parameter: Organism Value: A. thaliana
  misc_feature: MA Experiment 20000573 PARAMETER Experiment Name: At_100uM_ABA_Mutants__P Parameter: Plant Line Value: CS22 vs. Ler wt
  misc_feature: MA Experiment 20000573 PARAMETER Experiment Name: At_100uM_ABA_Mutants__P Parameter: Timepoint (hr) Value: N/A
  misc_feature: MA Experiment 20000573 PARAMETER Experiment Name: At_100uM_ABA_Mutants__P Parameter: Tissue Value: Whole Plant
  misc_feature: MA Experiment 20000573 PARAMETER Experiment Name: At_100uM_ABA_Mutants__P Parameter: Treatment Value: None
  misc_feature: MA Experiment ID: 20000574 Result: Down-regulated in Transcription
  misc_feature: MA Experiment 20000574 PARAMETER Experiment Name: At_100uM_ABA_Mutants__P Parameter: Organism Value: A. thaliana
  misc_feature: MA Experiment 20000574 PARAMETER Experiment Name: At_100uM_ABA_Mutants__P Parameter: Plant Line Value: CS23 vs. Ler wt
  misc_feature: MA Experiment 20000574 PARAMETER Experiment Name: At_100uM_ABA_Mutants__P Parameter: Timepoint (hr) Value: N/A
  misc_feature: MA Experiment 20000574 PARAMETER Experiment Name: At_100uM_ABA_Mutants__P Parameter: Tissue Value: Whole Plant
  misc_feature: MA Experiment 20000574 PARAMETER Experiment Name: At_100uM_ABA_Mutants__P Parameter: Treatment Value: None
  misc_feature: MA Experiment ID: 20000575 Result: Down-regulated in Transcription
  misc_feature: MA Experiment 20000575 PARAMETER Experiment Name: At_100uM_ABA_Mutants__P Parameter: Organism Value: A. thaliana
  misc_feature: MA Experiment 20000575 PARAMETER Experiment Name: At_100uM_ABA_Mutants__P Parameter: Plant Line Value: CS22
  misc_feature: MA Experiment 20000575 PARAMETER Experiment Name: At_100uM_ABA_Mutants__P Parameter: Timepoint (hr) Value: 6
  misc_feature: MA Experiment 20000575 PARAMETER Experiment Name: At_100uM_ABA_Mutants__P Parameter: Tissue Value: Whole Plant
  misc_feature: MA Experiment 20000575 PARAMETER Experiment Name: At_100uM_ABA_Mutants__P Parameter: Treatment Value: 1uM ABA vs. No Treatment
  misc_feature: MA Experiment ID: 20000576 Result: Down-regulated in Transcription
  misc_feature: MA Experiment 20000576 PARAMETER Experiment Name: At_100uM_ABA_Mutants__P Parameter: Organism Value: A. thaliana
  misc_feature: MA Experiment 20000576 PARAMETER Experiment Name: At_100uM_ABA_Mutants__P Parameter: Plant Line Value: CS23
  misc_feature: MA Experiment 20000576 PARAMETER Experiment Name: At_100uM_ABA_Mutants__P Parameter: Timepoint (hr) Value: 6
  misc_feature: MA Experiment 20000576 PARAMETER Experiment Name: At_100uM_ABA_Mutants__P Parameter: Tissue Value: Whole Plant
  misc_feature: MA Experiment 20000576 PARAMETER Experiment Name: At_100uM_ABA_Mutants__P Parameter: Treatment Value: 1uM ABA vs. No Treatment
  misc_feature: MA Experiment ID: 20001247 Result: Down-regulated in Transcription
  misc_feature: MA Experiment 20001247 PARAMETER Experiment Name: At_Far-red-induction_P Parameter: Age (day) Value: 7
  misc_feature: MA Experiment 20001247 PARAMETER Experiment Name: At_Far-red-induction_P Parameter: Light Value: Far-red vs. White
  misc_feature: MA Experiment 20001247 PARAMETER Experiment Name: At_Far-red-induction_P Parameter: Organism Value: A. thaliana
  misc_feature: MA Experiment 20001247 PARAMETER Experiment Name: At_Far-red-induction_P Parameter: Plant Line Value: Columbia
  misc_feature: MA Experiment 20001247 PARAMETER Experiment Name: At_Far-red-induction_P Parameter: Timepoint (hr) Value: 1
  misc_feature: MA Experiment 20001247 PARAMETER Experiment Name: At_Far-red-induction_P Parameter: Tissue Value: Whole Plant
  misc_feature: MA Experiment ID: 20001248 Result: Down-regulated in Transcription
  misc_feature: MA Experiment 20001248 PARAMETER Experiment Name: At_Far-red-induction_P Parameter: Age (day) Value: 7
  misc_feature: MA Experiment 20001248 PARAMETER Experiment Name: At_Far-red-induction_P Parameter: Light Value: Far-red vs. White
  misc_feature: MA Experiment 20001248 PARAMETER Experiment Name: At_Far-red-induction_P Parameter: Organism Value: A. thaliana
  misc_feature: MA Experiment 20001248 PARAMETER Experiment Name: At_Far-red-induction_P Parameter: Plant Line Value: Columbia
  misc_feature: MA Experiment 20001248 PARAMETER Experiment Name: At_Far-red-induction_P Parameter: Timepoint (hr) Value: 4
  misc_feature: MA Experiment 20001248 PARAMETER Experiment Name: At_Far-red-induction_P Parameter: Tissue Value: Whole Plant
  misc_feature: MA Experiment ID: 20001450 Result: Down-regulated in Transcription
  misc_feature: MA Experiment 20001450 PARAMETER Experiment Name: At_Far-red-induction_P Parameter: Age (day) Value: 7
  misc_feature: MA Experiment 20001450 PARAMETER Experiment Name: At_Far-red-induction_P Parameter: Light Value: Far-red vs. White
  misc_feature: MA Experiment 20001450 PARAMETER Experiment Name: At_Far-red-induction_P Parameter: Organism Value: A. thaliana
  misc_feature: MA Experiment 20001450 PARAMETER Experiment Name: At_Far-red-induction_P Parameter: Plant Line Value: Columbia
  misc_feature: MA Experiment 20001450 PARAMETER Experiment Name: At_Far-red-induction_P Parameter: Timepoint (hr) Value: 8
  misc_feature: MA Experiment 20001450 PARAMETER Experiment Name: At_Far-red-induction_P Parameter: Tissue Value: Whole Plant
  misc_feature: MA Experiment ID: 20001451 Result: Down-regulated in Transcription
  misc_feature: MA Experiment 20001451 PARAMETER Experiment Name: At_Far-red-induction_P Parameter: Age (day) Value: 7
  misc_feature: MA Experiment 20001451 PARAMETER Experiment Name: At_Far-red-induction_P Parameter: Light Value: Far-red vs. White
  misc_feature: MA Experiment 20001451 PARAMETER Experiment Name: At_Far-red-induction_P Parameter: Organism Value: A. thaliana
  misc_feature: MA Experiment 20001451 PARAMETER Experiment Name: At_Far-red-induction_P Parameter: Plant Line Value: Columbia
  misc_feature: MA Experiment 20001451 PARAMETER Experiment Name: At_Far-red-induction_P Parameter: Timepoint (hr) Value: 24
  misc_feature: MA Experiment 20001451 PARAMETER Experiment Name: At_Far-red-induction_P Parameter: Tissue Value: Whole Plant
  misc_feature: MA Experiment ID: 20001556 Result: Up-regulated in Transcription
  misc_feature: MA Experiment 20001556 PARAMETER Experiment Name: At_Drought_Soil_Dry_P Parameter: Age (day) Value: 26
  misc_feature: MA Experiment 20001556 PARAMETER Experiment Name: At_Drought_Soil_Dry_P Parameter: Organism Value: A. thaliana
  misc_feature: MA Experiment 20001556 PARAMETER Experiment Name: At_Drought_Soil_Dry_P Parameter: Plant Line Value: WS
  misc_feature: MA Experiment 20001556 PARAMETER Experiment Name: At_Drought_Soil_Dry_P Parameter: Post Timepoint (hr) Value: None
  misc_feature: MA Experiment 20001556 PARAMETER Experiment Name: At_Drought_Soil_Dry_P Parameter: Post-Treatment Value: None
  misc_feature: MA Experiment 20001556 PARAMETER Experiment Name: At_Drought_Soil_Dry_P Parameter: Timepoint (day) Value: 12
  misc_feature: MA Experiment 20001556 PARAMETER Experiment Name: At_Drought_Soil_Dry_P Parameter: Treatment Value: Drought vs. No Drought
  misc_feature: MA Experiment ID: 20001557 Result: Up-regulated in Transcription
  misc_feature: MA Experiment 20001557 PARAMETER Experiment Name: At_Drought_Soil_Dry_P Parameter: Age (day) Value: 27
  misc_feature: MA Experiment 20001557 PARAMETER Experiment Name: At_Drought_Soil_Dry_P Parameter: Organism Value: A. thaliana
  misc_feature: MA Experiment 20001557 PARAMETER Experiment Name: At_Drought_Soil_Dry_P Parameter: Plant Line Value: WS
  misc_feature: MA Experiment 20001557 PARAMETER Experiment Name: At_Drought_Soil_Dry_P Parameter: Post Timepoint (hr) Value: 3
  misc_feature: MA Experiment 20001557 PARAMETER Experiment Name: At_Drought_Soil_Dry_P Parameter: Post-Treatment Value: Re-Water vs. No Drought
  misc_feature: MA Experiment 20001557 PARAMETER Experiment Name: At_Drought_Soil_Dry_P Parameter: Timepoint (day) Value: 13
  misc_feature: MA Experiment 20001557 PARAMETER Experiment Name: At_Drought_Soil_Dry_P Parameter: Treatment Value: Drought vs. No Drought
  misc_feature: MA Experiment ID: 20001560 Result: Down-regulated in Transcription
  misc_feature: MA Experiment 20001560 PARAMETER Experiment Name: At_Drought_Soil_Dry_P Parameter: Age (day) Value: 28
  misc_feature: MA Experiment 20001560 PARAMETER Experiment Name: At_Drought_Soil_Dry_P Parameter: Organism Value: A. thaliana
  misc_feature: MA Experiment 20001560 PARAMETER Experiment Name: At_Drought_Soil_Dry_P Parameter: Plant Line Value: WS
  misc_feature: MA Experiment 20001560 PARAMETER Experiment Name: At_Drought_Soil_Dry_P Parameter: Post Timepoint (hr) Value: None
  misc_feature: MA Experiment 20001560 PARAMETER Experiment Name: At_Drought_Soil_Dry_P Parameter: Post-Treatment Value: None
  misc_feature: MA Experiment 20001560 PARAMETER Experiment Name: At_Drought_Soil_Dry_P Parameter: Timepoint (day) Value: 14
  misc_feature: MA Experiment 20001560 PARAMETER Experiment Name: At_Drought_Soil_Dry_P Parameter: Treatment Value: Drought vs. No Drought
  misc_feature: MA Experiment ID: 20001757 Result: Up-regulated in Transcription
  misc_feature: MA Experiment 20001757 PARAMETER Experiment Name: At_50mM_NH4NO3_L-to-H_P Parameter: Timepoint (hr) Value: 6
  misc_feature: MA Experiment 20001757 PARAMETER Experiment Name: At_50mM_NH4NO3_L-to-H_P Parameter: Tissue Value: Leaf
  misc_feature: MA Experiment 20001757 PARAMETER Experiment Name: At_50mM_NH4NO3_L-to-H_P Parameter: Treatment Value: 50mM NH4NO3 vs 100mM Mannitol
  misc_feature: MA Experiment ID: 20001770 Result: Down-regulated in Transcription
  misc_feature: MA Experiment 20001770 PARAMETER Experiment Name: At_Far-red-enriched-adult_P Parameter: Age (day) Value: 28
  misc_feature: MA Experiment 20001770 PARAMETER Experiment Name: At_Far-red-enriched-adult_P Parameter: Light Value: Far-red enriched vs. White
  misc_feature: MA Experiment 20001770 PARAMETER Experiment Name: At_Far-red-enriched-adult_P Parameter: Organism Value: A. thaliana
  misc_feature: MA Experiment 20001770 PARAMETER Experiment Name: At_Far-red-enriched-adult_P Parameter: Plant Line Value: Columbia
  misc_feature: MA Experiment 20001770 PARAMETER Experiment Name: At_Far-red-enriched-adult_P Parameter: Timepoint (hr) Value: 8
  misc_feature: MA Experiment 20001770 PARAMETER Experiment Name: At_Far-red-enriched-adult_P Parameter: Tissue Value: Aerial
  misc_feature: MA Experiment ID: 20001906 Result: Down-regulated in Transcription
  misc_feature: MA Experiment 20001906 PARAMETER Experiment Name: At_Drought_Reproduction_P Parameter: Age (day) Value: 35
  misc_feature: MA Experiment 20001906 PARAMETER Experiment Name: At_Drought_Reproduction_P Parameter: Organism Value: A. thaliana
  misc_feature: MA Experiment 20001906 PARAMETER Experiment Name: At_Drought_Reproduction_P Parameter: Plant Line Value: WS
  misc_feature: MA Experiment 20001906 PARAMETER Experiment Name: At_Drought_Reproduction_P Parameter: Timepoint (day) Value: 5
  misc_feature: MA Experiment 20001906 PARAMETER Experiment Name: At_Drought_Reproduction_P Parameter: Tissue Value: Siliques
  misc_feature: MA Experiment 20001906 PARAMETER Experiment Name: At_Drought_Reproduction_P Parameter: Treatment Value: Drought vs. No Drought
attcatttcatacatatttgtctctcttaaatgtgtttatttccccttttgtagtaaccactcagaaggttttccttcactcaaaatggctttgtctcttatctttctagctctcgtagtgttgtgccctagtagtggtcatagccaacgttctccttcaccgggatactacccgagttcccgggtaccgacttcaccttttgatcgtgaattccgtactttatggggctctcaacaccaacgtagagagcaagacgttgtcactctttggctcgacaaatccactgggagtgggttcaagtctcttcgtccataccggtcgggctactttggtgcttccattaagctccaaccaggcttcacggctggagtggatacatccctctatctctcaaacaaccaagagcatcctggggaccacgatgaggtcgatatcgagtttctagggacaacgccagggaagccttattcccttcaaacaaatgtattcgttaggggaagtggcgaccgaaatgtcattggaagagaaatgaaatttaccttgtggtttgaccctactcaagattttcaccattacgcaattttgtggaaccctaaccaaattgtattctttgtagacgatgtaccgatacgtacatataatagaaagaatgaagctatattccccacaagaccgatgtgggtttacggatcgatatgggatgcatcggactgggccacagaaaatggaaggatcaaagctgactaccgataccaaccatttgtggctaagtacaagaactttaagctagcgggatgcacagcggatagctctagctcatgcagaccgccatcgcctgcacccatgcgcaaccgtgggttgacccggcagcagatggcggcattgacatgggcacagaggaacttcttggtctataactattgccatgacccgaaaagagaccatacccaaacaccagaatgttaaaacaaacaaacaaaacaaccaaagaaaggttataataattttattttgcattacccaacatacatgaataatgggaggtcttgtgacgggtccacactggaaactaaattgaagcagttgagcgtccggtcctctatgatttgagattaaaaagaaaaggttttgtttttcaaaactttgtaatgtttccatttggtatctttcttataattgtaatattgtgtgatcacatatattaatatctggtattgtatt

SEQ ID NO: 76470 - protein, 321 aa, Arabidopsis thaliana
  peptide (1)..(321): Ceres Seq. ID no. 7108118
  misc_feature (67)..(251): Pfam Name: Glycosyl hydrolases family 16 Pfam Description: Glycosyl hydrolases family 16
  misc_feature (29)..(321): Homolog of NCBI NO: 1769907 NR Description: xyloglucan endo-transglycosylase [Arabidopsis
  misc_feature (29)..(321): Homolog of NCBI NO: 15230574 NR Description: xyloglucan endotransglycosylase, putative; id: At3g44990.1, supported by cDNA: gi_15810248 [Arabidopsis
  misc_feature (33)..(321): Homolog of NCBI NO: 14029149 NR Description: xyloglucan endo-transglycosylase [Carica papaya]
  misc_feature (31)..(321): Homolog of NCBI NO: 15228047 NR Description: xyloglucan endotransglycosylase, putative; id: At2g36870.1, supported by cDNA: 7831., supported by cDNA:
  misc_feature (38)..(321): Homolog of NCBI NO: 17402583 NR Description: Xyloglucan endo-transglycosylase [Vitis labrusca
  misc_feature (34)..(321): Homolog of NCBI NO: 1362078 NR Description: xyloglucan endo-1,4-beta-D-glucanase (EC 3.2.1.-)
  misc_feature (33)..(321): Homolog of NCBI NO: 34901732 NR Description: putative xyloglucan endo-transglycosylase [Oryza
  misc_feature (31)..(321): Homolog of NCBI NO: 37536586 NR Description: putative cellulase [Oryza sativa (japonica
  misc_feature (130)..(321): Homolog of NCBI NO: 1084391 NR Description: xyloglucan endo-1,4-beta-D-glucanase (EC 3.2.1.-)
  misc_feature (28)..(321): Homolog of NCBI NO: 2129774 NR Description: xyloglucan endo-1,4-beta-D-glucanase (EC 3.2.1.-) - Arabidopsis thaliana (fragment) >gi|1244754|gb|AAB18365.1|
FISYIFVSLKCVYFPFCSNHSEGFPSLKMALSLIFLALVVLCPSSGHSQRSPSPGYYPSSRVPTSPFDREFRTLWGSQHQRREQDVVTLWLDKSTGSGFKSLRPYRSGYFGASIKLQPGFTAGVDTSLYLSNNQEHPGDHDEVDIEFLGTTPGKPYSLQTNVFVRGSGDRNVIGREMKFTLWFDPTQDFHHYAILWNPNQIVFFVDDVPIRTYNRKNEAIFPTRPMWVYGSIWDASDWATENGRIKADYRYQPFVAKYKNFKLAGCTADSSSSCRPPSPAPMRNRGLTRQQMAALTWAQRNFLVYNYCHDPKRDHTQTPEC

SEQ ID NO: 76471 - protein, 293 aa, Arabidopsis thaliana
  peptide (1)..(293): Ceres Seq. ID no. 7108119
  misc_feature (39)..(223): Pfam Name: Glycosyl hydrolases family 16 Pfam Description: Glycosyl hydrolases family 16
  misc_feature (1)..(293): Homolog of NCBI NO: 1769907 NR Description: xyloglucan endo-transglycosylase [Arabidopsis
  misc_feature (1)..(293): Homolog of NCBI NO: 15230574 NR Description: xyloglucan endotransglycosylase, putative; id: At3g44990.1, supported by cDNA: gi_15810248 [Arabidopsis
  misc_feature (5)..(293): Homolog of NCBI NO: 14029149 NR Description: xyloglucan endo-transglycosylase [Carica papaya]
  misc_feature (3)..(293): Homolog of NCBI NO: 15228047 NR Description: xyloglucan endotransglycosylase, putative; id: At2g36870.1, supported by cDNA: 7831., supported by cDNA:
  misc_feature (10)..(293): Homolog of NCBI NO: 17402583 NR Description: Xyloglucan endo-transglycosylase [Vitis labrusca
  misc_feature (6)..(293): Homolog of NCBI NO: 1362078 NR Description: xyloglucan endo-1,4-beta-D-glucanase (EC 3.2.1.-)
  misc_feature (5)..(293): Homolog of NCBI NO: 34901732 NR Description: putative xyloglucan endo-transglycosylase [Oryza
  misc_feature (3)..(293): Homolog of NCBI NO: 37536586 NR Description: putative cellulase [Oryza sativa (japonica
  misc_feature (102)..(293): Homolog of NCBI NO: 1084391 NR Description: xyloglucan endo-1,4-beta-D-glucanase (EC 3.2.1.-)
  misc_feature (1)..(293): Homolog of NCBI NO: 2129774 NR Description: xyloglucan endo-1,4-beta-D-glucanase (EC 3.2.1.-) - Arabidopsis thaliana (fragment) >gi|1244754|gb|AAB18365.1|
MALSLIFLALVVLCPSSGHSQRSPSPGYYPSSRVPTSPFDREFRTLWGSQHQRREQDVVTLWLDKSTGSGFKSLRPYRSGYFGASIKLQPGFTAGVDTSLYLSNNQEHPGDHDEVDIEFLGTTPGKPYSLQTNVFVRGSGDRNVIGREMKFTLWFDPTQDFHHYAILWNPNQIVFFVDDVPIRTYNRKNEAIFPTRPMWVYGSIWDASDWATENGRIKADYRYQPFVAKYKNFKLAGCTADSSSSCRPPSPAPMRNRGLTRQQMAALTWAQRNFLVYNYCHDPKRDHTQTPEC

SEQ ID NO: 76472 - DNA, 1680 bp, Arabidopsis thaliana
  misc_feature (1)..(1680): Ceres Seq. ID no. 7108120
  misc_feature: MA Experiment ID: 20000185 Result: Up-regulated in Transcription
  misc_feature: MA Experiment 20000185 PARAMETER Experiment Name: At_Roots__P Parameter: Age (day) Value: 7 vs. 21
  misc_feature: MA Experiment 20000185 PARAMETER Experiment Name: At_Roots__P Parameter: Organism Value: A. thaliana
  misc_feature: MA Experiment 20000185 PARAMETER Experiment Name: At_Roots__P Parameter: Tissue Value: Roots vs. Whole Plant
  misc_feature: MA Experiment ID: 20000439 Result: Up-regulated in Transcription
  misc_feature: MA Experiment 20000439 PARAMETER Experiment Name: At_Roots__P Parameter: Age (day) Value: 14 vs. 21
  misc_feature: MA Experiment 20000439 PARAMETER Experiment Name: At_Roots__P Parameter: Organism Value: A. thaliana
  misc_feature: MA Experiment 20000439 PARAMETER Experiment Name: At_Roots__P Parameter: Tissue Value: Roots vs. Whole Plant
  misc_feature: MA Experiment ID: 20000496 Result: Up-regulated in Transcription
  misc_feature: MA Experiment 20000496 PARAMETER Experiment Name: At_Guard_Cells_P Parameter: Harvest Date Value: 7/19/2002
  misc_feature: MA Experiment 20000496 PARAMETER Experiment Name: At_Guard_Cells_P Parameter: Organism Value: Canola
  misc_feature: MA Experiment 20000496 PARAMETER Experiment Name: At_Guard_Cells_P Parameter: Tissue Value: Guard Cells vs. Leaves
  misc_feature: MA Experiment ID: 20000794 Result: Up-regulated in Transcription
  misc_feature: MA Experiment 20000794 PARAMETER Experiment Name: At_Petals_P Parameter: Age (day) Value: 23-25 days
  misc_feature: MA Experiment 20000794 PARAMETER Experiment Name: At_Petals_P Parameter: Plant Line Value: WS
  misc_feature: MA Experiment 20000794 PARAMETER Experiment Name: At_Petals_P Parameter: Tissue Value: Petals vs. Whole plant
  misc_feature: MA Experiment ID: 20001451 Result: Down-regulated in Transcription
  misc_feature: MA Experiment 20001451 PARAMETER Experiment Name: At_Far-red-induction_P Parameter: Age (day) Value: 7
  misc_feature: MA Experiment 20001451 PARAMETER Experiment Name: At_Far-red-induction_P Parameter: Light Value: Far-red vs. White
  misc_feature: MA Experiment 20001451 PARAMETER Experiment Name: At_Far-red-induction_P Parameter: Organism Value: A. thaliana
  misc_feature: MA Experiment 20001451 PARAMETER Experiment Name: At_Far-red-induction_P Parameter: Plant Line Value: Columbia
  misc_feature: MA Experiment 20001451 PARAMETER Experiment Name: At_Far-red-induction_P Parameter: Timepoint (hr) Value: 24
  misc_feature: MA Experiment 20001451 PARAMETER Experiment Name: At_Far-red-induction_P Parameter: Tissue Value: Whole Plant
  misc_feature: MA Experiment ID: 20001905 Result: Up-regulated in Transcription
  misc_feature: MA Experiment 20001905 PARAMETER Experiment Name: At_Drought_Reproduction_P Parameter: Age (day) Value: 40
  misc_feature: MA Experiment 20001905 PARAMETER Experiment Name: At_Drought_Reproduction_P Parameter: Organism Value: A. thaliana
  misc_feature: MA Experiment 20001905 PARAMETER Experiment Name: At_Drought_Reproduction_P Parameter: Plant Line Value: WS
  misc_feature: MA Experiment 20001905 PARAMETER Experiment Name: At_Drought_Reproduction_P Parameter: Timepoint (day) Value: 10
  misc_feature: MA Experiment 20001905 PARAMETER Experiment Name: At_Drought_Reproduction_P Parameter: Tissue Value: Rosettes
  misc_feature: MA Experiment 20001905 PARAMETER Experiment Name: At_Drought_Reproduction_P Parameter: Treatment Value: Drought vs. No Drought
  misc_feature: Pfam Name: Citrate_synt Pfam Description: Citrate synthase
ggaattcggctcgatctcccgtgaagctctcgaatctctggttttgagttttggagaatggtgtttttccgcagcgtatcggcctttactaggctgaggtctcgcgtccagggccaacaatcttcactcagcaattctgtcagatggattcagatgcagagctctaccgacctggacctgaagtcgcagctgcaagagttaattccggaacacaaggaccgtctgaagaaactgaagtcagaacatgggaaggtccaactgggaaacatcactgttgatatggttattggtggaatgagagggatgactggattgctttgggaaacctcattgcttgacccggaagaggtattcgctttaggggattgtcgacttcctgagtgccagaaagccctattacctactgcccagtctggaggcttgaaccattaccggaggtcttttgtggcttctcttaactggaaaggtaccttagcaaagagcaagttgaagcactgtcgaaagacttggaaccgtgctgctgtgtcagattatgtgtacaatgccatcgatgctctgccttccacagctcatccaatgactcaatttgctagcggtgttatggccctccaggtgcaaagtgagtttcaaaaggcatatgagaatggaattcataagtcaaagttctgggagccaacatatgaggattgcctcaacctgattgctcgtgttcctgttgtagctgcatatgtttatcgaaggatgtataagaatggtgattccattccctcagataaatctttggattatggtgcaaatttttcccacatgttgggatttgatgatgaaaggttgaaagagctcatgaggcttacatcaccatccacagtgatgcatgaaggtggaaatgttagtgctcacactggtcacctggttggtagtgcactttcagacccatatctgtcatttgcagctgcattaaatggtttagctgggccactccatggtttggctaatcaggaagttttgctttggatcaaatcagtcgtagaggaatgtggagaagatatatcaaaagaacagttgaaagaatatgtttggaaaacattaaacagtggcaaggttattccgggatatggtcacggtgttctgcgcaatactgatccaagatatgtatgccaaagagaatttgccttgaagcatcatcctgacgaccctcttttccagtgttgcaagcttatgaagttggcctcctgtctcactgagcttgaaagtgaagaaccctggccaaatgttgatgctcacagtggggtcttgctgaaccactatggtctaaccgaagcaaggtactacaccgtgctctttggtgtttcaaggagtcttggcatctgctctcagcttatatgggaccgagagctcttgcttgcacttgagaggccaaagagtgttaccatggactggcttgaagcccattgtaagaaagcttcatctgcttaactcaccaccgagtcctgagttgtgccactctctgtgtttcaacaaaagtcattctcttccacactggatagttttttttgtttttaccttctattgacagaagaaagcatttgttcatgtagaaattgttcctgagaaacacatgcttggtgcaaatttgcatttccgggaaactcgtgataataataaataaacagttgtatt

SEQ ID NO: 76473 - protein, 472 aa, Arabidopsis thaliana
  peptide (1)..(472): Ceres Seq. ID no. 7108121
  misc_feature: Pfam Name: Citrate_synt Pfam Description: Citrate synthase
  misc_feature (1)..(472): Homolog of NCBI NO: 68230 NR Description: citrate (si)-synthase (EC 4.1.3.7) precursor,
  misc_feature (1)..(472): Homolog of NCBI NO: 30689693 NR Description: citrate synthase [Arabidopsis thaliana]
  misc_feature (1)..(472): Homolog of NCBI NO: 18406515 NR Description: citrate synthase; protein id: At2g44350.1, by cDNA: 16528., supported by cDNA: gi_14423561 [Arabidopsis >gi|27735166|sp|P20115|CISY_ARATH Citrate synthase, mitochondrial
  misc_feature (1)..(472): Homolog of NCBI NO: 21553775 NR Description: citrate synthase [Arabidopsis thaliana]
  misc_feature (1)..(470): Homolog of NCBI NO: 8928010 NR Description: Citrate synthase, mitochondrial precursor
  misc_feature (1)..(469): Homolog of NCBI NO: 1556429 NR Description: citrate synthase [Nicotiana tabacum]
  misc_feature (1)..(470): Homolog of NCBI NO: 1352088 NR Description: Citrate synthase, mitochondrial precursor
  misc_feature (1)..(471): Homolog of NCBI NO: 11066954 NR Description: citrate synthase [Oryza sativa]
  misc_feature (1)..(472): Homolog of NCBI NO: 15982952 NR Description: citrate synthase [Prunus persica]
  misc_feature (1)..(469): Homolog of NCBI NO: 6647461 NR Description: Citrate synthase, mitochondrial precursor
MVFFRSVSAFTRLRSRVQGQQSSLSNSVRWIQMQSSTDLDLKSQLQELIPEHKDRLKKLKSEHGKVQLGNITVDMVIGGMRGMTGLLWETSLLDPEEVFALGDCRLPECQKALLPTAQSGGLNHYRRSFVASLNWKGTLAKSKLKHCRKTWNRAAVSDYVYNAIDALPSTAHPMTQFASGVMALQVQSEFQKAYENGIHKSKFWEPTYEDCLNLIARVPVVAAYVYRRMYKNGDSIPSDKSLDYGANFSHMLGFDDERLKELMRLTSPSTVMHEGGNVSAHTGHLVGSALSDPYLSFAAALNGLAGPLHGLANQEVLLWIKSVVEECGEDISKEQLKEYVWKTLNSGKVIPGYGHGVLRNTDPRYVCQREFALKHHPDDPLFQCCKLMKLASCLTELESEEPWPNVDAHSGVLLNHYGLTEARYYTVLFGVSRSLGICSQLIWDRELLLALERPKSVTMDWLEAHCKKASSA

SEQ ID NO: 76474 - protein, 440 aa, Arabidopsis thaliana
  peptide (1)..(440): Ceres Seq. ID no. 7108122
  misc_feature: Pfam Name: Citrate_synt Pfam Description: Citrate synthase
  misc_feature (1)..(440): Homolog of NCBI NO: 68230 NR Description: citrate (si)-synthase (EC 4.1.3.7) precursor,
  misc_feature (1)..(440): Homolog of NCBI NO: 30689693 NR Description: citrate synthase [Arabidopsis thaliana]
  misc_feature (1)..(440): Homolog of NCBI NO: 18406515 NR Description: citrate synthase; protein id: At2g44350.1, by cDNA: 16528., supported by cDNA: gi_14423561 [Arabidopsis >gi|27735166|sp|P20115|CISY_ARATH Citrate synthase, mitochondrial
  misc_feature (1)..(440): Homolog of NCBI NO: 21553775 NR Description: citrate synthase [Arabidopsis thaliana]
  misc_feature (1)..(438): Homolog of NCBI NO: 8928010 NR Description: Citrate synthase, mitochondrial precursor
  misc_feature (1)..(437): Homolog of NCBI NO: 1556429 NR Description: citrate synthase [Nicotiana tabacum]
  misc_feature (1)..(438): Homolog of NCBI NO: 1352088 NR Description: Citrate synthase, mitochondrial precursor
  misc_feature (1)..(439): Homolog of NCBI NO: 11066954 NR Description: citrate synthase [Oryza sativa]
  misc_feature (1)..(440): Homolog of NCBI NO: 15982952 NR Description: citrate synthase [Prunus persica]
  misc_feature (1)..(437): Homolog of NCBI NO: 6647461 NR Description: Citrate synthase, mitochondrial precursor
MQSSTDLDLKSQLQELIPEHKDRLKKLKSEHGKVQLGNITVDMVIGGMRGMTGLLWETSLLDPEEVFALGDCRLPECQKALLPTAQSGGLNHYRRSFVASLNWKGTLAKSKLKHCRKTWNRAAVSDYVYNAIDALPSTAHPMTQFASGVMALQVQSEFQKAYENGIHKSKFWEPTYEDCLNLIARVPVVAAYVYRRMYKNGDSIPSDKSLDYGANFSHMLGFDDERLKELMRLTSPSTVMHEGGNVSAHTGHLVGSALSDPYLSFAAALNGLAGPLHGLANQEVLLWIKSVVEECGEDISKEQLKEYVWKTLNSGKVIPGYGHGVLRNTDPRYVCQREFALKHHPDDPLFQCCKLMKLASCLTELESEEPWPNVDAHSGVLLNHYGLTEARYYTVLFGVSRSLGICSQLIWDRELLLALERPKSVTMDWLEAHCKKASSA

SEQ ID NO: 76475 - protein, 398 aa, Arabidopsis thaliana
  peptide (1)..(398): Ceres Seq. ID no. 7108123
  misc_feature: Pfam Name: Citrate_synt Pfam Description: Citrate synthase
  misc_feature (1)..(398): Homolog of NCBI NO: 68230 NR Description: citrate (si)-synthase (EC 4.1.3.7) precursor,
  misc_feature (1)..(398): Homolog of NCBI NO: 30689693 NR Description: citrate synthase [Arabidopsis thaliana]
  misc_feature (1)..(398): Homolog of NCBI NO: 18406515 NR Description: citrate synthase; protein id: At2g44350.1, by cDNA: 16528., supported by cDNA: gi_14423561 [Arabidopsis >gi|27735166|sp|P20115|CISY_ARATH Citrate synthase, mitochondrial
  misc_feature (1)..(398): Homolog of NCBI NO: 21553775 NR Description: citrate synthase [Arabidopsis thaliana]
  misc_feature (1)..(396): Homolog of NCBI NO: 8928010 NR Description: Citrate synthase, mitochondrial precursor
  misc_feature (1)..(395): Homolog of NCBI NO: 1556429 NR Description: citrate synthase [Nicotiana tabacum]
  misc_feature (1)..(396): Homolog of NCBI NO: 1352088 NR Description: Citrate synthase, mitochondrial precursor
  misc_feature (1)..(397): Homolog of NCBI NO: 11066954 NR Description: citrate synthase [Oryza sativa]
  misc_feature (1)..(398): Homolog of NCBI NO: 15982952 NR Description: citrate synthase [Prunus persica]
  misc_feature (1)..(395): Homolog of NCBI NO: 6647461 NR Description: Citrate synthase, mitochondrial precursor
MVIGGMRGMTGLLWETSLLDPEEVFALGDCRLPECQKALLPTAQSGGLNHYRRSFVASLNWKGTLAKSKLKHCRKTWNRAAVSDYVYNAIDALPSTAHPMTQFASGVMALQVQSEFQKAYENGIHKSKFWEPTYEDCLNLIARVPVVAAYVYRRMYKNGDSIPSDKSLDYGANFSHMLGFDDERLKELMRLTSPSTVMHEGGNVSAHTGHLVGSALSDPYLSFAAALNGLAGPLHGLANQEVLLWIKSVVEECGEDISKEQLKEYVWKTLNSGKVIPGYGHGVLRNTDPRYVCQREFALKHHPDDPLFQCCKLMKLASCLTELESEEPWPNVDAHSGVLLNHYGLTEARYYTVLFGVSRSLGICSQLIWDRELLLALERPKSVTMDWLEAHCKKASSA

SEQ ID NO: 76476 - DNA, 1056 bp, Arabidopsis thaliana
  misc_feature (1)..(1056): Ceres Seq. ID no. 7108134
  misc_feature: MA Experiment ID: 108434 Result: Up-regulated in Transcription
  misc_feature: MA Experiment 108434 PARAMETER Experiment Name: At_Root_Tips_cDNA_P Parameter: Tissue Value: Root Tips
  misc_feature: MA Experiment ID: 108595 Result: Down-regulated in Transcription
  misc_feature: MA Experiment 108595 PARAMETER Experiment Name: At_Ler-pi_Ovule_cDNA_P Parameter: Plant Line Value: null
  misc_feature: MA Experiment ID: 20000185 Result: Down-regulated in Transcription
  misc_feature: MA Experiment 20000185 PARAMETER Experiment Name: At_Roots__P Parameter: Age (day) Value: 7 vs. 21
  misc_feature: MA Experiment 20000185 PARAMETER Experiment Name: At_Roots__P Parameter: Organism Value: A. thaliana
  misc_feature: MA Experiment 20000185 PARAMETER Experiment Name: At_Roots__P Parameter: Tissue Value: Roots vs. Whole Plant
  misc_feature: MA Experiment ID: 20000439 Result: Down-regulated in Transcription
  misc_feature: MA Experiment 20000439 PARAMETER Experiment Name: At_Roots__P Parameter: Age (day) Value: 14 vs. 21
  misc_feature: MA Experiment 20000439 PARAMETER Experiment Name: At_Roots__P Parameter: Organism Value: A. thaliana
  misc_feature: MA Experiment 20000439 PARAMETER Experiment Name: At_Roots__P Parameter: Tissue Value: Roots vs. Whole Plant
  misc_feature: MA Experiment ID: 20001905 Result: Down-regulated in Transcription
  misc_feature: MA Experiment 20001905 PARAMETER Experiment Name: At_Drought_Reproduction_P Parameter: Age (day) Value: 40
  misc_feature: MA Experiment 20001905 PARAMETER Experiment Name: At_Drought_Reproduction_P Parameter: Organism Value: A. thaliana
  misc_feature: MA Experiment 20001905 PARAMETER Experiment Name: At_Drought_Reproduction_P Parameter: Plant Line Value: WS
  misc_feature: MA Experiment 20001905 PARAMETER Experiment Name: At_Drought_Reproduction_P Parameter: Timepoint (day) Value: 10
  misc_feature: MA Experiment 20001905 PARAMETER Experiment Name: At_Drought_Reproduction_P Parameter: Tissue Value: Rosettes
  misc_feature: MA Experiment 20001905 PARAMETER Experiment Name: At_Drought_Reproduction_P Parameter: Treatment Value: Drought vs. No Drought
gagtaatttagcatctatccacgcctgaacccgaaaaactctgaaagctgagctctggtaatggcgggtttagcaatttcacctcctctcggtctttccttctcttctcgaactcgaaaccctaaacccacttcctttctatctcacaatcaaaggaatcctataagacgtatagtttctgctctacagagtccatatggagattctctgaaagctggactttctagtaatgtttctggatccccaataaagattgacaacaaggctccaagatttggagtgatagaggcgaaaaagggaaaccccccagtaatgccttcagtgatgacccctggaggacctttagacctctcttctgtgttattccgtaaccgcataatcttcatcgggcaaccaattaacgcacaggttgctcagcgagtcatatctcagcttgtaacccttgcatctattgatgataaatccgacatcctgatgtacttgaattgtcccggtggcagtacttactccgtcctaacaatttatgactgtatgtcttggataaagcctaaagttggaacagtggcgtttggagtagctgcaagccaaggagcattttttcttgctggaggtgaaaaaggaatgcgttatgcaatgccaaatactcgtgtcatgatacatcaaccacaaactggatgcggaggacatgtagaggacgtgaggagacaggtcaatgaagccatcgaagcccgacaaaaaattgacaggatgtatgcagctttcactggacaacctctggagaaagtgcagcaatacactgaaagagatcgtttcttatcagcatctgaggcgtttgagttcgggctcattgatggtctattggaaacagaatactgaagcagcatacaggacaatgcacaacaacagctcattgcaatgttcaaagcttccattttcatttgaatatgaacggttgtaactgatatttgtgcataaatcagtttggttttcttggttttattgtctactaaacagaatgagaaaactaaactgtttatttttttactgaaaaatctg

SEQ ID NO: 76477 - protein, 271 aa, Arabidopsis thaliana
  peptide (1)..(271): Ceres Seq. ID no. 7108135
  misc_feature (91)..(270): Pfam Name: Clp protease Pfam Description: Clp protease
  misc_feature (1)..(271): Homolog of NCBI NO: 2827888 NR Description: ATP-dependent Clp protease proteolytic subunit
  misc_feature (1)..(271): Homolog of NCBI NO: 18391311 NR Description: ATP-dependent Clp protease proteolytic subunit protein id: At1g11750.1, supported by cDNA: 33299., supported by gi_13194777, supported by cDNA: gi_2827887 [Arabidopsis thaliana]
  misc_feature (1)..(271): Homolog of NCBI NO: 2921510 NR Description: clp-like energy-dependent protease [Fritillaria
  misc_feature (24)..(271): Homolog of NCBI NO: 7435703 NR Description: endopeptidase Clp (EC 3.4.21.92) chain P
  misc_feature (13)..(248): Homolog of NCBI NO: 9968665 NR Description: putative ATP-dependent clp serine protease
  misc_feature (1)..(271): Homolog of NCBI NO: 28209486 NR Description: putative clp-like energy-dependent protease
  misc_feature (65)..(267): Homolog of NCBI NO: 16332068 NR Description: ATP-dependent Clp protease proteolytic subunit
  misc_feature (96)..(268): Homolog of NCBI NO: 1705929 NR Description: ATP-dependent Clp protease proteolytic subunit 1
  misc_feature (67)..(270): Homolog of NCBI NO: 17231175 NR Description: ATP-dependent Clp protease proteolytic subunit
  misc_feature (96)..(267): Homolog of NCBI NO: 33592842 NR Description: ATP-dependent Clp protease proteolytic subunit
MAGLAISPPLGLSFSSRTRNPKPTSFLSHNQRNPIRRIVSALQSPYGDSLKAGLSSNVSGSPIKIDNKAPRFGVIEAKKGNPPVMPSVMTPGGPLDLSSVLFRNRIIFIGQPINAQVAQRVISQLVTLASIDDKSDILMYLNCPGGSTYSVLTIYDCMSWIKPKVGTVAFGVAASQGAFFLAGGEKGMRYAMPNTRVMIHQPQTGCGGHVEDVRRQVNEAIEARQKIDRMYAAFTGQPLEKVQQYTERDRFLSASEAFEFGLIDGLLETEY

SEQ ID NO: 76478 - protein, 187 aa, Arabidopsis thaliana
  peptide (1)..(187): Ceres Seq. ID no. 7108136
  misc_feature (7)..(186): Pfam Name: Clp protease Pfam Description: Clp protease
  misc_feature (1)..(187): Homolog of NCBI NO: 2827888 NR Description: ATP-dependent Clp protease proteolytic subunit
  misc_feature (1)..(187): Homolog of NCBI NO: 18391311 NR Description: ATP-dependent Clp protease proteolytic subunit protein id: At1g11750.1, supported by cDNA: 33299., supported by gi_13194777, supported by cDNA: gi_2827887 [Arabidopsis thaliana]
  misc_feature (1)..(187): Homolog of NCBI NO: 2921510 NR Description: clp-like energy-dependent protease [Fritillaria
  misc_feature (1)..(187): Homolog of NCBI NO: 7435703 NR Description: endopeptidase Clp (EC 3.4.21.92) chain P
  misc_feature (1)..(164): Homolog of NCBI NO: 9968665 NR Description: putative ATP-dependent clp serine protease
  misc_feature (1)..(187): Homolog of NCBI NO: 28209486 NR Description: putative clp-like energy-dependent protease
  misc_feature (1)..(183): Homolog of NCBI NO: 16332068 NR Description: ATP-dependent Clp protease proteolytic subunit
  misc_feature (12)..(184): Homolog of NCBI NO: 1705929 NR Description: ATP-dependent Clp protease proteolytic subunit 1
  misc_feature (1)..(186): Homolog of NCBI NO: 17231175 NR Description: ATP-dependent Clp protease proteolytic subunit
  misc_feature (12)..(183): Homolog of NCBI NO: 33592842 NR Description: ATP-dependent Clp protease proteolytic subunit
MPSVMTPGGPLDLSSVLFRNRIIFIGQPINAQVAQRVISQLVTLASIDDKSDILMYLNCPGGSTYSVLTIYDCMSWIKPKVGTVAFGVAASQGAFFLAGGEKGMRYAMPNTRVMIHQPQTGCGGHVEDVRRQVNEAIEARQKIDRMYAAFTGQPLEKVQQYTERDRFLSASEAFEFGLIDGLLETEY

SEQ ID NO: 76479 - protein, 183 aa, Arabidopsis thaliana
  peptide (1)..(183): Ceres Seq. ID no. 7108137
  misc_feature (3)..(182): Pfam Name: Clp protease Pfam Description: Clp protease
  misc_feature (1)..(183): Homolog of NCBI NO: 2827888 NR Description: ATP-dependent Clp protease proteolytic subunit
  misc_feature (1)..(183): Homolog of NCBI NO: 18391311 NR Description: ATP-dependent Clp protease proteolytic subunit protein id: At1g11750.1, supported by cDNA: 33299., supported by gi_13194777, supported by cDNA: gi_2827887 [Arabidopsis thaliana]
  misc_feature (1)..(183): Homolog of NCBI NO: 2921510 NR Description: clp-like energy-dependent protease [Fritillaria
  misc_feature (1)..(183): Homolog of NCBI NO: 7435703 NR Description: endopeptidase Clp (EC 3.4.21.92) chain P
  misc_feature (1)..(160): Homolog of NCBI NO: 9968665 NR Description: putative ATP-dependent clp serine protease
  misc_feature (1)..(183): Homolog of NCBI NO: 28209486 NR Description: putative clp-like energy-dependent protease
  misc_feature (1)..(179): Homolog of NCBI NO: 16332068 NR Description: ATP-dependent Clp protease proteolytic subunit
  misc_feature (8)..(180): Homolog of NCBI NO: 1705929 NR Description: ATP-dependent Clp protease proteolytic subunit 1
  misc_feature (1)..(182): Homolog of NCBI NO: 17231175 NR Description: ATP-dependent Clp protease proteolytic subunit
  misc_feature (8)..(179): Homolog of NCBI NO: 33592842 NR Description: ATP-dependent Clp protease proteolytic subunit
MTPGGPLDLSSVLFRNRIIFIGQPINAQVAQRVISQLVTLASIDDKSDILMYLNCPGGSTYSVLTIYDCMSWIKPKVGTVAFGVAASQGAFFLAGGEKGMRYAMPNTRVMIHQPQTGCGGHVEDVRRQVNEAIEARQKIDRMYAAFTGQPLEKVQQYTERDRFLSASEAFEFGLIDGLLETEY

SEQ ID NO: 76480 - DNA, 1068 bp, Arabidopsis thaliana
  misc_feature (1)..(1068): Ceres Seq. ID no. 7108138
  misc_feature: MA Experiment ID: 20001905 Result: Down-regulated in Transcription
  misc_feature: MA Experiment 20001905 PARAMETER Experiment Name: At_Drought_Reproduction_P Parameter: Age (day) Value: 40
  misc_feature: MA Experiment 20001905 PARAMETER Experiment Name: At_Drought_Reproduction_P Parameter: Organism Value: A. thaliana
  misc_feature: MA Experiment 20001905 PARAMETER Experiment Name: At_Drought_Reproduction_P Parameter: Plant Line Value: WS
  misc_feature: MA Experiment 20001905 PARAMETER Experiment Name: At_Drought_Reproduction_P Parameter: Timepoint (day) Value: 10
  misc_feature: MA Experiment 20001905 PARAMETER Experiment Name: At_Drought_Reproduction_P Parameter: Tissue Value: Rosettes
  misc_feature: MA Experiment 20001905 PARAMETER Experiment Name: At_Drought_Reproduction_P Parameter: Treatment Value: Drought vs. No Drought
ccacgcgtccgtggttctctgagattagtcctatgtggccaggagaagcacattctctcaaggtagagaagattctattccaagggaaatcagattaccaggatgttattgttttccagtctgcaacatatggaaaggttttggttttggatggagtgattcaactcactgagagagatgaatgtgcgtatcaagaaatgatcactcatcttcctttgtgctctatctccaaccccaaaaaggtactggtgattggaggaggagatggaggagtcctgagggaagtggcacgtcatagttctgttgagcagattgacatttgtgaaatagataaaatggtggttgatgtggctaagcagtatttccctaatgtagcagttggatacgaggatcctcgtgtcaacctcatcattggcgatggtgttgctttcttgaagaacgctgctgaaggaacctatgatgcagttattgttgattcatctgatccaatcggtccagcaaaagagctatttgagaaacctttctttgagtcagtgaatagagctcttcgtcctggtggagttgtgtgcacacaagctgaaagcttgtggcttcacatggatatcattgaagacattgtttctaattgccgtgacatctttaaaggatctgttaactacgcttggaccagtgttccaacttacccgagtggagtcattggattcatgctttgttcatctgaaggaccacaagtcgatttcaagaagccagtgagtctaatcgatactgatgaaagctctatcaaatcacactgtcccttgaagtattacaacgctgagattcactcagctgctttctgcttgccctcttttgctaagaaggtgattgattcgaaagccaactagaaaagagaagagaaatcatttgctttagagaaacttcatgtggaagtgataatatgatgatacaatgatcctttggaaaaaaataaagaagttttaatttttagaatgtaatgttctttcacctgcaatgttatgtgactgcactgagctatcaatctctttttataagcattacacatatttc

SEQ ID NO: 76481 - protein, 293 aa, Arabidopsis thaliana
  peptide (1)..(293): Ceres Seq. ID no. 7108139
  misc_feature (4)..(248): Pfam Name: Spermine/spermidine synthase Pfam Description: Spermine/spermidine synthase
  misc_feature (1)..(293): Homolog of NCBI NO: 2821961 NR Description: spermidine synthase [Arabidopsis thaliana]
  misc_feature (4)..(293): Homolog of NCBI NO: 15223115 NR Description: spermidine synthase, putative; protein id: supported by cDNA: gi_14030636 [Arabidopsis thaliana] Spermidine synthase 2 (Putrescine aminopropyltransferase 2)
  misc_feature (4)..(293): Homolog of NCBI NO: 15220885 NR Description: putative spermidine synthase; protein id: supported by cDNA: gi_17065033, supported by cDNA: gi_20260023 thaliana] >gi|12230014|sp|Q9ZUB3|SPD1_ARATH Spermidine gb|F14442
  misc_feature (4)..(292): Homolog of NCBI NO: 6094330 NR Description: Spermidine synthase 2 (Putrescine
  misc_feature (4)..(291): Homolog of NCBI NO: 6094327 NR Description: Spermidine synthase 1 (Putrescine
  misc_feature (4)..(293): Homolog of NCBI NO: 12229998 NR Description: Spermidine synthase 1 (Putrescine
  misc_feature (4)..(293): Homolog of NCBI NO: 6094335 NR Description: Spermidine synthase (Putrescine (SPDSY) >gi|3242659|dbj|BAA29033.1| spermidine synthase [Coffea
  misc_feature (4)..(293): Homolog of NCBI NO: 12229958 NR Description: Spermidine synthase 1 (Putrescine
  misc_feature (4)..(291): Homolog of NCBI NO: 6094328 NR Description: Spermidine synthase 1 (Putrescine
  misc_feature (4)..(291): Homolog of NCBI NO: 15150055 NR Description: spermidine synthase [Solanum tuberosum]
TRPWFSEISPMWPGEAHSLKVEKILFQGKSDYQDVIVFQSATYGKVLVLDGVIQLTERDECAYQEMITHLPLCSISNPKKVLVIGGGDGGVLREVARHSSVEQIDICEIDKMVVDVAKQYFPNVAVGYEDPRVNLIIGDGVAFLKNAAEGTYDAVIVDSSDPIGPAKELFEKPFFESVNRALRPGGVVCTQAESLWLHMDIIEDIVSNCRDIFKGSVNYAWTSVPTYPSGVIGFMLCSSEGPQVDFKKPVSLIDTDESSIKSHCPLKYYNAEIHSAAFCLPSFAKKVIDSKAN

SEQ ID NO: 76482 - protein, 283 aa, Arabidopsis thaliana
  peptide (1)..(283): Ceres Seq. ID no. 7108140
  misc_feature (1)..(238): Pfam Name: Spermine/spermidine synthase Pfam Description: Spermine/spermidine synthase
  misc_feature (1)..(283): Homolog of NCBI NO: 2821961 NR Description: spermidine synthase [Arabidopsis thaliana]
  misc_feature (1)..(283): Homolog of NCBI NO: 15223115 NR Description: spermidine synthase, putative; protein id: supported by cDNA: gi_14030636 [Arabidopsis thaliana] Spermidine synthase 2 (Putrescine aminopropyltransferase 2)
  misc_feature (1)..(283): Homolog of NCBI NO: 15220885 NR Description: putative spermidine synthase; protein id: supported by cDNA: gi_17065033, supported by cDNA: gi_20260023 thaliana] >gi|12230014|sp|Q9ZUB3|SPD1_ARATH Spermidine gb|F14442
  misc_feature (1)..(282): Homolog of NCBI NO: 6094330 NR Description: Spermidine synthase 2 (Putrescine
  misc_feature (1)..(281): Homolog of NCBI NO: 6094327 NR Description: Spermidine synthase 1 (Putrescine
  misc_feature (1)..(283): Homolog of NCBI NO: 12229998 NR Description: Spermidine synthase 1 (Putrescine
  misc_feature (1)..(283): Homolog of NCBI NO: 6094335 NR Description: Spermidine synthase (Putrescine (SPDSY) >gi|3242659|dbj|BAA29033.1| spermidine synthase [Coffea
  misc_feature (1)..(283): Homolog of NCBI NO: 12229958 NR Description: Spermidine synthase 1 (Putrescine
  misc_feature (1)..(281): Homolog of NCBI NO: 6094328 NR Description: Spermidine synthase 1 (Putrescine
  misc_feature (1)..(281): Homolog of NCBI NO: 15150055 NR Description: spermidine synthase [Solanum tuberosum]
MWPGEAHSLKVEKILFQGKSDYQDVIVFQSATYGKVLVLDGVIQLTERDECAYQEMITHLPLCSISNPKKVLVIGGGDGGVLREVARHSSVEQIDICEIDKMVVDVAKQYFPNVAVGYEDPRVNLIIGDGVAFLKNAAEGTYDAVIVDSSDPIGPAKELFEKPFFESVNRALRPGGVVCTQAESLWLHMDIIEDIVSNCRDIFKGSVNYAWTSVPTYPSGVIGFMLCSSEGPQVDFKKPVSLIDTDESSIKSHCPLKYYNAEIHSAAFCLPSFAKKVIDSKAN

SEQ ID NO: 76483 - protein, 228 aa, Arabidopsis thaliana
  peptide (1)..(228): Ceres Seq. ID no. 7108141
  misc_feature (1)..(183): Pfam Name: Spermine/spermidine synthase Pfam Description: Spermine/spermidine synthase
  misc_feature (1)..(228): Homolog of NCBI NO: 2821961 NR Description: spermidine synthase [Arabidopsis thaliana]
  misc_feature (1)..(228): Homolog of NCBI NO: 15223115 NR Description: spermidine synthase, putative; protein id: supported by cDNA: gi_14030636 [Arabidopsis thaliana] Spermidine synthase 2 (Putrescine aminopropyltransferase 2)
  misc_feature (1)..(228): Homolog of NCBI NO: 15220885 NR Description: putative spermidine synthase; protein id: supported by cDNA: gi_17065033, supported by cDNA: gi_20260023 thaliana] >gi|12230014|sp|Q9ZUB3|SPD1_ARATH Spermidine gb|F14442
  misc_feature (1)..(227): Homolog of NCBI NO: 6094330 NR Description: Spermidine synthase 2 (Putrescine
  misc_feature (1)..(226): Homolog of NCBI NO: 6094327 NR Description: Spermidine synthase 1 (Putrescine
  misc_feature (1)..(228): Homolog of NCBI NO: 12229998 NR Description: Spermidine synthase 1 (Putrescine
  misc_feature (1)..(228): Homolog of NCBI NO: 6094335 NR Description: Spermidine synthase (Putrescine (SPDSY) >gi|3242659|dbj|BAA29033.1| spermidine synthase [Coffea
  misc_feature (1)..(228): Homolog of NCBI NO: 12229958 NR Description: Spermidine synthase 1 (Putrescine
  misc_feature (1)..(226): Homolog of NCBI NO: 6094328 NR Description: Spermidine synthase 1 (Putrescine
  misc_feature (1)..(226): Homolog of NCBI NO: 15150055 NR Description: spermidine synthase [Solanum tuberosum]
MITHLPLCSISNPKKVLVIGGGDGGVLREVARHSSVEQIDICEIDKMVVDVAKQYFPNVAVGYEDPRVNLIIGDGVAFLKNAAEGTYDAVIVDSSDPIGPAKELFEKPFFESVNRALRPGGVVCTQAESLWLHMDIIEDIVSNCRDIFKGSVNYAWTSVPTYPSGVIGFMLCSSEGPQVDFKKPVSLIDTDESSIKSHCPLKYYNAEIHSAAFCLPSFAKKVIDSKAN

SEQ ID NO: 76484 - DNA, 1691 bp, Arabidopsis thaliana
  misc_feature (1)..(1691): Ceres Seq. ID no. 7108142
  misc_feature: MA Experiment ID: 20000169 Result: Up-regulated in Transcription
  misc_feature: MA Experiment 20000169 PARAMETER Experiment Name: At_100uM_ABA_P Parameter: Age (day) Value: 14
  misc_feature: MA Experiment 20000169 PARAMETER Experiment Name: At_100uM_ABA_P Parameter: Organism Value: A. thaliana
  misc_feature: MA Experiment 20000169 PARAMETER Experiment Name: At_100uM_ABA_P Parameter: Plant Line Value: WS
  misc_feature: MA Experiment 20000169 PARAMETER Experiment Name: At_100uM_ABA_P Parameter: Timepoint (hr) Value: 6
  misc_feature: MA Experiment 20000169 PARAMETER Experiment Name: At_100uM_ABA_P Parameter: Tissue Value: Aerial
  misc_feature: MA Experiment 20000169 PARAMETER Experiment Name: At_100uM_ABA_P Parameter: Treatment Value: 100uM ABA vs. No Treatment
  misc_feature: MA Experiment ID: 20000171 Result: Down-regulated in Transcription
  misc_feature: MA Experiment 20000171 PARAMETER Experiment Name: At_42deg_Heat_P Parameter: Age (day) Value: 14
  misc_feature: MA Experiment 20000171 PARAMETER Experiment Name: At_42deg_Heat_P Parameter: Organism Value: A. thaliana
  misc_feature: MA Experiment 20000171 PARAMETER Experiment Name: At_42deg_Heat_P Parameter: Plant Line Value: WS
  misc_feature: MA Experiment 20000171 PARAMETER Experiment Name: At_42deg_Heat_P Parameter: Temperature (deg C) Value: 42 vs. 22
  misc_feature: MA Experiment 20000171 PARAMETER Experiment Name: At_42deg_Heat_P Parameter: Timepoint (hr) Value: 1
  misc_feature: MA Experiment 20000171 PARAMETER Experiment Name: At_42deg_Heat_P Parameter: Tissue Value: Aerial
  misc_feature: MA Experiment ID: 20000173 Result: Down-regulated in Transcription
  misc_feature: MA Experiment 20000173 PARAMETER Experiment Name: At_42deg_Heat_P Parameter: Age (day) Value: 14
  misc_feature: MA Experiment 20000173 PARAMETER Experiment Name: At_42deg_Heat_P Parameter: Organism Value: A. thaliana
  misc_feature: MA Experiment 20000173 PARAMETER Experiment Name: At_42deg_Heat_P Parameter: Plant Line Value: WS
  misc_feature: MA Experiment 20000173 PARAMETER Experiment Name: At_42deg_Heat_P Parameter: Temperature (deg C) Value: 42 vs. 22
  misc_feature: MA Experiment 20000173 PARAMETER Experiment Name: At_42deg_Heat_P Parameter: Timepoint (hr) Value: 6
  misc_feature: MA Experiment 20000173 PARAMETER Experiment Name: At_42deg_Heat_P Parameter: Tissue Value: Aerial
  misc_feature: MA Experiment ID: 20000227 Result: Down-regulated in Transcription
  misc_feature: MA Experiment 20000227 PARAMETER Experiment Name: At_Root-Tips-vs-Tops_P Parameter: Tissue Value: Root Tips vs. Root Tops
  misc_feature: MA Experiment ID: 20000264 Result: Up-regulated in Transcription
  misc_feature: MA Experiment 20000264 PARAMETER Experiment Name: At_Open_Flower_P Parameter: Age (day) Value: 21
  misc_feature: MA Experiment 20000264 PARAMETER Experiment Name: At_Open_Flower_P Parameter: Plant Line Value: WS
  misc_feature: MA Experiment 20000264 PARAMETER Experiment Name: At_Open_Flower_P Parameter: Tissue Value: Open Flower vs. Whole Plant
  misc_feature: MA Experiment ID: 20000265 Result: Up-regulated in Transcription
  misc_feature: MA Experiment 20000265 PARAMETER Experiment Name: At_Open_Flower_P Parameter: Age (day) Value: 21
  misc_feature: MA Experiment 20000265 PARAMETER Experiment Name: At_Open_Flower_P Parameter: Plant Line Value: WS
  misc_feature: MA Experiment 20000265 PARAMETER Experiment Name: At_Open_Flower_P Parameter: Tissue Value: Closed Flower vs. Whole Plant
  misc_feature: MA Experiment ID: 20000267 Result: Up-regulated in Transcription
  misc_feature: MA Experiment 20000267 PARAMETER Experiment Name: At_Drought_P Parameter: Age (day) Value: 7
  misc_feature: MA Experiment 20000267 PARAMETER Experiment Name: At_Drought_P Parameter: Organism Value: A. thaliana
  misc_feature: MA Experiment 20000267 PARAMETER Experiment Name: At_Drought_P Parameter: Plant Line Value: WS
  misc_feature: MA Experiment 20000267 PARAMETER Experiment Name: At_Drought_P Parameter: Timepoint (hr) Value: 6
  misc_feature: MA Experiment 20000267 PARAMETER Experiment Name: At_Drought_P Parameter: Tissue Value: Whole Plant
  misc_feature: MA Experiment 20000267 PARAMETER Experiment Name: At_Drought_P Parameter: Treatment Value: Drought vs. No Drought
  misc_feature: MA Experiment ID: 20000286 Result: Up-regulated in Transcription
  misc_feature: MA Experiment 20000286 PARAMETER Experiment Name: At_Open_Flower_P Parameter: Age (day) Value: 21
  misc_feature: MA Experiment 20000286 PARAMETER Experiment Name: At_Open_Flower_P Parameter: Plant Line Value: WS
  misc_feature: MA Experiment 20000286 PARAMETER Experiment Name: At_Open_Flower_P Parameter: Tissue Value: Half Open vs. Whole Plant
  misc_feature: MA Experiment ID: 20000308 Result: Up-regulated in Transcription
  misc_feature: MA Experiment 20000308 PARAMETER Experiment Name: At_100mM_NaCl__P Parameter: Age (day) Value: 17
  misc_feature: MA Experiment 20000308 PARAMETER Experiment Name: At_100mM_NaCl__P Parameter: Organism Value: A. thaliana
  misc_feature: MA Experiment 20000308 PARAMETER Experiment Name: At_100mM_NaCl__P Parameter: Plant Line Value: WS
  misc_feature: MA Experiment 20000308 PARAMETER Experiment Name: At_100mM_NaCl__P Parameter: Timepoint (hr) Value: 72
  misc_feature: MA Experiment 20000308 PARAMETER Experiment Name: At_100mM_NaCl__P Parameter: Tissue Value: Whole Plant
  misc_feature: MA Experiment 20000308 PARAMETER Experiment Name: At_100mM_NaCl__P Parameter: Treatment Value: 100mM NaCl vs. No Treatment
  misc_feature: MA Experiment ID: 20000437 Result: Up-regulated in Transcription
  misc_feature: MA Experiment 20000437 PARAMETER Experiment Name: At_Drought_P Parameter: Age (day) Value: 8
  misc_feature: MA Experiment 20000437 PARAMETER Experiment Name: At_Drought_P Parameter: Organism Value: A. thaliana
  misc_feature: MA Experiment 20000437 PARAMETER Experiment Name: At_Drought_P Parameter: Plant Line Value: WS
  misc_feature: MA Experiment 20000437 PARAMETER Experiment Name: At_Drought_P Parameter: Timepoint (hr) Value: 24
  misc_feature: MA Experiment 20000437 PARAMETER Experiment Name: At_Drought_P Parameter: Tissue Value: Whole Plant
  misc_feature: MA Experiment 20000437 PARAMETER Experiment Name: At_Drought_P Parameter: Treatment Value: Drought vs. No Drought
  misc_feature: MA Experiment ID: 20000438 Result: Up-regulated in Transcription
  misc_feature: MA Experiment 20000438 PARAMETER Experiment Name: At_Shoots__P Parameter: Age (day) Value: 14
  misc_feature: MA Experiment 20000438 PARAMETER Experiment Name: At_Shoots__P Parameter: Tissue Value: Shoots vs. Whole Plant
  misc_feature: MA Experiment ID: 20000439 Result: Up-regulated in Transcription
  misc_feature: MA Experiment 20000439 PARAMETER Experiment Name: At_Roots__P Parameter: Age (day) Value: 14 vs. 21
  misc_feature: MA Experiment 20000439 PARAMETER Experiment Name: At_Roots__P Parameter: Organism Value: A. thaliana
  misc_feature: MA Experiment 20000439 PARAMETER Experiment Name: At_Roots__P Parameter: Tissue Value: Roots vs. Whole Plant
  misc_feature: MA Experiment ID: 20000445 Result: Up-regulated in Transcription
  misc_feature: MA Experiment 20000445 PARAMETER Experiment Name: At_100uM_NAA__P Parameter: Age (day) Value: 14
  misc_feature: MA Experiment 20000445 PARAMETER Experiment Name: At_100uM_NAA__P Parameter: Organism Value: A. thaliana
  misc_feature: MA Experiment 20000445 PARAMETER Experiment Name: At_100uM_NAA__P Parameter: Plant Line Value: WS
  misc_feature: MA Experiment 20000445 PARAMETER Experiment Name: At_100uM_NAA__P Parameter: Timepoint (hr) Value: 6
  misc_feature: MA Experiment 20000445 PARAMETER Experiment Name: At_100uM_NAA__P Parameter: Tissue Value: Aerial
  misc_feature: MA Experiment 20000445 PARAMETER Experiment Name: At_100uM_NAA__P Parameter: Treatment Value: 100uM NAA vs. No Treatment
  misc_feature: MA Experiment ID: 20000452 Result: Up-regulated in Transcription
  misc_feature: MA Experiment 20000452 PARAMETER Experiment Name: At_CS6879_Shoots-Roots_P Parameter: Age (day) Value: 14
  misc_feature: MA Experiment 20000452 PARAMETER Experiment Name: At_CS6879_Shoots-Roots_P Parameter: Organism Value: A. thaliana
  misc_feature: MA Experiment 20000452 PARAMETER Experiment Name: At_CS6879_Shoots-Roots_P Parameter: Plant Line Value: CS6879 vs. WS
  misc_feature: MA Experiment 20000452 PARAMETER Experiment Name: At_CS6879_Shoots-Roots_P Parameter: Tissue Value: Shoots
  misc_feature: MA Experiment ID: 20000453 Result: Up-regulated in Transcription
  misc_feature: MA Experiment 20000453 PARAMETER Experiment Name: At_100uM_ABA_P Parameter: Age (day) Value: 15
  misc_feature: MA Experiment 20000453 PARAMETER Experiment Name: At_100uM_ABA_P Parameter: Organism Value: A. thaliana
  misc_feature: MA Experiment 20000453 PARAMETER Experiment Name: At_100uM_ABA_P Parameter: Plant Line Value: WS
  misc_feature: MA Experiment 20000453 PARAMETER Experiment Name: At_100uM_ABA_P Parameter: Timepoint (hr) Value: 24
  misc_feature: MA Experiment 20000453 PARAMETER Experiment Name: At_100uM_ABA_P Parameter: Tissue Value: Aerial
  misc_feature: MA Experiment 20000453 PARAMETER Experiment Name: At_100uM_ABA_P Parameter: Treatment Value: 100uM ABA vs. No Treatment
  misc_feature: MA Experiment ID: 20000455 Result: Up-regulated in Transcription
  misc_feature: MA Experiment 20000455 PARAMETER Experiment Name: At_100uM_ABA_P Parameter: Age (day) Value: 16
  misc_feature: MA Experiment 20000455 PARAMETER Experiment Name: At_100uM_ABA_P Parameter: Organism Value: A. thaliana
  misc_feature: MA Experiment 20000455 PARAMETER Experiment Name: At_100uM_ABA_P Parameter: Plant Line Value: WS
  misc_feature: MA Experiment 20000455 PARAMETER Experiment Name: At_100uM_ABA_P Parameter: Timepoint (hr) Value: 48
  misc_feature: MA Experiment 20000455 PARAMETER Experiment Name: At_100uM_ABA_P Parameter: Tissue Value: Aerial
  misc_feature: MA Experiment 20000455 PARAMETER Experiment Name: At_100uM_ABA_P Parameter: Treatment Value: 100uM ABA vs. No Treatment
  misc_feature: MA Experiment ID: 20000495 Result: Down-regulated in Transcription
  misc_feature: MA Experiment 20000495 PARAMETER Experiment Name: At_Guard_Cells_P Parameter: Harvest Date Value: 8/2/2002
  misc_feature: MA Experiment 20000495 PARAMETER Experiment Name: At_Guard_Cells_P Parameter: Organism Value: A. thaliana
  misc_feature: MA Experiment 20000495 PARAMETER Experiment Name: At_Guard_Cells_P Parameter: Tissue Value: Guard Cells vs. Leaves
  misc_feature: MA Experiment ID: 20000506 Result: Up-regulated in Transcription
  misc_feature: MA Experiment 20000506 PARAMETER Experiment Name: At_Wounding_P Parameter: Organism Value: A. thaliana
  misc_feature: MA Experiment 20000506 PARAMETER Experiment Name: At_Wounding_P Parameter: Plant Line Value: WS
  misc_feature: MA Experiment 20000506 PARAMETER Experiment Name: At_Wounding_P Parameter: Timepoint (hr) Value: 6
  misc_feature: MA Experiment 20000506 PARAMETER Experiment Name: At_Wounding_P Parameter: Tissue Value: Aerial
  misc_feature: MA Experiment 20000506 PARAMETER Experiment Name: At_Wounding_P Parameter: Treatment Value: Wounding vs. No Wounding
  misc_feature: MA Experiment ID: 20000573 Result: Down-regulated in Transcription
  misc_feature: MA Experiment 20000573 PARAMETER Experiment Name: At_100uM_ABA_Mutants__P Parameter: Organism Value: A. thaliana
  misc_feature: MA Experiment 20000573 PARAMETER Experiment Name: At_100uM_ABA_Mutants__P Parameter: Plant Line Value: CS22 vs. Ler wt
  misc_feature: MA Experiment 20000573 PARAMETER Experiment Name: At_100uM_ABA_Mutants__P Parameter: Timepoint (hr) Value: N/A
  misc_feature: MA Experiment 20000573 PARAMETER Experiment Name: At_100uM_ABA_Mutants__P Parameter: Tissue Value: Whole Plant
  misc_feature: MA Experiment 20000573 PARAMETER Experiment Name: At_100uM_ABA_Mutants__P Parameter: Treatment Value: None
  misc_feature: MA Experiment ID: 20000574 Result: Down-regulated in Transcription
  misc_feature: MA Experiment 20000574 PARAMETER Experiment Name: At_100uM_ABA_Mutants__P Parameter: Organism Value: A. thaliana
  misc_feature: MA Experiment 20000574 PARAMETER Experiment Name: At_100uM_ABA_Mutants__P Parameter: Plant Line Value: CS23 vs. Ler wt
  misc_feature: MA Experiment 20000574 PARAMETER Experiment Name: At_100uM_ABA_Mutants__P Parameter: Timepoint (hr) Value: N/A
  misc_feature: MA Experiment 20000574 PARAMETER Experiment Name: At_100uM_ABA_Mutants__P Parameter: Tissue Value: Whole Plant
  misc_feature: MA Experiment 20000574 PARAMETER Experiment Name: At_100uM_ABA_Mutants__P Parameter: Treatment Value: None
  misc_feature: MA Experiment ID: 20000575 Result: Up-regulated in Transcription
  misc_feature: MA Experiment 20000575 PARAMETER Experiment Name: At_100uM_ABA_Mutants__P Parameter: Organism Value: A. thaliana
  misc_feature: MA Experiment 20000575 PARAMETER Experiment Name: At_100uM_ABA_Mutants__P Parameter: Plant Line Value: CS22
  misc_feature: MA Experiment 20000575 PARAMETER Experiment Name: At_100uM_ABA_Mutants__P Parameter: Timepoint (hr) Value: 6
  misc_feature: MA Experiment 20000575 PARAMETER Experiment Name: At_100uM_ABA_Mutants__P Parameter: Tissue Value: Whole Plant
  misc_feature: MA Experiment 20000575 PARAMETER Experiment Name: At_100uM_ABA_Mutants__P Parameter: Treatment Value: 1uM ABA vs. No Treatment
  misc_feature: MA Experiment ID: 20000794 Result: Up-regulated in Transcription
  misc_feature: MA Experiment 20000794 PARAMETER Experiment Name: At_Petals_P Parameter: Age (day) Value: 23-25 days
  misc_feature: MA Experiment 20000794 PARAMETER Experiment Name: At_Petals_P Parameter: Plant Line Value: WS
  misc_feature: MA Experiment 20000794 PARAMETER Experiment Name: At_Petals_P Parameter: Tissue Value: Petals vs. Whole plant
  misc_feature: MA Experiment ID: 20001247 Result: Up-regulated in Transcription
  misc_feature: MA Experiment 20001247 PARAMETER Experiment Name: At_Far-red-induction_P Parameter: Age (day) Value: 7
  misc_feature: MA Experiment 20001247 PARAMETER Experiment Name: At_Far-red-induction_P Parameter: Light Value: Far-red vs. White
  misc_feature: MA Experiment 20001247 PARAMETER Experiment Name: At_Far-red-induction_P Parameter: Organism Value: A. thaliana
  misc_feature: MA Experiment 20001247 PARAMETER Experiment Name: At_Far-red-induction_P Parameter: Plant Line Value: Columbia
  misc_feature: MA Experiment 20001247 PARAMETER Experiment Name: At_Far-red-induction_P Parameter: Timepoint (hr) Value: 1
  misc_feature: MA Experiment 20001247 PARAMETER Experiment Name: At_Far-red-induction_P Parameter: Tissue Value: Whole Plant
  misc_feature: MA Experiment ID: 20001248 Result: Up-regulated in Transcription
  misc_feature: MA Experiment 20001248 PARAMETER Experiment Name: At_Far-red-induction_P Parameter: Age (day) Value: 7
  misc_feature: MA Experiment 20001248 PARAMETER Experiment Name: At_Far-red-induction_P Parameter: Light Value: Far-red vs. White
  misc_feature: MA Experiment 20001248 PARAMETER Experiment Name: At_Far-red-induction_P Parameter: Organism Value: A. thaliana
  misc_feature: MA Experiment 20001248 PARAMETER Experiment Name: At_Far-red-induction_P Parameter: Plant Line Value: Columbia
  misc_feature: MA Experiment 20001248 PARAMETER Experiment Name: At_Far-red-induction_P Parameter: Timepoint (hr) Value: 4
  misc_feature: MA Experiment 20001248 PARAMETER Experiment Name: At_Far-red-induction_P Parameter: Tissue Value: Whole Plant
  misc_feature: MA Experiment ID: 20001450 Result: Up-regulated in Transcription
  misc_feature: MA Experiment 20001450 PARAMETER Experiment Name: At_Far-red-induction_P Parameter: Age (day) Value: 7
  misc_feature: MA Experiment 20001450 PARAMETER Experiment Name: At_Far-red-induction_P Parameter: Light Value: Far-red vs. White
  misc_feature: MA Experiment 20001450 PARAMETER Experiment Name: At_Far-red-induction_P Parameter: Organism Value: A. thaliana
  misc_feature: MA Experiment 20001450 PARAMETER Experiment Name: At_Far-red-induction_P Parameter: Plant Line Value: Columbia
  misc_feature: MA Experiment 20001450 PARAMETER Experiment Name: At_Far-red-induction_P Parameter: Timepoint (hr) Value: 8
  misc_feature: MA Experiment 20001450 PARAMETER Experiment Name: At_Far-red-induction_P Parameter: Tissue Value: Whole Plant
  misc_feature: MA Experiment ID: 20001451 Result: Down-regulated in Transcription
  misc_feature: MA Experiment 20001451 PARAMETER Experiment Name: At_Far-red-induction_P Parameter: Age (day) Value: 7
  misc_feature: MA Experiment 20001451 PARAMETER Experiment Name: At_Far-red-induction_P Parameter: Light Value: Far-red vs. White
  misc_feature: MA Experiment 20001451 PARAMETER Experiment Name: At_Far-red-induction_P Parameter: Organism Value: A. thaliana
  misc_feature: MA Experiment 20001451 PARAMETER Experiment Name: At_Far-red-induction_P Parameter: Plant Line Value: Columbia
  misc_feature: MA Experiment 20001451 PARAMETER Experiment Name: At_Far-red-induction_P Parameter: Timepoint (hr) Value: 24
  misc_feature: MA Experiment 20001451 PARAMETER Experiment Name: At_Far-red-induction_P Parameter: Tissue Value: Whole Plant
  misc_feature: MA Experiment ID: 20001555 Result: Up-regulated in Transcription
  misc_feature: MA Experiment 20001555 PARAMETER Experiment Name: At_Drought_Soil_Dry_P Parameter: Age (day) Value: 24
  misc_feature: MA Experiment 20001555 PARAMETER Experiment Name: At_Drought_Soil_Dry_P Parameter: Organism Value: A. thaliana
  misc_feature: MA Experiment 20001555 PARAMETER Experiment Name: At_Drought_Soil_Dry_P Parameter: Plant Line Value: WS
  misc_feature: MA Experiment 20001555 PARAMETER Experiment Name: At_Drought_Soil_Dry_P Parameter: Post Timepoint (hr) Value: None
  misc_feature: MA Experiment 20001555 PARAMETER Experiment Name: At_Drought_Soil_Dry_P Parameter: Post-Treatment Value: None
  misc_feature: MA Experiment 20001555 PARAMETER Experiment Name: At_Drought_Soil_Dry_P Parameter: Timepoint (day) Value: 10
  misc_feature: MA Experiment 20001555 PARAMETER Experiment Name: At_Drought_Soil_Dry_P Parameter: Treatment Value: Drought vs. No Drought
  misc_feature: MA Experiment ID: 20001556 Result: Up-regulated in Transcription
  misc_feature: MA Experiment 20001556 PARAMETER Experiment Name: At_Drought_Soil_Dry_P Parameter: Age (day) Value: 26
  misc_feature: MA Experiment 20001556 PARAMETER Experiment Name: At_Drought_Soil_Dry_P Parameter: Organism Value: A. thaliana
  misc_feature: MA Experiment 20001556 PARAMETER Experiment Name: At_Drought_Soil_Dry_P Parameter: Plant Line Value: WS
  misc_feature: MA Experiment 20001556 PARAMETER Experiment Name: At_Drought_Soil_Dry_P Parameter: Post Timepoint (hr) Value: None
  misc_feature: MA Experiment 20001556 PARAMETER Experiment Name: At_Drought_Soil_Dry_P Parameter: Post-Treatment Value: None
  misc_feature: MA Experiment 20001556 PARAMETER Experiment Name: At_Drought_Soil_Dry_P Parameter: Timepoint (day) Value: 12
  misc_feature: MA Experiment 20001556 PARAMETER Experiment Name: At_Drought_Soil_Dry_P Parameter: Treatment Value: Drought vs. No Drought
  misc_feature: MA Experiment ID: 20001557 Result: Up-regulated in Transcription
  misc_feature: MA Experiment 20001557 PARAMETER Experiment Name: At_Drought_Soil_Dry_P Parameter: Age (day) Value: 27
  misc_feature: MA Experiment 20001557 PARAMETER Experiment Name: At_Drought_Soil_Dry_P Parameter: Organism Value: A. thaliana
  misc_feature: MA Experiment 20001557 PARAMETER Experiment Name: At_Drought_Soil_Dry_P Parameter: Plant Line Value: WS
  misc_feature: MA Experiment 20001557 PARAMETER Experiment Name: At_Drought_Soil_Dry_P Parameter: Post Timepoint (hr) Value: 3
  misc_feature: MA Experiment 20001557 PARAMETER Experiment Name: At_Drought_Soil_Dry_P Parameter: Post-Treatment Value: Re-Water vs. No Drought
  misc_feature: MA Experiment 20001557 PARAMETER Experiment Name: At_Drought_Soil_Dry_P Parameter: Timepoint (day) Value: 13
  misc_feature: MA Experiment 20001557 PARAMETER Experiment Name: At_Drought_Soil_Dry_P Parameter: Treatment Value: Drought vs. No Drought
  misc_feature: MA Experiment ID: 20001558 Result: Up-regulated in Transcription
  misc_feature: MA Experiment 20001558 PARAMETER Experiment Name: At_Drought_Soil_Dry_P Parameter: Age (day) Value: 27
  misc_feature: MA Experiment 20001558 PARAMETER Experiment Name: At_Drought_Soil_Dry_P Parameter: Organism Value: A. thaliana
  misc_feature: MA Experiment 20001558 PARAMETER Experiment Name: At_Drought_Soil_Dry_P Parameter: Plant Line Value: WS
  misc_feature: MA Experiment 20001558 PARAMETER Experiment Name: At_Drought_Soil_Dry_P Parameter: Post Timepoint (hr) Value: 6
  misc_feature: MA Experiment 20001558 PARAMETER Experiment Name: At_Drought_Soil_Dry_P Parameter: Post-Treatment Value: Re-Water vs. No Drought
  misc_feature: MA Experiment 20001558 PARAMETER Experiment Name: At_Drought_Soil_Dry_P Parameter: Timepoint (day) Value: 13
  misc_feature: MA Experiment 20001558 PARAMETER Experiment Name: At_Drought_Soil_Dry_P Parameter: Treatment Value: Drought vs. No Drought
  misc_feature: MA Experiment ID: 20001769 Result: Up-regulated in Transcription
  misc_feature: MA Experiment 20001769 PARAMETER Experiment Name: At_Far-red-enriched-adult_P Parameter: Age (day) Value: 28
  misc_feature: MA Experiment 20001769 PARAMETER Experiment Name: At_Far-red-enriched-adult_P Parameter: Light Value: Far-red enriched vs. White
  misc_feature: MA Experiment 20001769 PARAMETER Experiment Name: At_Far-red-enriched-adult_P Parameter: Organism Value: A. thaliana
  misc_feature: MA Experiment 20001769 PARAMETER Experiment Name: At_Far-red-enriched-adult_P Parameter: Plant Line Value: Columbia
  misc_feature: MA Experiment 20001769 PARAMETER Experiment Name: At_Far-red-enriched-adult_P Parameter: Timepoint (hr) Value: 4
  misc_feature: MA Experiment 20001769 PARAMETER Experiment Name: At_Far-red-enriched-adult_P Parameter: Tissue Value: Aerial
  misc_feature: MA Experiment ID: 20001770 Result: Up-regulated in Transcription
  misc_feature: MA Experiment 20001770 PARAMETER Experiment Name: At_Far-red-enriched-adult_P Parameter: Age (day) Value: 28
  misc_feature: MA Experiment 20001770 PARAMETER Experiment Name: At_Far-red-enriched-adult_P Parameter: Light Value: Far-red enriched vs. White
  misc_feature: MA Experiment 20001770 PARAMETER Experiment Name: At_Far-red-enriched-adult_P Parameter: Organism Value: A. thaliana
  misc_feature: MA Experiment 20001770 PARAMETER Experiment Name: At_Far-red-enriched-adult_P Parameter: Plant Line Value: Columbia
  misc_feature: MA Experiment 20001770 PARAMETER Experiment Name: At_Far-red-enriched-adult_P Parameter: Timepoint (hr) Value: 8
  misc_feature: MA Experiment 20001770 PARAMETER Experiment Name: At_Far-red-enriched-adult_P Parameter: Tissue Value: Aerial
  misc_feature: MA Experiment ID: 20001904 Result: Up-regulated in Transcription
  misc_feature: MA Experiment 20001904 PARAMETER Experiment Name: At_Drought_Reproduction_P Parameter: Age (day) Value: 37
  misc_feature: MA Experiment 20001904 PARAMETER Experiment Name: At_Drought_Reproduction_P Parameter: Organism Value: A. thaliana
  misc_feature: MA Experiment 20001904 PARAMETER Experiment Name: At_Drought_Reproduction_P Parameter: Plant Line Value: WS
  misc_feature: MA Experiment 20001904 PARAMETER Experiment Name: At_Drought_Reproduction_P Parameter: Timepoint (day) Value: 7
  misc_feature: MA Experiment 20001904 PARAMETER Experiment Name: At_Drought_Reproduction_P Parameter: Tissue Value: Rosettes
  misc_feature: MA Experiment 20001904 PARAMETER Experiment Name: At_Drought_Reproduction_P Parameter: Treatment Value: Drought vs. No Drought
  misc_feature: MA Experiment ID: 20001905 Result: Up-regulated in Transcription
  misc_feature: MA Experiment 20001905 PARAMETER Experiment Name: At_Drought_Reproduction_P Parameter: Age (day) Value: 40
  misc_feature: MA Experiment 20001905 PARAMETER Experiment Name: At_Drought_Reproduction_P Parameter: Organism Value: A. thaliana
  misc_feature: MA Experiment 20001905 PARAMETER Experiment Name: At_Drought_Reproduction_P Parameter: Plant Line Value: WS
  misc_feature: MA Experiment 20001905 PARAMETER Experiment Name: At_Drought_Reproduction_P Parameter: Timepoint (day) Value: 10
  misc_feature: MA Experiment 20001905 PARAMETER Experiment Name: At_Drought_Reproduction_P Parameter: Tissue Value: Rosettes
  misc_feature: MA Experiment 20001905 PARAMETER Experiment Name: At_Drought_Reproduction_P Parameter: Treatment Value: Drought vs. No Drought
  misc_feature: MA Experiment ID: 20001906 Result: Up-regulated in Transcription
  misc_feature: MA Experiment 20001906 PARAMETER Experiment Name: At_Drought_Reproduction_P Parameter: Age (day) Value: 35
  misc_feature: MA Experiment 20001906 PARAMETER Experiment Name: At_Drought_Reproduction_P Parameter: Organism Value: A. thaliana
  misc_feature: MA Experiment 20001906 PARAMETER Experiment Name: At_Drought_Reproduction_P Parameter: Plant Line Value: WS
  misc_feature: MA Experiment 20001906 PARAMETER Experiment Name: At_Drought_Reproduction_P Parameter: Timepoint (day) Value: 5
  misc_feature: MA Experiment 20001906 PARAMETER Experiment Name: At_Drought_Reproduction_P Parameter: Tissue Value: Siliques
  misc_feature: MA Experiment 20001906 PARAMETER Experiment Name: At_Drought_Reproduction_P Parameter: Treatment Value: Drought vs. No Drought
  misc_feature: MA Experiment ID: 20001908 Result: Up-regulated in Transcription
  misc_feature: MA Experiment 20001908 PARAMETER Experiment Name: At_Drought_Reproduction_P Parameter: Age (day) Value: 40
  misc_feature: MA Experiment 20001908 PARAMETER Experiment Name: At_Drought_Reproduction_P Parameter: Organism Value: A. thaliana
  misc_feature: MA Experiment 20001908 PARAMETER Experiment Name: At_Drought_Reproduction_P Parameter: Plant Line Value: WS
  misc_feature: MA Experiment 20001908 PARAMETER Experiment Name: At_Drought_Reproduction_P Parameter: Timepoint (day) Value: 10
  misc_feature: MA Experiment 20001908 PARAMETER Experiment Name: At_Drought_Reproduction_P Parameter: Tissue Value: Siliques
  misc_feature: MA Experiment 20001908 PARAMETER Experiment Name: At_Drought_Reproduction_P Parameter: Treatment Value: Drought vs. No Drought
  misc_feature: MA Experiment ID: 20001911 Result: Down-regulated in Transcription
  misc_feature: MA Experiment 20001911 PARAMETER Experiment Name: At_Drought_Reproduction_P Parameter: Age (day) Value: 40
  misc_feature: MA Experiment 20001911 PARAMETER Experiment Name: At_Drought_Reproduction_P Parameter: Organism Value: A. thaliana
  misc_feature: MA Experiment 20001911 PARAMETER Experiment Name: At_Drought_Reproduction_P Parameter: Plant Line Value: WS
  misc_feature: MA Experiment 20001911 PARAMETER Experiment Name: At_Drought_Reproduction_P Parameter: Timepoint (day) Value: 10
  misc_feature: MA Experiment 20001911 PARAMETER Experiment Name: At_Drought_Reproduction_P Parameter: Tissue Value: Flowers
  misc_feature: MA Experiment 20001911 PARAMETER Experiment Name: At_Drought_Reproduction_P Parameter: Treatment Value: Drought vs. No Drought
ccacgcgtccgttttatccaaaaaaaaaaaaaagtcttgtgtttctcttaggttggttgagaatcatttcatttcaatggaatccaattgtgttcaatttctcggtaacaagaccattctcatcacaggagctcctggttttcttgccaaggttttggtagagaaaatactaaggttgcaaccaaatgtgaagaagatataccttctgttgagagctcccgacgaaaaatcagccatgcaacgcctacgtagtgaggttatggagatcgacctttttaaagtgttgaggaacaatctaggagaagacaatttgaatgccttgatgcgggaaaaaattgtgccggttccaggtgatatatcgatcgataatttgggattgaaagacactgatctcatacaacgtatgtggagtgagattgatatcataatcaacatagcagccacaacaaatttcgatgaaagatatgatattggtcttggcatcaacacatttggagccctgaatgttctcaacttcgccaaaaagtgtgttaaaggacaattgcttctccatgtctcaaccgcgtatataagcggtgaacaacctggattgttactagagaaaccattcaagatgggggagactctcagcggggatcgggaactagacatcaatatagaacatgatctaatgaaacaaaaattgaaagagcttcaagattgttctgatgaagagatctcgcaaacaatgaaagattttggaatggcaagggcaaagcttcatggatggccaaatacatatgtattcaccaaagcaatgggagagatgctaatgggaaaatacagagaaaatttgccacttgttatcatacgtccaacaatgattactagtactattgccgaaccattccccggttggattgaagggttgaaaacattagacagtgtgattgttgcatatggtaaaggaaggcttaaatgttttcttgcggattcaaactcagtctttgaccttataccggcagacatggtagtaaatgcgatggttgcagccgcgacagctcattcgggagacaccgggattcaggcaatatatcatgttggttcgtcttgtaagaatccagtcacgtttggacaacttcacgatttcacggctcgttacttcgctaaacgtcctttgattggtcggaatggctcgccaatcatagtggtcaaaggaaccattctgtccactatggctcaattcagcctctacatgacccttcgttacaagcttcctctacagatacttcgattgatcaatatagtttatccatggagtcacggagataactacagtgacctaagccgcaaaatcaagctagctatgcgactagttgagctttaccagccttacttactcttcaagggcatatttgatgatttaaataccgaaagactgcgaatgaaaagaaaggagaatatcaaagagttagatggatcgttcgagttcgatcccaagtccattgattgggacaattatatcacaaacacccacattcctggcctcatcacccatgtgcttaaacaataaattatgctggtaatatgtttggaactattgtgaatctcgtgtgtaatattattaaagaatacgattatatcattctaatcttgtaatttacagtttgtgttggcgtgtaatatcaaaataaataaaaaaaacttattcc

SEQ ID NO: 76485 - protein, 516 aa, Arabidopsis thaliana
  peptide (1)..(516): Ceres Seq. ID no. 7108143
  misc_feature (310)..(514): Pfam Name: Male sterility protein Pfam Description: Male sterility protein
  misc_feature (26)..(516): Homolog of NCBI NO: 15242260 NR Description: male sterility 2-like protein (emb|CAA68191.1); id: At5g22500.1, supported by cDNA: gi_14334737, supported by
  misc_feature (26)..(516): Homolog of NCBI NO: 11357157 NR Description: acyl CoA reductase-protein - Arabidopsis thaliana
  misc_feature (26)..(423): Homolog of NCBI NO: 30692171 NR Description: acyl CoA reductase - protein [Arabidopsis
  misc_feature (26)..(423): Homolog of NCBI NO: 15229991 NR Description: acyl CoA reductase -like protein; protein id:
  misc_feature (26)..(358): Homolog of NCBI NO: 15229993 NR Description: acyl CoA reductase -like protein; protein id:
  misc_feature (433)..(516): Homolog of NCBI NO: 15229993 NR Description: acyl CoA reductase -like protein; protein id:
  misc_feature (31)..(514): Homolog of NCBI NO: 5020215 NR Description: acyl CoA reductase [Simmondsia chinensis]
  misc_feature (141)..(500): Homolog of NCBI NO: 15242233 NR Description: acyl CoA reductase-like protein; protein id:
  misc_feature (26)..(81): Homolog of NCBI NO: 15242233 NR Description: acyl CoA reductase-like protein; protein id:
  misc_feature (31)..(513): Homolog of NCBI NO: 16323107 NR Description: AT4g33790/T16L1_280 [Arabidopsis thaliana]
HASVLSKKKKKSCVSLRLVENHFISMESNCVQFLGNKTILITGAPGFLAKVLVEKILRLQPNVKKIYLLLRAPDEKSAMQRLRSEVMEIDLFKVLRNNLGEDNLNALMREKIVPVPGDISIDNLGLKDTDLIQRMWSEIDIIINIAATTNFDERYDIGLGINTFGALNVLNFAKKCVKGQLLLHVSTAYISGEQPGLLLEKPFKMGETLSGDRELDINIEHDLMKQKLKELQDCSDEEISQTMKDFGMARAKLHGWPNTYVFTKAMGEMLMGKYRENLPLVIIRPTMITSTIAEPFPGWIEGLKTLDSVIVAYGKGRLKCFLADSNSVFDLIPADMVVNAMVAAATAHSGDTGIQAIYHVGSSCKNPVTFGQLHDFTARYFAKRPLIGRNGSPIIVVKGTILSTMAQFSLYMTLRYKLPLQILRLINIVYPWSHGDNYSDLSRKIKLAMRLVELYQPYLLFKGIFDDLNTERLRMKRKENIKELDGSFEFDPKSIDWDNYITNTHIPGLITHVLKQ

SEQ ID NO: 76486 - protein, 491 aa, Arabidopsis thaliana
  peptide (1)..(491): Ceres Seq. ID no. 7108144
  misc_feature (285)..(489): Pfam Name: Male sterility protein Pfam Description: Male sterility protein
  misc_feature (1)..(491): Homolog of NCBI NO: 15242260 NR Description: male sterility 2-like protein (emb|CAA68191.1); id: At5g22500.1, supported by cDNA: gi_14334737, supported by
  misc_feature (1)..(491): Homolog of NCBI NO: 11357157 NR Description: acyl CoA reductase-protein - Arabidopsis thaliana
  misc_feature (1)..(398): Homolog of NCBI NO: 30692171 NR Description: acyl CoA reductase - protein [Arabidopsis
  misc_feature (1)..(398): Homolog of NCBI NO: 15229991 NR Description: acyl CoA reductase -like protein; protein id:
  misc_feature (1)..(333): Homolog of NCBI NO: 15229993 NR Description: acyl CoA reductase -like protein; protein id:
  misc_feature (408)..(491): Homolog of NCBI NO: 15229993 NR Description: acyl CoA reductase -like protein; protein id:
  misc_feature (6)..(489): Homolog of NCBI NO: 5020215 NR Description: acyl CoA reductase [Simmondsia chinensis]
  misc_feature (116)..(475): Homolog of NCBI NO: 15242233 NR Description: acyl CoA reductase-like protein; protein id:
  misc_feature (1)..(56): Homolog of NCBI NO: 15242233 NR Description: acyl CoA reductase-like protein; protein id:
  misc_feature (6)..(488): Homolog of NCBI NO: 16323107 NR Description: AT4g33790/T16L1_280 [Arabidopsis thaliana]
MESNCVQFLGNKTILITGAPGFLAKVLVEKILRLQPNVKKIYLLLRAPDEKSAMQRLRSEVMEIDLFKVLRNNLGEDNLNALMREKIVPVPGDISIDNLGLKDTDLIQRMWSEIDIIINIAATTNFDERYDIGLGINTFGALNVLNFAKKCVKGQLLLHVSTAYISGEQPGLLLEKPFKMGETLSGDRELDINIEHDLMKQKLKELQDCSDEEISQTMKDFGMARAKLHGWPNTYVFTKAMGEMLMGKYRENLPLVIIRPTMITSTIAEPFPGWIEGLKTLDSVIVAYGKGRLKCFLADSNSVFDLIPADMVVNAMVAAATAHSGDTGIQAIYHVGSSCKNPVTFGQLHDFTARYFAKRPLIGRNGSPIIVVKGTILSTMAQFSLYMTLRYKLPLQILRLINIVYPWSHGDNYSDLSRKIKLAMRLVELYQPYLLFKGIFDDLNTERLRMKRKENIKELDGSFEFDPKSIDWDNYITNTHIPGLITHVLKQ

SEQ ID NO: 76487 - protein, 438 aa, Arabidopsis thaliana
  peptide (1)..(438): Ceres Seq. ID no. 7108145
  misc_feature (232)..(436): Pfam Name: Male sterility protein Pfam Description: Male sterility protein
  misc_feature (1)..(438): Homolog of NCBI NO: 15242260 NR Description: male sterility 2-like protein (emb|CAA68191.1); id: At5g22500.1, supported by cDNA: gi_14334737, supported by
  misc_feature (1)..(438): Homolog of NCBI NO: 11357157 NR Description: acyl CoA reductase-protein - Arabidopsis thaliana
  misc_feature (1)..(345): Homolog of NCBI NO: 30692171 NR Description: acyl CoA reductase - protein [Arabidopsis
  misc_feature (1)..(345): Homolog of NCBI NO: 15229991 NR Description: acyl CoA reductase -like protein; protein id:
  misc_feature (1)..(280): Homolog of NCBI NO: 15229993 NR Description: acyl CoA reductase -like protein; protein id:
  misc_feature (355)..(438): Homolog of NCBI NO: 15229993 NR Description: acyl CoA reductase -like protein; protein id:
  misc_feature (1)..(436): Homolog of NCBI NO: 5020215 NR Description: acyl CoA reductase [Simmondsia chinensis]
  misc_feature (63)..(422): Homolog of NCBI NO: 15242233 NR Description: acyl CoA reductase-like protein; protein id:
  misc_feature (1)..(435): Homolog of NCBI NO: 16323107 NR Description: AT4g33790/T16L1_280 [Arabidopsis thaliana]
  misc_feature (1)..(435): Homolog of NCBI NO: 7487952 NR Description: male sterility protein 2 homolog T16L1.280 -
MQRLRSEVMEIDLFKVLRNNLGEDNLNALMREKIVPVPGDISIDNLGLKDTDLIQRMWSEIDIIINIAATTNFDERYDIGLGINTFGALNVLNFAKKCVKGQLLLHVSTAYISGEQPGLLLEKPFKMGETLSGDRELDINIEHDLMKQKLKELQDCSDEEISQTMKDFGMARAKLHGWPNTYVFTKAMGEMLMGKYRENLPLVIIRPTMITSTIAEPFPGWIEGLKTLDSVIVAYGKGRLKCFLADSNSVFDLIPADMVVNAMVAAATAHSGDTGIQAIYHVGSSCKNPVTFGQLHDFTARYFAKRPLIGRNGSPIIVVKGTILSTMAQFSLYMTLRYKLPLQILRLINIVYPWSHGDNYSDLSRKIKLAMRLVELYQPYLLFKGIFDDLNTERLRMKRKENIKELDGSFEFDPKSIDWDNYITNTHIPGLITHVLKQ

SEQ ID NO: 76488 - DNA, 898 bp, Arabidopsis thaliana
  misc_feature (1)..(898): Ceres Seq. ID no. 7108169
  misc_feature: MA Experiment ID: 20000166 Result: Up-regulated in Transcription
  misc_feature: MA Experiment 20000166 PARAMETER Experiment Name: At_100uM_ABA_P Parameter: Age (day) Value: 14
  misc_feature: MA Experiment 20000166 PARAMETER Experiment Name: At_100uM_ABA_P Parameter: Organism Value: A. thaliana
  misc_feature: MA Experiment 20000166 PARAMETER Experiment Name: At_100uM_ABA_P Parameter: Plant Line Value: WS
  misc_feature: MA Experiment 20000166 PARAMETER Experiment Name: At_100uM_ABA_P Parameter: Timepoint (hr) Value: 1
  misc_feature: MA Experiment 20000166 PARAMETER Experiment Name: At_100uM_ABA_P Parameter: Tissue Value: Aerial
  misc_feature: MA Experiment 20000166 PARAMETER Experiment Name: At_100uM_ABA_P Parameter: Treatment Value: 100uM ABA vs. No Treatment
  misc_feature: MA Experiment ID: 20000182 Result: Up-regulated in Transcription
  misc_feature: MA Experiment 20000182 PARAMETER Experiment Name: At_2mM_SA_P Parameter: Age (day) Value: 14
  misc_feature: MA Experiment 20000182 PARAMETER Experiment Name: At_2mM_SA_P Parameter: Organism Value: A. thaliana
  misc_feature: MA Experiment 20000182 PARAMETER Experiment Name: At_2mM_SA_P Parameter: Plant Line Value: WS
  misc_feature: MA Experiment 20000182 PARAMETER Experiment Name: At_2mM_SA_P Parameter: Timepoint (hr) Value: 6
  misc_feature: MA Experiment 20000182 PARAMETER Experiment Name: At_2mM_SA_P Parameter: Tissue Value: Aerial
  misc_feature: MA Experiment 20000182 PARAMETER Experiment Name: At_2mM_SA_P Parameter: Treatment Value: 2mM SA vs. No Treatment
  misc_feature: MA Experiment ID: 20000184 Result: Down-regulated in Transcription
  misc_feature: MA Experiment 20000184 PARAMETER Experiment Name: At_Shoots__P Parameter: Age (day) Value: 7
  misc_feature: MA Experiment 20000184 PARAMETER Experiment Name: At_Shoots__P Parameter: Tissue Value: Shoots vs. Whole Plant
  misc_feature: MA Experiment ID: 20000213 Result: Up-regulated in Transcription
  misc_feature: MA Experiment 20000213 PARAMETER Experiment Name: At_4deg_Cold_P Parameter: Timepoint (hr) Value: 2
  misc_feature: MA Experiment ID: 20000264 Result: Up-regulated in Transcription
  misc_feature: MA Experiment 20000264 PARAMETER Experiment Name: At_Open_Flower_P Parameter: Age (day) Value: 21
  misc_feature: MA Experiment 20000264 PARAMETER Experiment Name: At_Open_Flower_P Parameter: Plant Line Value: WS
  misc_feature: MA Experiment 20000264 PARAMETER Experiment Name: At_Open_Flower_P Parameter: Tissue Value: Open Flower vs. Whole Plant
  misc_feature: MA Experiment ID: 20000437 Result: Up-regulated in Transcription
  misc_feature: MA Experiment 20000437 PARAMETER Experiment Name: At_Drought_P Parameter: Age (day) Value: 8
  misc_feature: MA Experiment 20000437 PARAMETER Experiment Name: At_Drought_P Parameter: Organism Value: A. thaliana
  misc_feature: MA Experiment 20000437 PARAMETER Experiment Name: At_Drought_P Parameter: Plant Line Value: WS
  misc_feature: MA Experiment 20000437 PARAMETER Experiment Name: At_Drought_P Parameter: Timepoint (hr) Value: 24
  misc_feature: MA Experiment 20000437 PARAMETER Experiment Name: At_Drought_P Parameter: Tissue Value: Whole Plant
  misc_feature: MA Experiment 20000437 PARAMETER Experiment Name: At_Drought_P Parameter: Treatment Value: Drought vs. No Drought
  misc_feature: MA Experiment ID: 20000439 Result: Up-regulated in Transcription
  misc_feature: MA Experiment 20000439 PARAMETER Experiment Name: At_Roots__P Parameter: Age (day) Value: 14 vs. 21
  misc_feature: MA Experiment 20000439 PARAMETER Experiment Name: At_Roots__P Parameter: Organism Value: A. thaliana
  misc_feature: MA Experiment 20000439 PARAMETER Experiment Name: At_Roots__P Parameter: Tissue Value: Roots vs. Whole Plant
  misc_feature: MA Experiment ID: 20000794 Result: Up-regulated in Transcription
  misc_feature: MA Experiment 20000794 PARAMETER Experiment Name: At_Petals_P Parameter: Age (day) Value: 23-25 days
  misc_feature: MA Experiment 20000794 PARAMETER Experiment Name: At_Petals_P Parameter: Plant Line Value: WS
  misc_feature: MA Experiment 20000794 PARAMETER Experiment Name: At_Petals_P Parameter: Tissue Value: Petals vs. Whole plant
  misc_feature: MA Experiment ID: 20001450 Result: Down-regulated in Transcription
  misc_feature: MA Experiment 20001450 PARAMETER Experiment Name: At_Far-red-induction_P Parameter: Age (day) Value: 7
  misc_feature: MA Experiment 20001450 PARAMETER Experiment Name: At_Far-red-induction_P Parameter: Light Value: Far-red vs. White
  misc_feature: MA Experiment 20001450 PARAMETER Experiment Name: At_Far-red-induction_P Parameter: Organism Value: A. thaliana
  misc_feature: MA Experiment 20001450 PARAMETER Experiment Name: At_Far-red-induction_P Parameter: Plant Line Value: Columbia
  misc_feature: MA Experiment 20001450 PARAMETER Experiment Name: At_Far-red-induction_P Parameter: Timepoint (hr) Value: 8
  misc_feature: MA Experiment 20001450 PARAMETER Experiment Name: At_Far-red-induction_P Parameter: Tissue Value: Whole Plant
  misc_feature: MA Experiment ID: 20001451 Result: Down-regulated in Transcription
  misc_feature: MA Experiment 20001451 PARAMETER Experiment Name: At_Far-red-induction_P Parameter: Age (day) Value: 7
  misc_feature: MA Experiment 20001451 PARAMETER Experiment Name: At_Far-red-induction_P Parameter: Light Value: Far-red vs. White
  misc_feature: MA Experiment 20001451 PARAMETER Experiment Name: At_Far-red-induction_P Parameter: Organism Value: A. thaliana
  misc_feature: MA Experiment 20001451 PARAMETER Experiment Name: At_Far-red-induction_P Parameter: Plant Line Value: Columbia
  misc_feature: MA Experiment 20001451 PARAMETER Experiment Name: At_Far-red-induction_P Parameter: Timepoint (hr) Value: 24
  misc_feature: MA Experiment 20001451 PARAMETER Experiment Name: At_Far-red-induction_P Parameter: Tissue Value: Whole Plant
cttttgcaaatgcttcgctcctcaattcgacttctctatataagaagaaccagtcctctgcttcgaagtttatcatcatcatcatcatcatcatcatcatcatcatcaaaacgattcgattctgcgaaaccacttttcaattctcatcggattatttctcttccaatttctacaacgggagctaaactatctagatcggagcattcaatggctgcttcttccgaacccaaatctctttacgatttcaccgtcaaggatgctaagggaaacgatgttgatctaagcatctacaaagggaaggttcttttgattgtgaacgttgcttctcaatgtggcttgactaattcgaattatactgagcttgcgcagctgtatgagaagtacaaaggccatggtttcgagattcttgcatttccgtgtaaccagtttgggaatcaagagcctggtactaatgaagagattgttcagtttgcttgtactcgtttcaaggctgagtacccgattttcgacaaggttgatgttaacggtgacaaagctgccccagtctacaagtttctgaaatcaagcaaaggcgggctctttggagacggcattaagtggaacttcgcaaagtttttggttgacaaagatggaaatgttgtcgatcgtttcgcaccaactacctcacctctcagcattgaaaaggatgtgaagaagttgttgggagttactgcttaagcaaggcaagattgcataattagacaaataaaagctcattagtattgtattaccaatactgtgtagtaagctgagttcgcgagtgtgtgtgccattgggaccgcgtacaattataatccgttttttagcggccaaactatgtaataatcgtagatctaaatatcagatttcccgttacctt

SEQ ID NO: 76489 - protein, 238 aa, Arabidopsis thaliana
  peptide (1)..(238): Ceres Seq. ID no. 7108170
  misc_feature (78)..(187): Pfam Name: Glutathione peroxidase Pfam Description: Glutathione peroxidase
  misc_feature (4)..(238): Homolog of NCBI NO: 30681827 NR Description: glutathione peroxidase, putative [Arabidopsis >gi|14532478|gb|AAK63967.1| AT4g11600/T5C23_30 [Arabidopsis >gi|18655355|gb|AAL76133.1| AT4g11600/T5C23_30 [Arabidopsis
  misc_feature (70)..(238): Homolog of NCBI NO: 20138157 NR Description: Probable phospholipid hydroperoxide glutathione
  misc_feature (13)..(234): Homolog of NCBI NO: 6179600 NR Description: GPX12Hv, glutathione peroxidase-like protein
  misc_feature (71)..(234): Homolog of NCBI NO: 27544804 NR Description: phospholipid hydroperoxide glutathione
  misc_feature (70)..(235): Homolog of NCBI NO: 22268405 NR Description: putative glutathione peroxidase [Zea mays]
  misc_feature (72)..(236): Homolog of NCBI NO: 20138151 NR Description: Probable phospholipid hydroperoxide glutathione
  misc_feature (70)..(235): Homolog of NCBI NO: 34334012 NR Description: cytosolic glutathione peroxidase [Triticum
  misc_feature (70)..(235): Homolog of NCBI NO: 21360380 NR Description: glutathione peroxidase 1 [Oryza sativa]
  misc_feature (70)..(234): Homolog of NCBI NO: 6179604 NR Description: glutathione peroxidase-like protein GPX54Hv
  misc_feature (70)..(237): Homolog of NCBI NO: 20138384 NR Description: Probable phospholipid hydroperoxide glutathione (PHGPx) >gi|8919668|emb|CAB96145.1| phospholipid hydroperoxide
LLQMLRSSIRLLYIRRTSPLLRSLSSSSSSSSSSSSKRFDSAKPLFNSHRIISLPISTTGAKLSRSEHSMAASSEPKSLYDFTVKDAKGNDVDLSIYKGKVLLIVNVASQCGLTNSNYTELAQLYEKYKGHGFEILAFPCNQFGNQEPGTNEEIVQFACTRFKAEYPIFDKVDVNGDKAAPVYKFLKSSKGGLFGDGIKWNFAKFLVDKDGNVVDRFAPTTSPLSIEKDVKKLLGVTA

SEQ ID NO: 76490 - protein, 235 aa, Arabidopsis thaliana
  peptide (1)..(235): Ceres Seq. ID no. 7108171
  misc_feature (75)..(184): Pfam Name: Glutathione peroxidase Pfam Description: Glutathione peroxidase
  misc_feature (1)..(235): Homolog of NCBI NO: 30681827 NR Description: glutathione peroxidase, putative [Arabidopsis >gi|14532478|gb|AAK63967.1| AT4g11600/T5C23_30 [Arabidopsis >gi|18655355|gb|AAL76133.1| AT4g11600/T5C23_30 [Arabidopsis
  misc_feature (67)..(235): Homolog of NCBI NO: 20138157 NR Description: Probable phospholipid hydroperoxide glutathione
  misc_feature (10)..(231): Homolog of NCBI NO: 6179600 NR Description: GPX12Hv, glutathione peroxidase-like protein
  misc_feature (68)..(231): Homolog of NCBI NO: 27544804 NR Description: phospholipid hydroperoxide glutathione
  misc_feature (67)..(232): Homolog of NCBI NO: 22268405 NR Description: putative glutathione peroxidase [Zea mays]
  misc_feature (69)..(233): Homolog of NCBI NO: 20138151 NR Description: Probable phospholipid hydroperoxide glutathione
  misc_feature (67)..(232): Homolog of NCBI NO: 34334012 NR Description: cytosolic glutathione peroxidase [Triticum
  misc_feature (67)..(232): Homolog of NCBI NO: 21360380 NR Description: glutathione peroxidase 1 [Oryza sativa]
  misc_feature (67)..(231): Homolog of NCBI NO: 6179604 NR Description: glutathione peroxidase-like protein GPX54Hv
  misc_feature (67)..(234): Homolog of NCBI NO: 20138384 NR Description: Probable phospholipid hydroperoxide glutathione (PHGPx) >gi|8919668|emb|CAB96145.1| phospholipid hydroperoxide
MLRSSIRLLYIRRTSPLLRSLSSSSSSSSSSSSKRFDSAKPLFNSHRIISLPISTTGAKLSRSEHSMAASSEPKSLYDFTVKDAKGNDVDLSIYKGKVLLIVNVASQCGLTNSNYTELAQLYEKYKGHGFEILAFPCNQFGNQEPGTNEEIVQFACTRFKAEYPIFDKVDVNGDKAAPVYKFLKSSKGGLFGDGIKWNFAKFLVDKDGNVVDRFAPTTSPLSIEKDVKKLLGVTA

SEQ ID NO: 76491 - protein, 169 aa, Arabidopsis thaliana; identical to SEQ ID NO: 28163
  peptide (1)..(169): Ceres Seq. ID no. 7108172
  misc_feature (9)..(118): Pfam Name: Glutathione peroxidase Pfam Description: Glutathione peroxidase
  misc_feature (1)..(169): Homolog of NCBI NO: 30681827 NR Description: glutathione peroxidase, putative [Arabidopsis >gi|14532478|gb|AAK63967.1| AT4g11600/T5C23_30 [Arabidopsis >gi|18655355|gb|AAL76133.1| AT4g11600/T5C23_30 [Arabidopsis
  misc_feature (1)..(169): Homolog of NCBI NO: 20138157 NR Description: Probable phospholipid hydroperoxide glutathione
  misc_feature (1)..(165): Homolog of NCBI NO: 6179600 NR Description: GPX12Hv, glutathione peroxidase-like protein
  misc_feature (2)..(165): Homolog of NCBI NO: 27544804 NR Description: phospholipid hydroperoxide glutathione
  misc_feature (1)..(166): Homolog of NCBI NO: 22268405 NR Description: putative glutathione peroxidase [Zea mays]
  misc_feature (3)..(167): Homolog of NCBI NO: 20138151 NR Description: Probable phospholipid hydroperoxide glutathione
  misc_feature (1)..(166): Homolog of NCBI NO: 34334012 NR Description: cytosolic glutathione peroxidase [Triticum
  misc_feature (1)..(166): Homolog of NCBI NO: 21360380 NR Description: glutathione peroxidase 1 [Oryza sativa]
  misc_feature (1)..(165): Homolog of NCBI NO: 6179604 NR Description: glutathione peroxidase-like protein GPX54Hv
  misc_feature (1)..(168): Homolog of NCBI NO: 20138384 NR Description: Probable phospholipid hydroperoxide glutathione (PHGPx) >gi|8919668|emb|CAB96145.1| phospholipid hydroperoxide

SEQ ID NO: 76492 - DNA, 1405 bp, Arabidopsis thaliana
  misc_feature (1)..(1405): Ceres Seq. ID no. 7108177
  misc_feature: MA Experiment ID: 20000179 Result: Up-regulated in Transcription
  misc_feature: MA Experiment 20000179 PARAMETER Experiment Name: At_Germinating_Seeds_P Parameter: Age (hr) Value: 6 vs. 0
  misc_feature: MA Experiment 20000179 PARAMETER Experiment Name: At_Germinating_Seeds_P Parameter: Tissue Value: Germinating Seeds
  misc_feature: MA Experiment ID: 20000180 Result: Up-regulated in Transcription
  misc_feature: MA Experiment 20000180 PARAMETER Experiment Name: At_Germinating_Seeds_P Parameter: Age (hr) Value: 24 vs. 0
  misc_feature: MA Experiment 20000180 PARAMETER Experiment Name: At_Germinating_Seeds_P Parameter: Tissue Value: Germinating Seeds
  misc_feature: MA Experiment ID: 20000182 Result: Up-regulated in Transcription
  misc_feature: MA Experiment 20000182 PARAMETER Experiment Name: At_2mM_SA_P Parameter: Age (day) Value: 14
  misc_feature: MA Experiment 20000182 PARAMETER Experiment Name: At_2mM_SA_P Parameter: Organism Value: A. thaliana
  misc_feature: MA Experiment 20000182 PARAMETER Experiment Name: At_2mM_SA_P Parameter: Plant Line Value: WS
  misc_feature: MA Experiment 20000182 PARAMETER Experiment Name: At_2mM_SA_P Parameter: Timepoint (hr) Value: 6
  misc_feature: MA Experiment 20000182 PARAMETER Experiment Name: At_2mM_SA_P Parameter: Tissue Value: Aerial
  misc_feature: MA Experiment 20000182 PARAMETER Experiment Name: At_2mM_SA_P Parameter: Treatment Value: 2mM SA vs. No Treatment
  misc_feature: MA Experiment ID: 20001451 Result: Down-regulated in Transcription
  misc_feature: MA Experiment 20001451 PARAMETER Experiment Name: At_Far-red-induction_P Parameter: Age (day) Value: 7
  misc_feature: MA Experiment 20001451 PARAMETER Experiment Name: At_Far-red-induction_P Parameter: Light Value: Far-red vs. White
  misc_feature: MA Experiment 20001451 PARAMETER Experiment Name: At_Far-red-induction_P Parameter: Organism Value: A. thaliana
  misc_feature: MA Experiment 20001451 PARAMETER Experiment Name: At_Far-red-induction_P Parameter: Plant Line Value: Columbia
  misc_feature: MA Experiment 20001451 PARAMETER Experiment Name: At_Far-red-induction_P Parameter: Timepoint (hr) Value: 24
  misc_feature: MA Experiment 20001451 PARAMETER Experiment Name: At_Far-red-induction_P Parameter: Tissue Value: Whole Plant
  misc_feature: Pfam Name: Pkinase Pfam Description: Protein kinase domain
ccacgcgtccgacacttccatataattaaaatcgagatctcgaataatgcgaatctgaaggatctttacgaattccataatcttcagatcgaaaggtttctatcgattcgttggtcaagaggagattgtgcgtgtgattcgtgagcatgggctgttcgttttcaggattgaacgcactttacgacgccgtcaacggtggaggtgacgtatggatcaatgagaatcgattcaggatcgtgaggcagctcggcgaaggaggtttcgcattcgtctttttggtcaaggaaattgtcgccgacgcttcctccgccgcatccggtggtggtctagctaagaaagtcaaggatccggctcatctctccgctgacggaacttatgctatgaagaaagttttgattcagaacaaggagcaattggaattggtgcgtgaggagatccgtgtttcttcattgttcaatcaccctaatttgcttccactccttgatcatgccattatttctgttaaggacggccaagagggagcttggaaacacgaggccttcttgctgtttcctgttcacttggatgggaccttgctggataatttcactttgatgaaggctaaaaaagaaactttctcaacaactgatgttttgcacatattccgtcagctttgtgatggacttaaacacatgcactctctggagccaccatatgctcacaacgatgtcaaacctggcaacgtccttttaacacgtagaaaaggacagcctcctcttgcgatattgatggactttggaagtgctcgcccatcacggaagcaaatccgttcccgtcaagaggccttacagttacaggaatggacatctgagcattgctcagcaccgtttcgagctcccgagctctgggattgcccaagccatgctgatattgatgagagaacagatatctggtcactaggctgcacattatatgcaataatgtatggtgtgtctccattcgagtatgcgcttggagaatctggtggaagtcttcagcttgcaatcgtgaacgctcagatcaaatggccaaacactggaccaaaagcttcttaccctgaagctcttcaccagttcgtaacttggatgctgcaaccacaagctgctgttcgaccgcgcatagacgatatcatcatccatgtcgacaaattgatcgctaaattcaccaaatgattcccgaattatgttggttttcaaaaaaaggtgaaaggaaagaaaagaagactctttatacattgctttgtctctttttttttctaatatccttagctgttttcaaaaatcccatattagatacatatatttaatagtattacattgctcttcgtaatgtattttgaactttttaggattcggggttttctttttgactatggaagttgtgaacc

SEQ ID NO: 76493 - protein, 347 aa, Arabidopsis thaliana; identical to SEQ ID NO: 27076
  peptide (1)..(347): Ceres Seq. ID no. 7108178
  misc_feature: Pfam Name: Pkinase Pfam Description: Protein kinase domain
  misc_feature (1)..(347): Homolog of NCBI NO: 15241535 NR Description: serine/threonine protein kinase; protein id: supported by cDNA: 5323., supported by cDNA: gi_13358242, by cDNA: gi_2109292 [Arabidopsis thaliana]
  misc_feature (1)..(347): Homolog of NCBI NO: 21593866 NR Description: serine/threonine protein kinase [Arabidopsis
  misc_feature (67)..(347): Homolog of NCBI NO: 30682270 NR Description: serine/threonine protein kinase, putative
  misc_feature (1)..(30): Homolog of NCBI NO: 30682270 NR Description: serine/threonine protein kinase, putative
  misc_feature (74)..(341): Homolog of NCBI NO: 10640971 NR Description: F5-2 [Homo sapiens]
  misc_feature (74)..(341): Homolog of NCBI NO: 12803571 NR Description: serine/threonine kinase 16 [Homo sapiens]
  misc_feature (74)..(341): Homolog of NCBI NO: 33303961 NR Description: serine/threonine kinase 16 [synthetic construct]
  misc_feature (74)..(341): Homolog of NCBI NO: 3372666 NR Description: myristilated and palmitylated serine-threonine
  misc_feature (74)..(341): Homolog of NCBI NO: 27465615 NR Description: serine/threonine kinase 16 [Rattus norvegicus] serine/threonine kinase 16 [Rattus norvegicus] Serine/threonine protein kinase 16 (Protein kinase PKL12)
  misc_feature (74)..(341): Homolog of NCBI NO: 6714558 NR Description: F5-2 [Mus musculus]

SEQ ID NO: 76494 - protein, 269 aa, Arabidopsis thaliana; identical to SEQ ID NO: 27077
  peptide (1)..(269): Ceres Seq. ID no. 7108179
  misc_feature: Pfam Name: Pkinase Pfam Description: Protein kinase domain
  misc_feature (1)..(269): Homolog of NCBI NO: 15241535 NR Description: serine/threonine protein kinase; protein id: supported by cDNA: 5323., supported by cDNA: gi_13358242, by cDNA: gi_2109292 [Arabidopsis thaliana]
  misc_feature (1)..(269): Homolog of NCBI NO: 21593866 NR Description: serine/threonine protein kinase [Arabidopsis
  misc_feature (1)..(269): Homolog of NCBI NO: 30682270 NR Description: serine/threonine protein kinase, putative
  misc_feature (1)..(263): Homolog of NCBI NO: 10640971 NR Description: F5-2 [Homo sapiens]
  misc_feature (1)..(263): Homolog of NCBI NO: 12803571 NR Description: serine/threonine kinase 16 [Homo sapiens]
  misc_feature (1)..(263): Homolog of NCBI NO: 33303961 NR Description: serine/threonine kinase 16 [synthetic construct]
  misc_feature (1)..(263): Homolog of NCBI NO: 3372666 NR Description: myristilated and palmitylated serine-threonine
  misc_feature (1)..(263): Homolog of NCBI NO: 27465615 NR Description: serine/threonine kinase 16 [Rattus norvegicus] serine/threonine kinase 16 [Rattus norvegicus] Serine/threonine protein kinase 16 (Protein kinase PKL12)
  misc_feature (1)..(263): Homolog of NCBI NO: 6714558 NR Description: F5-2 [Mus musculus]
  misc_feature (1)..(263): Homolog of NCBI NO: 6729083 NR Description: F5-2 [Mus musculus]

SEQ ID NO: 76495 - protein, 198 aa, Arabidopsis thaliana; identical to SEQ ID NO: 27078
  peptide (1)..(198): Ceres Seq. ID no. 7108180
  misc_feature: Pfam Name: Pkinase Pfam Description: Protein kinase domain
  misc_feature (1)..(198): Homolog of NCBI NO: 15241535 NR Description: serine/threonine protein kinase; protein id: supported by cDNA: 5323., supported by cDNA: gi_13358242, by cDNA: gi_2109292 [Arabidopsis thaliana]
  misc_feature (1)..(198): Homolog of NCBI NO: 21593866 NR Description: serine/threonine protein kinase [Arabidopsis
  misc_feature (1)..(198): Homolog of NCBI NO: 30682270 NR Description: serine/threonine protein kinase, putative
  misc_feature (1)..(192): Homolog of NCBI NO: 10640971 NR Description: F5-2 [Homo sapiens]
  misc_feature (1)..(192): Homolog of NCBI NO: 12803571 NR Description: serine/threonine kinase 16 [Homo sapiens]
  misc_feature (1)..(192): Homolog of NCBI NO: 33303961 NR Description: serine/threonine kinase 16 [synthetic construct]
  misc_feature (1)..(192): Homolog of NCBI NO: 3372666 NR Description: myristilated and palmitylated serine-threonine
  misc_feature (1)..(192): Homolog of NCBI NO: 27465615 NR Description: serine/threonine kinase 16 [Rattus norvegicus] serine/threonine kinase 16 [Rattus norvegicus] Serine/threonine protein kinase 16 (Protein kinase PKL12)
  misc_feature (1)..(192): Homolog of NCBI NO: 6714558 NR Description: F5-2 [Mus musculus]
  misc_feature (1)..(192): Homolog of NCBI NO: 6729083 NR Description: F5-2 [Mus musculus]

SEQ ID NO: 76496 - DNA, 1251 bp, Arabidopsis thaliana
  misc_feature (1)..(1251): Ceres Seq. ID no. 7108181
  misc_feature: MA Experiment ID: 108434 Result: Up-regulated in Transcription
  misc_feature: MA Experiment 108434 PARAMETER Experiment Name: At_Root_Tips_cDNA_P Parameter: Tissue Value: Root Tips
  misc_feature: MA Experiment ID: 108573 Result: Up-regulated in Transcription
  misc_feature: MA Experiment 108573 PARAMETER Experiment Name: At_Drought_cDNA_P Parameter: Timepoint (hr) Value: 6
  misc_feature: MA Experiment 108573 PARAMETER Experiment Name: At_Drought_cDNA_P Parameter: Tissue Value: Aerial
  misc_feature: MA Experiment 108573 PARAMETER Experiment Name: At_Drought_cDNA_P Parameter: Treatment Value: Drought vs. No Drought
  misc_feature: MA Experiment ID: 108579 Result: Down-regulated in Transcription
  misc_feature: MA Experiment 108579 PARAMETER Experiment Name: At_4deg_Cold_cDNA_P Parameter: Temperature (deg C) Value: 4 vs. 22
  misc_feature: MA Experiment 108579 PARAMETER Experiment Name: At_4deg_Cold_cDNA_P Parameter: Timepoint (hr) Value: 6
  misc_feature: MA Experiment 108579 PARAMETER Experiment Name: At_4deg_Cold_cDNA_P Parameter: Tissue Value: Aerial
  misc_feature: MA Experiment ID: 108585 Result: Up-regulated in Transcription
  misc_feature: MA Experiment 108585 PARAMETER Experiment Name: At_5mM_NaNP_cDNA_P Parameter: Timepoint (hr) Value: 6
  misc_feature: MA Experiment 108585 PARAMETER Experiment Name: At_5mM_NaNP_cDNA_P Parameter: Tissue Value: Aerial
  misc_feature: MA Experiment 108585 PARAMETER Experiment Name: At_5mM_NaNP_cDNA_P Parameter: Treatment Value: null
  misc_feature: MA Experiment ID: 20000111 Result: Up-regulated in Transcription
  misc_feature: MA Experiment 20000111 PARAMETER Experiment Name: At_42deg_Heat_cDNA_P Parameter: Temperature (deg C) Value: 42 vs. 22
  misc_feature: MA Experiment 20000111 PARAMETER Experiment Name: At_42deg_Heat_cDNA_P Parameter: Timepoint (hr) Value: 6
  misc_feature: MA Experiment 20000111 PARAMETER Experiment Name: At_42deg_Heat_cDNA_P Parameter: Tissue Value: Aerial
  misc_feature: MA Experiment ID: 20000224 Result: Down-regulated in Transcription
  misc_feature: Pfam Name: WD40 Pfam Description: WD domain, G-beta repeat
gtcgacccacgcgtccgagaagcggaggcgatttttctagggtttttgctcggaatcgatttcacgatgggaacgagcagcgatccgattcaagatggttccgatgagcagcagaagcgatcagaaatctatacatacgaagcgccatggcacatctacgcaatgaattggagcgttcgtcgcgataagaagtatcgtctcgccatcactagcctcctcgagcaatacccgaaccgtgtcgagattgtgcagctcgatgaatccaatggtgagatccgttccgatcctaacctctcctttgagcatccttatccaccaacgaagaccattttcatacctgacaaggaatgccaaagacctgatcttctcgctacttcaagtgatttccttcgtttatggagaatcgctgatgatcattcccgtgttgagctcaaatcttgtctcaatagcaataagaacagtgagttttgtggtcctcttacttcttttgattggaatgaagctgagccacgtcgaattggaacatctagtactgatacgacttgtactatctgggacattgagcgtgaagctgttgatactcagcttattgctcatgataaggaagtttttgatattgcttggggtggtgttggtgtttttgcatctgtttcagctgatggctccgttagggtgtttgatcttcgtgataaggaacattcgacgattatctatgagagctccgagcctgatactcctttagtgcgtcttggttgggacaaacaggatcctaggtacatggctactattatcatggacagtgctaaagttgtggtgcttgacattcgttttccggctcttcctgtggttgagcttcaacgacatcaagctagtgtcaatgccattgcttgggctcctcatagctcttgtcacatttgtactgctggagatgattctcaagctttgatttgggatatttcatccatgggacagcatgttgaaggtggtcttgaccctattctagcttacactgctggtgctgagattgagcagcttcagtggtcctcttctcagcctgattgggtcgcaattgctttctctactaagctgcaaattctcagggtttgatcttttcaaagaatttctcatctcttgtcagattagattttactcattttctatcgtattaggggtctcgttacccttgttactatcctcaagatgtaaagactgttctcaatcgaattaatgaatctgtttgatcttgttgct

SEQ ID NO: 76497 - protein, 368 aa, Arabidopsis thaliana
  peptide (1)..(368): Ceres Seq. ID no. 7108182
  misc_feature: Pfam Name: WD40 Pfam Description: WD domain, G-beta repeat
  misc_feature (23)..(368): Homolog of NCBI NO: 2290528 NR Description: ATAN11 [Arabidopsis thaliana]
  misc_feature (23)..(368): Homolog of NCBI NO: 15222113 NR Description: flower pigmentation protein ATAN11; protein id: supported by cDNA: 37574., supported by cDNA: gi_20260403, by cDNA: gi_2290527 [Arabidopsis thaliana]
  misc_feature (23)..(368): Homolog of NCBI NO: 21593264 NR Description: flower pigmentation protein ATAN11 [Arabidopsis
  misc_feature (23)..(368): Homolog of NCBI NO: 22324803 NR Description: WD-repeat protein GhTTG2 [Gossypium hirsutum]
  misc_feature (23)..(368): Homolog of NCBI NO: 15231593 NR Description: transcriptional regulator protein, putative; id: At3g26640.1, supported by cDNA: 21743. [Arabidopsis thaliana]
  misc_feature (23)..(368): Homolog of NCBI NO: 28393624 NR Description: putative transcriptional regulator protein
  misc_feature (23)..(368): Homolog of NCBI NO: 22324809 NR Description: WD-repeat protein GhTTG4 [Gossypium hirsutum]
  misc_feature (55)..(368): Homolog of NCBI NO: 13346196 NR Description: WD1521 [Gossypium hirsutum]
  misc_feature (245)..(368): Homolog of NCBI NO: 37719680 NR Description: WD40 repeat protein [Zea mays]
  misc_feature (33)..(157): Homolog of NCBI NO: 37719680 NR Description: WD40 repeat protein [Zea mays]
VDPRVREAEAIFLGFLLGIDFTMGTSSDPIQDGSDEQQKRSEIYTYEAPWHIYAMNWSVRRDKKYRLAITSLLEQYPNRVEIVQLDESNGEIRSDPNLSFEHPYPPTKTIFIPDKECQRPDLLATSSDFLRLWRIADDHSRVELKSCLNSNKNSEFCGPLTSFDWNEAEPRRIGTSSTDTTCTIWDIEREAVDTQLIAHDKEVFDIAWGGVGVFASVSADGSVRVFDLRDKEHSTIIYESSEPDTPLVRLGWDKQDPRYMATIIMDSAKVVVLDIRFPALPVVELQRHQASVNAIAWAPHSSCHICTAGDDSQALIWDISSMGQHVEGGLDPILAYTAGAEIEQLQWSSSQPDWVAIAFSTKLQILRV

SEQ ID NO: 76498 - protein, 346 aa, Arabidopsis thaliana
  peptide (1)..(346): Ceres Seq. ID no. 7108183
  misc_feature: Pfam Name: WD40 Pfam Description: WD domain, G-beta repeat
  misc_feature (1)..(346): Homolog of NCBI NO: 2290528 NR Description: ATAN11 [Arabidopsis thaliana]
  misc_feature (1)..(346): Homolog of NCBI NO: 15222113 NR Description: flower pigmentation protein ATAN11; protein id: supported by cDNA: 37574., supported by cDNA: gi_20260403, by cDNA: gi_2290527 [Arabidopsis thaliana]
  misc_feature (1)..(346): Homolog of NCBI NO: 21593264 NR Description: flower pigmentation protein ATAN11 [Arabidopsis
  misc_feature (1)..(346): Homolog of NCBI NO: 22324803 NR Description: WD-repeat protein GhTTG2 [Gossypium hirsutum]
  misc_feature (1)..(346): Homolog of NCBI NO: 15231593 NR Description: transcriptional regulator protein, putative; id: At3g26640.1, supported by cDNA: 21743. [Arabidopsis thaliana]
  misc_feature (1)..(346): Homolog of NCBI NO: 28393624 NR Description: putative transcriptional regulator protein
  misc_feature (1)..(346): Homolog of NCBI NO: 22324809 NR Description: WD-repeat protein GhTTG4 [Gossypium hirsutum]
  misc_feature (33)..(346): Homolog of NCBI NO: 13346196 NR Description: WD1521 [Gossypium hirsutum]
  misc_feature (223)..(346): Homolog of NCBI NO: 37719680 NR Description: WD40 repeat protein [Zea mays]
  misc_feature (11)..(135): Homolog of NCBI NO: 37719680 NR Description: WD40 repeat protein [Zea mays]
MGTSSDPIQDGSDEQQKRSEIYTYEAPWHIYAMNWSVRRDKKYRLAITSLLEQYPNRVEIVQLDESNGEIRSDPNLSFEHPYPPTKTIFIPDKECQRPDLLATSSDFLRLWRIADDHSRVELKSCLNSNKNSEFCGPLTSFDWNEAEPRRIGTSSTDTTCTIWDIEREAVDTQLIAHDKEVFDIAWGGVGVFASVSADGSVRVFDLRDKEHSTIIYESSEPDTPLVRLGWDKQDPRYMATIIMDSAKVVVLDIRFPALPVVELQRHQASVNAIAWAPHSSCHICTAGDDSQALIWDISSMGQHVEGGLDPILAYTAGAEIEQLQWSSSQPDWVAIAFSTKLQILRV

SEQ ID NO: 76499 - protein, 314 aa, Arabidopsis thaliana
  peptide (1)..(314): Ceres Seq. ID no. 7108184
  misc_feature: Pfam Name: WD40 Pfam Description: WD domain, G-beta repeat
  misc_feature (1)..(314): Homolog of NCBI NO: 2290528 NR Description: ATAN11 [Arabidopsis thaliana]
  misc_feature (1)..(314): Homolog of NCBI NO: 15222113 NR Description: flower pigmentation protein ATAN11; protein id: supported by cDNA: 37574., supported by cDNA: gi_20260403, by cDNA: gi_2290527 [Arabidopsis thaliana]
  misc_feature (1)..(314): Homolog of NCBI NO: 21593264 NR Description: flower pigmentation protein ATAN11 [Arabidopsis
  misc_feature (1)..(314): Homolog of NCBI NO: 22324803 NR Description: WD-repeat protein GhTTG2 [Gossypium hirsutum]
  misc_feature (1)..(314): Homolog of NCBI NO: 15231593 NR Description: transcriptional regulator protein, putative; id: At3g26640.1, supported by cDNA: 21743. [Arabidopsis thaliana]
  misc_feature (1)..(314): Homolog of NCBI NO: 28393624 NR Description: putative transcriptional regulator protein
  misc_feature (1)..(314): Homolog of NCBI NO: 22324809 NR Description: WD-repeat protein GhTTG4 [Gossypium hirsutum]
  misc_feature (1)..(314): Homolog of NCBI NO: 13346196 NR Description: WD1521 [Gossypium hirsutum]
  misc_feature (191)..(314): Homolog of NCBI NO: 37719680 NR Description: WD40 repeat protein [Zea mays]
  misc_feature (1)..(103): Homolog of NCBI NO: 37719680 NR Description: WD40 repeat protein [Zea mays]
MNWSVRRDKKYRLAITSLLEQYPNRVEIVQLDESNGEIRSDPNLSFEHPYPPTKTIFIPDKECQRPDLLATSSDFLRLWRIADDHSRVELKSCLNSNKNSEFCGPLTSFDWNEAEPRRIGTSSTDTTCTIWDIEREAVDTQLIAHDKEVFDIAWGGVGVFASVSADGSVRVFDLRDKEHSTIIYESSEPDTPLVRLGWDKQDPRYMATIIMDSAKVVVLDIRFPALPVVELQRHQASVNAIAWAPHSSCHICTAGDDSQALIWDISSMGQHVEGGLDPILAYTAGAEIEQLQWSSSQPDWVAIAFSTKLQILRV

SEQ ID NO: 76500 - DNA, 1678 bp, Arabidopsis thaliana
  misc_feature (1)..(1678): Ceres Seq. ID no. 7108195
  misc_feature: MA Experiment ID: 20000184 Result: Down-regulated in Transcription
  misc_feature: MA Experiment 20000184 PARAMETER Experiment Name: At_Shoots__P Parameter: Age (day) Value: 7
  misc_feature: MA Experiment 20000184 PARAMETER Experiment Name: At_Shoots__P Parameter: Tissue Value: Shoots vs. Whole Plant
  misc_feature: MA Experiment ID: 20000227 Result: Down-regulated in Transcription
  misc_feature: MA Experiment 20000227 PARAMETER Experiment Name: At_Root-Tips-vs-Tops_P Parameter: Tissue Value: Root Tips vs. Root Tops
  misc_feature: MA Experiment ID: 20000234 Result: Down-regulated in Transcription
  misc_feature: MA Experiment 20000234 PARAMETER Experiment Name: At_Siliques_P Parameter: Age (day) Value: 21
  misc_feature: MA Experiment 20000234 PARAMETER Experiment Name: At_Siliques_P Parameter: Organism Value: A. thaliana
  misc_feature: MA Experiment 20000234 PARAMETER Experiment Name: At_Siliques_P Parameter: Plant Line Value: WS
  misc_feature: MA Experiment 20000234 PARAMETER Experiment Name: At_Siliques_P Parameter: Tissue Value: Less Than 5mm Siliques vs. Whole Plant
  misc_feature: MA Experiment ID: 20000264 Result: Down-regulated in Transcription
  misc_feature: MA Experiment 20000264 PARAMETER Experiment Name: At_Open_Flower_P Parameter: Age (day) Value: 21
  misc_feature: MA Experiment 20000264 PARAMETER Experiment Name: At_Open_Flower_P Parameter: Plant Line Value: WS
  misc_feature: MA Experiment 20000264 PARAMETER Experiment Name: At_Open_Flower_P Parameter: Tissue Value: Open Flower vs. Whole Plant
  misc_feature: MA Experiment ID: 20000265 Result: Down-regulated in Transcription
  misc_feature: MA Experiment 20000265 PARAMETER Experiment Name: At_Open_Flower_P Parameter: Age (day) Value: 21
  misc_feature: MA Experiment 20000265 PARAMETER Experiment Name: At_Open_Flower_P Parameter: Plant Line Value: WS
  misc_feature: MA Experiment 20000265 PARAMETER Experiment Name: At_Open_Flower_P Parameter: Tissue Value: Closed Flower vs. Whole Plant
  misc_feature: MA Experiment ID: 20000268 Result: Down-regulated in Transcription
  misc_feature: MA Experiment 20000268 PARAMETER Experiment Name: At_100mM_NaCl__P Parameter: Age (day) Value: 14
  misc_feature: MA Experiment 20000268 PARAMETER Experiment Name: At_100mM_NaCl__P Parameter: Organism Value: A. thaliana
  misc_feature: MA Experiment 20000268 PARAMETER Experiment Name: At_100mM_NaCl__P Parameter: Plant Line Value: WS
  misc_feature: MA Experiment 20000268 PARAMETER Experiment Name: At_100mM_NaCl__P Parameter: Timepoint (hr) Value: 6
  misc_feature: MA Experiment 20000268 PARAMETER Experiment Name: At_100mM_NaCl__P Parameter: Tissue Value: Whole Plant
  misc_feature: MA Experiment 20000268 PARAMETER Experiment Name: At_100mM_NaCl__P Parameter: Treatment Value: 100mM NaCl vs. No Treatment
  misc_feature: MA Experiment ID: 20000286 Result: Down-regulated in Transcription
  misc_feature: MA Experiment 20000286 PARAMETER Experiment Name: At_Open_Flower_P Parameter: Age (day) Value: 21
  misc_feature: MA Experiment 20000286 PARAMETER Experiment Name: At_Open_Flower_P Parameter: Plant Line Value: WS
  misc_feature: MA Experiment 20000286 PARAMETER Experiment Name: At_Open_Flower_P Parameter: Tissue Value: Half Open vs. Whole Plant
  misc_feature: MA Experiment ID: 20000436 Result: Down-regulated in Transcription
  misc_feature: MA Experiment 20000436 PARAMETER Experiment Name: At_Drought_P Parameter: Age (day) Value: 7
  misc_feature: MA Experiment 20000436 PARAMETER Experiment Name: At_Drought_P Parameter: Organism Value: A. thaliana
  misc_feature: MA Experiment 20000436 PARAMETER Experiment Name: At_Drought_P Parameter: Plant Line Value: WS
  misc_feature: MA Experiment 20000436 PARAMETER Experiment Name: At_Drought_P Parameter: Timepoint (hr) Value: 12
  misc_feature: MA Experiment 20000436 PARAMETER Experiment Name: At_Drought_P Parameter: Tissue Value: Whole Plant
  misc_feature: MA Experiment 20000436 PARAMETER Experiment Name: At_Drought_P Parameter: Treatment Value: Drought vs. No Drought
  misc_feature: MA Experiment ID: 20000438 Result: Down-regulated in Transcription
  misc_feature: MA Experiment 20000438 PARAMETER Experiment Name: At_Shoots__P Parameter: Age (day) Value: 14
  misc_feature: MA Experiment 20000438 PARAMETER Experiment Name: At_Shoots__P Parameter: Tissue Value: Shoots vs. Whole Plant
  misc_feature: MA Experiment ID: 20000441 Result: Up-regulated in Transcription
  misc_feature: MA Experiment 20000441 PARAMETER Experiment Name: At_1uM_BR-BRZ__P Parameter: Tissue Value: Shoot Apices
  misc_feature: MA Experiment 20000441 PARAMETER Experiment Name: At_1uM_BR-BRZ__P Parameter: Treatment Value: 1uM BR vs. No Treatment
  misc_feature: MA Experiment ID: 20000443 Result: Up-regulated in Transcription
  misc_feature: MA Experiment 20000443 PARAMETER Experiment Name: At_1uM_BR-BRZ__P Parameter: Tissue Value: Shoot Apices
  misc_feature: MA Experiment 20000443 PARAMETER Experiment Name: At_1uM_BR-BRZ__P Parameter: Treatment Value: 1uM BRZ vs. No Treatment
  misc_feature: MA Experiment ID: 20000455 Result: Down-regulated in Transcription
  misc_feature: MA Experiment 20000455 PARAMETER Experiment Name: At_100uM_ABA_P Parameter: Age (day) Value: 16
  misc_feature: MA Experiment 20000455 PARAMETER Experiment Name: At_100uM_ABA_P Parameter: Organism Value: A. thaliana
  misc_feature: MA Experiment 20000455 PARAMETER Experiment Name: At_100uM_ABA_P Parameter: Plant Line Value: WS
  misc_feature: MA Experiment 20000455 PARAMETER Experiment Name: At_100uM_ABA_P Parameter: Timepoint (hr) Value: 48
  misc_feature: MA Experiment 20000455 PARAMETER Experiment Name: At_100uM_ABA_P Parameter: Tissue Value: Aerial
  misc_feature: MA Experiment 20000455 PARAMETER Experiment Name: At_100uM_ABA_P Parameter: Treatment Value: 100uM ABA vs. No Treatment
  misc_feature: MA Experiment ID: 20000794 Result: Down-regulated in Transcription
  misc_feature: MA Experiment 20000794 PARAMETER Experiment Name: At_Petals_P Parameter: Age (day) Value: 23-25 days
  misc_feature: MA Experiment 20000794 PARAMETER Experiment Name: At_Petals_P Parameter: Plant Line Value: WS
  misc_feature: MA Experiment 20000794 PARAMETER Experiment Name: At_Petals_P Parameter: Tissue Value: Petals vs. Whole plant
  misc_feature: MA Experiment ID: 20001248 Result: Up-regulated in Transcription
  misc_feature: MA Experiment 20001248 PARAMETER Experiment Name: At_Far-red-induction_P Parameter: Age (day) Value: 7
  misc_feature: MA Experiment 20001248 PARAMETER Experiment Name: At_Far-red-induction_P Parameter: Light Value: Far-red vs. White
  misc_feature: MA Experiment 20001248 PARAMETER Experiment Name: At_Far-red-induction_P Parameter: Organism Value: A. thaliana
  misc_feature: MA Experiment 20001248 PARAMETER Experiment Name: At_Far-red-induction_P Parameter: Plant Line Value: Columbia
  misc_feature: MA Experiment 20001248 PARAMETER Experiment Name: At_Far-red-induction_P Parameter: Timepoint (hr) Value: 4
  misc_feature: MA Experiment 20001248 PARAMETER Experiment Name: At_Far-red-induction_P Parameter: Tissue Value: Whole Plant
  misc_feature: MA Experiment ID: 20001451 Result: Up-regulated in Transcription
  misc_feature: MA Experiment 20001451 PARAMETER Experiment Name: At_Far-red-induction_P Parameter: Age (day) Value: 7
  misc_feature: MA Experiment 20001451 PARAMETER Experiment Name: At_Far-red-induction_P Parameter: Light Value: Far-red vs. White
  misc_feature: MA Experiment 20001451 PARAMETER Experiment Name: At_Far-red-induction_P Parameter: Organism Value: A. thaliana
  misc_feature: MA Experiment 20001451 PARAMETER Experiment Name: At_Far-red-induction_P Parameter: Plant Line Value: Columbia
  misc_feature: MA Experiment 20001451 PARAMETER Experiment Name: At_Far-red-induction_P Parameter: Timepoint (hr) Value: 24
  misc_feature: MA Experiment 20001451 PARAMETER Experiment Name: At_Far-red-induction_P Parameter: Tissue Value: Whole Plant
  misc_feature: MA Experiment ID: 20001458 Result: Up-regulated in Transcription
  misc_feature: MA Experiment 20001458 PARAMETER Experiment Name: At_50mM_NH4NO3_L-to-H_P Parameter: Age (day) Value: Undefined
  misc_feature: MA Experiment 20001458 PARAMETER Experiment Name: At_50mM_NH4NO3_L-to-H_P Parameter: Organism Value: Undefined
  misc_feature: MA Experiment 20001458 PARAMETER Experiment Name: At_50mM_NH4NO3_L-to-H_P Parameter: Plant Line Value: Undefined
  misc_feature: MA Experiment 20001458 PARAMETER Experiment Name: At_50mM_NH4NO3_L-to-H_P Parameter: Timepoint (hr) Value: 2
  misc_feature: MA Experiment 20001458 PARAMETER Experiment Name: At_50mM_NH4NO3_L-to-H_P Parameter: Tissue Value: Siliques
  misc_feature: MA Experiment 20001458 PARAMETER Experiment Name: At_50mM_NH4NO3_L-to-H_P Parameter: Treatment Value: 50mM NH4NO3 vs. 100mM Manitol
  misc_feature: MA Experiment ID: 20001555 Result: Down-regulated in Transcription
  misc_feature: MA Experiment 20001555 PARAMETER Experiment Name: At_Drought_Soil_Dry_P Parameter: Age (day) Value: 24
  misc_feature: MA Experiment 20001555 PARAMETER Experiment Name: At_Drought_Soil_Dry_P Parameter: Organism Value: A. thaliana
  misc_feature: MA Experiment 20001555 PARAMETER Experiment Name: At_Drought_Soil_Dry_P Parameter: Plant Line Value: WS
  misc_feature: MA Experiment 20001555 PARAMETER Experiment Name: At_Drought_Soil_Dry_P Parameter: Post Timepoint (hr) Value: None
  misc_feature: MA Experiment 20001555 PARAMETER Experiment Name: At_Drought_Soil_Dry_P Parameter: Post-Treatment Value: None
  misc_feature: MA Experiment 20001555 PARAMETER Experiment Name: At_Drought_Soil_Dry_P Parameter: Timepoint (day) Value: 10
  misc_feature: MA Experiment 20001555 PARAMETER Experiment Name: At_Drought_Soil_Dry_P Parameter: Treatment Value: Drought vs. No Drought
  misc_feature: MA Experiment ID: 20001556 Result: Down-regulated in Transcription
  misc_feature: MA Experiment 20001556 PARAMETER Experiment Name: At_Drought_Soil_Dry_P Parameter: Age (day) Value: 26
  misc_feature: MA Experiment 20001556 PARAMETER Experiment Name: At_Drought_Soil_Dry_P Parameter: Organism Value: A. thaliana
  misc_feature: MA Experiment 20001556 PARAMETER Experiment Name: At_Drought_Soil_Dry_P Parameter: Plant Line Value: WS
  misc_feature: MA Experiment 20001556 PARAMETER Experiment Name: At_Drought_Soil_Dry_P Parameter: Post Timepoint (hr) Value: None
  misc_feature: MA Experiment 20001556 PARAMETER Experiment Name: At_Drought_Soil_Dry_P Parameter: Post-Treatment Value: None
  misc_feature: MA Experiment 20001556 PARAMETER Experiment Name: At_Drought_Soil_Dry_P Parameter: Timepoint (day) Value: 12
  misc_feature: MA Experiment 20001556 PARAMETER Experiment Name: At_Drought_Soil_Dry_P Parameter: Treatment Value: Drought vs. No Drought
  misc_feature: MA Experiment ID: 20001557 Result: Up-regulated in Transcription
  misc_feature: MA Experiment 20001557 PARAMETER Experiment Name: At_Drought_Soil_Dry_P Parameter: Age (day) Value: 27
  misc_feature: MA Experiment 20001557 PARAMETER Experiment Name: At_Drought_Soil_Dry_P Parameter: Organism Value: A. thaliana
  misc_feature: MA Experiment 20001557 PARAMETER Experiment Name: At_Drought_Soil_Dry_P Parameter: Plant Line Value: WS
  misc_feature: MA Experiment 20001557 PARAMETER Experiment Name: At_Drought_Soil_Dry_P Parameter: Post Timepoint (hr) Value: 3
  misc_feature: MA Experiment 20001557 PARAMETER Experiment Name: At_Drought_Soil_Dry_P Parameter: Post-Treatment Value: Re-Water vs. No Drought
  misc_feature: MA Experiment 20001557 PARAMETER Experiment Name: At_Drought_Soil_Dry_P Parameter: Timepoint (day) Value: 13
  misc_feature: MA Experiment 20001557 PARAMETER Experiment Name: At_Drought_Soil_Dry_P Parameter: Treatment Value: Drought vs. No Drought
  misc_feature: MA Experiment ID: 20001906 Result: Down-regulated in Transcription
  misc_feature: MA Experiment 20001906 PARAMETER Experiment Name: At_Drought_Reproduction_P Parameter: Age (day) Value: 35
  misc_feature: MA Experiment 20001906 PARAMETER Experiment Name: At_Drought_Reproduction_P Parameter: Organism Value: A. thaliana
  misc_feature: MA Experiment 20001906 PARAMETER Experiment Name: At_Drought_Reproduction_P Parameter: Plant Line Value: WS
  misc_feature: MA Experiment 20001906 PARAMETER Experiment Name: At_Drought_Reproduction_P Parameter: Timepoint (day) Value: 5
  misc_feature: MA Experiment 20001906 PARAMETER Experiment Name: At_Drought_Reproduction_P Parameter: Tissue Value: Siliques
  misc_feature: MA Experiment 20001906 PARAMETER Experiment Name: At_Drought_Reproduction_P Parameter: Treatment Value: Drought vs. No Drought
  misc_feature: MA Experiment ID: 20001907 Result: Down-regulated in Transcription
  misc_feature: MA Experiment 20001907 PARAMETER Experiment Name: At_Drought_Reproduction_P Parameter: Age (day) Value: 37
  misc_feature: MA Experiment 20001907 PARAMETER Experiment Name: At_Drought_Reproduction_P Parameter: Organism Value: A. thaliana
  misc_feature: MA Experiment 20001907 PARAMETER Experiment Name: At_Drought_Reproduction_P Parameter: Plant Line Value: WS
  misc_feature: MA Experiment 20001907 PARAMETER Experiment Name: At_Drought_Reproduction_P Parameter: Timepoint (day) Value: 7
  misc_feature: MA Experiment 20001907 PARAMETER Experiment Name: At_Drought_Reproduction_P Parameter: Tissue Value: Siliques
  misc_feature: MA Experiment 20001907 PARAMETER Experiment Name: At_Drought_Reproduction_P Parameter: Treatment Value: Drought vs. No Drought
gatccgggatgggaaagaagcaggaggagactttttggaatggagagacaaaagagcatggaaaaagggttactcaggaagagcttaagcatacgtgagagaaagttccctaacgaagacgctttcttagaatccggtttatcgaggaagtctccgcgagaggtcaagaaacctcaaaacgacgatggtgaatgtcgtgttaccgcctctgttttcctcagcacctttgttgccgtatcaggctccttctgtaccggttgtggcgttggtttttcatcgggtgcacaagcagggattaccaaagatttatctctctccgttgcagaatactcaatgttcgggtcgatcttgacattaggaggcttgatcggtgcagtattcagcggtaaagtcgctgatgtcttgggaagaaaacggacgatgttgttttgcgaattcttctgtatcacaggctggctttgtgtagcattggctcagaatgcaatgtggctggactgtggaagattgttacttggaatcggcgttggtatatttagctacgtgattccggtgtatatagccgaaattgcacctaaacatgtccgaggatcgtttgtgttcgccaatcagttgatgcaaaattgcggaatttcactcttcttcatcattggcaattttattccatggagactactaacagtagtcggattggtgccatgtgtgttccacgtcttttgtttatttttcatccccgaatctccaagatggctggcgaagttaggtcgtgataaagaatgccgatcttcgttgcaacgccttaggggatctgacgtcgatatttctcgtgaagcaaacacaattcgagataccattgacatgacagaaaacggtggtgaaactaagatgtctgaattgtttcagagacgatacgcatatccgttaattatcggagttggtttaatgtttttgcaacaattgtgtgggagctccggtgttacctattatgctagtagcctcttcaacaaaggaggatttccaagtgctattggcacatccgtaatagccacaattatggttccaaaagcaatgctggcaacagtcctagtcgataaaatggggaggagaacgctcctaatggcttcttgttctgcaatgggtttgagtgctttgctcttaagtgtttcttacggtttccagtcgtttggcattcttccagaactcactcccatcttcacttgcatcggcgtcttgggtcacattgtgtcatttgccatgggaatgggaggactaccatggattataatggctgagatatttccgatgaatgtgaaagtgtcagctgggaccttagttactgtaaccaattggttatttggttggattatcacatacactttcaattttatgctagaatggaatgcatcaggaatgttcctcatcttctcaatggtctccgccagttcgatcgtatttatatactttttggtacctgagacaaaaggccgatcacttgaagaaatacaagcactgctcaacaactctgtgcaataatatcatttttctttttctttttgggtaaatgatcatatatataagtcgattgttgttatttggtgtgagtttgaatgtgatccgtgtgcgtatcaaattttggatgggaaatttgaaacagtaaaaatttgtatattcctcgtttggg

SEQ ID NO: 76501 - protein, 509 aa, Arabidopsis thaliana
  peptide (1)..(509): Ceres Seq. ID no. 7108196
  misc_feature (73)..(504): Pfam Name: Sugar (and other) transporter Pfam Description: Sugar (and other) transporter
  misc_feature (14)..(509): Homolog of NCBI NO: 18390959 NR Description: zinc finger protein ATZF1, putative; protein id: supported by cDNA: gi_3123711 [Arabidopsis thaliana] probable sugar transporter protein ERD6 sugar transporter
  misc_feature (55)..(509): Homolog of NCBI NO: 18390957 NR Description: putative sugar transport protein, ERD6; protein At1g08920.1, supported by cDNA: gi_14194108 [Arabidopsis >gi|14194109|gb|AAK56249.1|AF367260_1 At1g08920/F7G19_20
  misc_feature (55)..(509): Homolog of NCBI NO: 6686827 NR Description: putative sugar transporter [Arabidopsis thaliana]
  misc_feature (55)..(470): Homolog of NCBI NO: 25407065 NR Description: hypothetical protein [imported] - Arabidopsis >gi|2342687|gb|AAB70413.1| Similar to Beta integral membrane (gb|U43629). EST gb|W43122 comes from this gene. [Arabidopsis
  misc_feature (59)..(507): Homolog of NCBI NO: 18397141 NR Description: Expressed protein; protein id: At3g05165.1
  misc_feature (57)..(504): Homolog of NCBI NO: 18421108 NR Description: sugar transporter-like protein; protein id:
  misc_feature (43)..(504): Homolog of NCBI NO: 14585699 NR Description: sugar-porter family protein 1 [Arabidopsis
  misc_feature (43)..(504): Homolog of NCBI NO: 18421106 NR Description: sugar transporter-like protein; protein id: supported by cDNA: gi_14585698, supported by cDNA: gi_15294181
  misc_feature (20)..(477): Homolog of NCBI NO: 25407067 NR Description: hypothetical protein [imported] - Arabidopsis >gi|2342693|gb|AAB70420.1| Similar to Beta integral membrane (gb|U43629). EST gb|N37585,gb|T43808,gb|,gb|AA395424 come from
  misc_feature (59)..(507): Homolog of NCBI NO: 18397139 NR Description: putative sugar transporter; protein id: supported by cDNA: gi_16604315 [Arabidopsis thaliana] AT3g05160/T12H1_13 [Arabidopsis thaliana]
DPGWERSRRRLFGMERQKSMEKGLLRKSLSIRERKFPNEDAFLESGLSRKSPREVKKPQNDDGECRVTASVFLSTFVAVSGSFCTGCGVGFSSGAQAGITKDLSLSVAEYSMFGSILTLGGLIGAVFSGKVADVLGRKRTMLFCEFFCITGWLCVALAQNAMWLDCGRLLLGIGVGIFSYVIPVYIAEIAPKHVRGSFVFANQLMQNCGISLFFIIGNFIPWRLLTVVGLVPCVFHVFCLFFIPESPRWLAKLGRDKECRSSLQRLRGSDVDISREANTIRDTIDMTENGGETKMSELFQRRYAYPLIIGVGLMFLQQLCGSSGVTYYASSLFNKGGFPSAIGTSVIATIMVPKAMLATVLVDKMGRRTLLMASCSAMGLSALLLSVSYGFQSFGILPELTPIFTCIGVLGHIVSFAMGMGGLPWIIMAEIFPMNVKVSAGTLVTVTNWLFGWIITYTFNFMLEWNASGMFLIFSMVSASSIVFIYFLVPETKGRSLEEIQALLNNSVQ

SEQ ID NO: 76502 - protein, 496 aa, Arabidopsis thaliana; identical to SEQ ID NO: 50382
  peptide (1)..(496): Ceres Seq. ID no. 7108197
  misc_feature (60)..(491): Pfam Name: Sugar (and other) transporter Pfam Description: Sugar (and other) transporter
  misc_feature (1)..(496): Homolog of NCBI NO: 18390959 NR Description: zinc finger protein ATZF1, putative; protein id: supported by cDNA: gi_3123711 [Arabidopsis thaliana] probable sugar transporter protein ERD6 sugar transporter
  misc_feature (42)..(496): Homolog of NCBI NO: 18390957 NR Description: putative sugar transport protein, ERD6; protein At1g08920.1, supported by cDNA: gi_14194108 [Arabidopsis >gi|14194109|gb|AAK56249.1|AF367260_1 At1g08920/F7G19_20
  misc_feature (42)..(496): Homolog of NCBI NO: 6686827 NR Description: putative sugar transporter [Arabidopsis thaliana]
  misc_feature (42)..(457): Homolog of NCBI NO: 25407065 NR Description: hypothetical protein [imported] - Arabidopsis >gi|2342687|gb|AAB70413.1| Similar to Beta integral membrane (gb|U43629). EST gb|W43122 comes from this gene. [Arabidopsis
  misc_feature (46)..(494): Homolog of NCBI NO: 18397141 NR Description: Expressed protein; protein id: At3g05165.1
  misc_feature (44)..(491): Homolog of NCBI NO: 18421108 NR Description: sugar transporter-like protein; protein id:
  misc_feature (30)..(491): Homolog of NCBI NO: 14585699 NR Description: sugar-porter family protein 1 [Arabidopsis
  misc_feature (30)..(491): Homolog of NCBI NO: 18421106 NR Description: sugar transporter-like protein; protein id: supported by cDNA: gi_14585698, supported by cDNA: gi_15294181
  misc_feature (7)..(464): Homolog of NCBI NO: 25407067 NR Description: hypothetical protein [imported] - Arabidopsis >gi|2342693|gb|AAB70420.1| Similar to Beta integral membrane (gb|U43629). EST gb|N37585,gb|T43808,gb|,gb|AA395424 come from
  misc_feature (46)..(494): Homolog of NCBI NO: 18397139 NR Description: putative sugar transporter; protein id: supported by cDNA: gi_16604315 [Arabidopsis thaliana] AT3g05160/T12H1_13 [Arabidopsis thaliana]

SEQ ID NO: 76503 - protein, 490 aa, Arabidopsis thaliana; identical to SEQ ID NO: 50383
  peptide (1)..(490): Ceres Seq. ID no. 7108198
  misc_feature (54)..(485): Pfam Name: Sugar (and other) transporter Pfam Description: Sugar (and other) transporter
  misc_feature (1)..(490): Homolog of NCBI NO: 18390959 NR Description: zinc finger protein ATZF1, putative; protein id: supported by cDNA: gi_3123711 [Arabidopsis thaliana] probable sugar transporter protein ERD6 sugar transporter
  misc_feature (36)..(490): Homolog of NCBI NO: 18390957 NR Description: putative sugar transport protein, ERD6; protein At1g08920.1, supported by cDNA: gi_14194108 [Arabidopsis >gi|14194109|gb|AAK56249.1|AF367260_1 At1g08920/F7G19_20
  misc_feature (36)..(490): Homolog of NCBI NO: 6686827 NR Description: putative sugar transporter [Arabidopsis thaliana]
  misc_feature (36)..(451): Homolog of NCBI NO: 25407065 NR Description: hypothetical protein [imported] - Arabidopsis >gi|2342687|gb|AAB70413.1| Similar to Beta integral membrane (gb|U43629). EST gb|W43122 comes from this gene. [Arabidopsis
  misc_feature (40)..(488): Homolog of NCBI NO: 18397141 NR Description: Expressed protein; protein id: At3g05165.1
  misc_feature (38)..(485): Homolog of NCBI NO: 18421108 NR Description: sugar transporter-like protein; protein id:
  misc_feature (24)..(485): Homolog of NCBI NO: 14585699 NR Description: sugar-porter family protein 1 [Arabidopsis
  misc_feature (24)..(485): Homolog of NCBI NO: 18421106 NR Description: sugar transporter-like protein; protein id: supported by cDNA: gi_14585698, supported by cDNA: gi_15294181
  misc_feature (1)..(458): Homolog of NCBI NO: 25407067 NR Description: hypothetical protein [imported] - Arabidopsis >gi|2342693|gb|AAB70420.1| Similar to Beta integral membrane (gb|U43629). EST gb|N37585,gb|T43808,gb|,gb|AA395424 come from
  misc_feature (40)..(488): Homolog of NCBI NO: 18397139 NR Description: putative sugar transporter; protein id: supported by cDNA: gi_16604315 [Arabidopsis thaliana] AT3g05160/T12H1_13 [Arabidopsis thaliana]

SEQ ID NO: 76504 - DNA, 1647 bp, Arabidopsis thaliana
  misc_feature (1)..(1647): Ceres Seq. ID no. 7108211
  misc_feature: MA Experiment ID: 20000173 Result: Down-regulated in Transcription
  misc_feature: MA Experiment 20000173 PARAMETER Experiment Name: At_42deg_Heat_P Parameter: Age (day) Value: 14
  misc_feature: MA Experiment 20000173 PARAMETER Experiment Name: At_42deg_Heat_P Parameter: Organism Value: A. thaliana
  misc_feature: MA Experiment 20000173 PARAMETER Experiment Name: At_42deg_Heat_P Parameter: Plant Line Value: WS
  misc_feature: MA Experiment 20000173 PARAMETER Experiment Name: At_42deg_Heat_P Parameter: Temperature (deg C) Value: 42 vs. 22
  misc_feature: MA Experiment 20000173 PARAMETER Experiment Name: At_42deg_Heat_P Parameter: Timepoint (hr) Value: 6
  misc_feature: MA Experiment 20000173 PARAMETER Experiment Name: At_42deg_Heat_P Parameter: Tissue Value: Aerial
  misc_feature: MA Experiment ID: 20000184 Result: Down-regulated in Transcription
  misc_feature: MA Experiment 20000184 PARAMETER Experiment Name: At_Shoots__P Parameter: Age (day) Value: 7
  misc_feature: MA Experiment 20000184 PARAMETER Experiment Name: At_Shoots__P Parameter: Tissue Value: Shoots vs. Whole Plant
  misc_feature: MA Experiment ID: 20000234 Result: Down-regulated in Transcription
  misc_feature: MA Experiment 20000234 PARAMETER Experiment Name: At_Siliques_P Parameter: Age (day) Value: 21
  misc_feature: MA Experiment 20000234 PARAMETER Experiment Name: At_Siliques_P Parameter: Organism Value: A. thaliana
  misc_feature: MA Experiment 20000234 PARAMETER Experiment Name: At_Siliques_P Parameter: Plant Line Value: WS
  misc_feature: MA Experiment 20000234 PARAMETER Experiment Name: At_Siliques_P Parameter: Tissue Value: Less Than 5mm Siliques vs. Whole Plant
  misc_feature: MA Experiment ID: 20000264 Result: Down-regulated in Transcription
  misc_feature: MA Experiment 20000264 PARAMETER Experiment Name: At_Open_Flower_P Parameter: Age (day) Value: 21
  misc_feature: MA Experiment 20000264 PARAMETER Experiment Name: At_Open_Flower_P Parameter: Plant Line Value: WS
  misc_feature: MA Experiment 20000264 PARAMETER Experiment Name: At_Open_Flower_P Parameter: Tissue Value: Open Flower vs. Whole Plant
  misc_feature: MA Experiment ID: 20000495 Result: Down-regulated in Transcription
  misc_feature: MA Experiment 20000495 PARAMETER Experiment Name: At_Guard_Cells_P Parameter: Harvest Date Value: 8/2/2002
  misc_feature: MA Experiment 20000495 PARAMETER Experiment Name: At_Guard_Cells_P Parameter: Organism Value: A. thaliana
  misc_feature: MA Experiment 20000495 PARAMETER Experiment Name: At_Guard_Cells_P Parameter: Tissue Value: Guard Cells vs. Leaves
  misc_feature: MA Experiment ID: 20000496 Result: Down-regulated in Transcription
  misc_feature: MA Experiment 20000496 PARAMETER Experiment Name: At_Guard_Cells_P Parameter: Harvest Date Value: 7/19/2002
  misc_feature: MA Experiment 20000496 PARAMETER Experiment Name: At_Guard_Cells_P Parameter: Organism Value: Canola
  misc_feature: MA Experiment 20000496 PARAMETER Experiment Name: At_Guard_Cells_P Parameter: Tissue Value: Guard Cells vs. Leaves
  misc_feature: MA Experiment ID: 20001451 Result: Down-regulated in Transcription
  misc_feature: MA Experiment 20001451 PARAMETER Experiment Name: At_Far-red-induction_P Parameter: Age (day) Value: 7
  misc_feature: MA Experiment 20001451 PARAMETER Experiment Name: At_Far-red-induction_P Parameter: Light Value: Far-red vs. White
  misc_feature: MA Experiment 20001451 PARAMETER Experiment Name: At_Far-red-induction_P Parameter: Organism Value: A. thaliana
  misc_feature: MA Experiment 20001451 PARAMETER Experiment Name: At_Far-red-induction_P Parameter: Plant Line Value: Columbia
  misc_feature: MA Experiment 20001451 PARAMETER Experiment Name: At_Far-red-induction_P Parameter: Timepoint (hr) Value: 24
  misc_feature: MA Experiment 20001451 PARAMETER Experiment Name: At_Far-red-induction_P Parameter: Tissue Value: Whole Plant
  misc_feature: MA Experiment ID: 20001560 Result: Down-regulated in Transcription
  misc_feature: MA Experiment 20001560 PARAMETER Experiment Name: At_Drought_Soil_Dry_P Parameter: Age (day) Value: 28
  misc_feature: MA Experiment 20001560 PARAMETER Experiment Name: At_Drought_Soil_Dry_P Parameter: Organism Value: A. thaliana
  misc_feature: MA Experiment 20001560 PARAMETER Experiment Name: At_Drought_Soil_Dry_P Parameter: Plant Line Value: WS
  misc_feature: MA Experiment 20001560 PARAMETER Experiment Name: At_Drought_Soil_Dry_P Parameter: Post Timepoint (hr) Value: None
  misc_feature: MA Experiment 20001560 PARAMETER Experiment Name: At_Drought_Soil_Dry_P Parameter: Post-Treatment Value: None
  misc_feature: MA Experiment 20001560 PARAMETER Experiment Name: At_Drought_Soil_Dry_P Parameter: Timepoint (day) Value: 14
  misc_feature: MA Experiment 20001560 PARAMETER Experiment Name: At_Drought_Soil_Dry_P Parameter: Treatment Value: Drought vs. No Drought
tcgacccacgcgtccgcttcgtcgtcgtcttcttcctttgctccgtcgtcgagatctcgtcgatcctcaaatctcaaatctcctgtaaccagatcgtctaattatccgatctgcgtttcgaatctcagatcgaagatgccggtggctgcttccgccatctattttctgaatctccgtggcgatgtactcataaatcgcacctaccgagatgacgtcgggggaaacatggtggatgcatttcgtacgcatataatgcagacgaaagagttagggaattgtcctgtgcgtcagattggtggctgctcctttgtttatatgcgaatcagcaatgtctacattgtcattgttgtcagtagcaatgctaacgttgcttgtggattcaaattcgttgttgaggctgttgctttgttcaaatcatactttggtggagcttttgatgaagacgctattagaaataactttgttctgatttatgaattgttggacgagattatggactttggctatccacaaaatctctcccctgaaattttgaaactttatatcactcaggaaggtgtacggtcaccattttcatcgaagccaaaggacaagcctgttccaaatgcaacattacaagttacgggtgctgttggttggagaagagagggccttgcttataaaaagaatgaggtgtttctggatattgtggaaagtgtaaaccttctgatgtcctctaaaggcaacgttcttcggtgtgatgtgaccgggaaagttttaatgaaatgtttcctttcgggaatgcctgatttgaagttggggttgaatgataaaattggtcttgagaaggaatcagaaatgaaatctcgcccagctaagagtggtaaaaccattgagcttgatgatgtcacatttcaccagtgtgtgaacctgaccagattcaactccgagaagactgttagttttgtaccaccggatggagagtttgaactgatgaagtatcgaataacagagggtgtaaatctgccattccgcgtgttaccaacaatcaaagaacttggtcgtacacgcatggaagtaaatgtcaaggtcaaaagtgtgtttggtgctaaaatgtttgcccttggggtcgtcgttaaaattccagtgccaaaacaaacagccaagaccaatttccaagtgacaactggtcgcgctaaatacaatccatcaatcgattgcttggtttggaagataagaaaattcccagggcaaacagagtccacgctaagtgcagaaattgagttgatctcaacaatgggagagaagaaatcttggacaagaccaccaatccaaatggaatttcaggtgccaatgttcacagcatctggtctgcgagttcgttttctcaaggtttgggagaagagcggttacaacacggttgagtgggttcgatacataacgaaagcgggatcttacgagatcagatgctgaacataaaacacagttcaggttcagtgacatcagacttaaaaagtttcatggcttctagtttttgttccttatgcaaaacaaacacaaaagagttaaatatgttttataccttgttttatgtttgtttgtcgattagagatatctgtgttaatatgatttcttatgtcttaatttggtattgaattctgtttttct

SEQ ID NO: 76505 - protein, 483 aa, Arabidopsis thaliana
  peptide (1)..(483): Ceres Seq. ID no. 7108212
  misc_feature (53)..(483): Pfam Name: Adaptor complexes medium subunit family Pfam Description: Adaptor complexes medium subunit family
  misc_feature (46)..(483): Homolog of NCBI NO: 15237475 NR Description: AP47/50p (gb|AAB88283.1); protein id: supported by cDNA: gi_14326519, supported by cDNA: gi_2271476 thaliana] >gi|2271477|gb|AAB88283.1| AP47/50p [Arabidopsis
  misc_feature (45)..(482): Homolog of NCBI NO: 28828638 NR Description: similar to Dictyostelium discoideum (Slime mold). coat assembly protein AP50 (Clathrin coat associated protein
  misc_feature (51)..(482): Homolog of NCBI NO: 1703328 NR Description: CLATHRIN COAT ASSEMBLY PROTEIN AP50 (CLATHRIN COAT
  misc_feature (53)..(483): Homolog of NCBI NO: 6753074 NR Description: adaptor-related protein complex AP-2, mu1;
  misc_feature (53)..(483): Homolog of NCBI NO: 40788880 NR Description: KIAA0109 [Homo sapiens]
  misc_feature (53)..(483): Homolog of NCBI NO: 22219429 NR Description: Chain M, Ap2 Clathrin Adaptor Core
  misc_feature (53)..(483): Homolog of NCBI NO: 7448828 NR Description: assembly protein 50 - human
  misc_feature (53)..(483): Homolog of NCBI NO: 38174423 NR Description: Unknown (protein for MGC:75936) [Silurana
  misc_feature (53)..(483): Homolog of NCBI NO: 28839636 NR Description: Unknown (protein for MGC:53076) [Xenopus laevis]
  misc_feature (51)..(482): Homolog of NCBI NO: 32419759 NR Description: hypothetical protein [Neurospora crassa]
STHASASSSSSSFAPSSRSRRSSNLKSPVTRSSNYPICVSNLRSKMPVAASAIYFLNLRGDVLINRTYRDDVGGNMVDAFRTHIMQTKELGNCPVRQIGGCSFVYMRISNVYIVIVVSSNANVACGFKFVVEAVALFKSYFGGAFDEDAIRNNFVLIYELLDEIMDFGYPQNLSPEILKLYITQEGVRSPFSSKPKDKPVPNATLQVTGAVGWRREGLAYKKNEVFLDIVESVNLLMSSKGNVLRCDVTGKVLMKCFLSGMPDLKLGLNDKIGLEKESEMKSRPAKSGKTIELDDVTFHQCVNLTRFNSEKTVSFVPPDGEFELMKYRITEGVNLPFRVLPTIKELGRTRMEVNVKVKSVFGAKMFALGVVVKIPVPKQTAKTNFQVTTGRAKYNPSIDCLVWKIRKFPGQTESTLSAEIELISTMGEKKSWTRPPIQMEFQVPMFTASGLRVRFLKVWEKSGYNTVEWVRYITKAGSYEIRC

SEQ ID NO: 76506 - protein, 438 aa, Arabidopsis thaliana
  peptide (1)..(438): Ceres Seq. ID no. 7108213
  misc_feature (8)..(438): Pfam Name: Adaptor complexes medium subunit family Pfam Description: Adaptor complexes medium subunit family
  misc_feature (1)..(438): Homolog of NCBI NO: 15237475 NR Description: AP47/50p (gb|AAB88283.1); protein id: supported by cDNA: gi_14326519, supported by cDNA: gi_2271476 thaliana] >gi|2271477|gb|AAB88283.1| AP47/50p [Arabidopsis
  misc_feature (1)..(437): Homolog of NCBI NO: 28828638 NR Description: similar to Dictyostelium discoideum (Slime mold). coat assembly protein AP50 (Clathrin coat associated protein
  misc_feature (6)..(437): Homolog of NCBI NO: 1703328 NR Description: CLATHRIN COAT ASSEMBLY PROTEIN AP50 (CLATHRIN COAT
  misc_feature (8)..(438): Homolog of NCBI NO: 6753074 NR Description: adaptor-related protein complex AP-2, mu1;
  misc_feature (8)..(438): Homolog of NCBI NO: 40788880 NR Description: KIAA0109 [Homo sapiens]
  misc_feature (8)..(438): Homolog of NCBI NO: 22219429 NR Description: Chain M, Ap2 Clathrin Adaptor Core
  misc_feature (8)..(438): Homolog of NCBI NO: 7448828 NR Description: assembly protein 50 - human
  misc_feature (8)..(438): Homolog of NCBI NO: 38174423 NR Description: Unknown (protein for MGC:75936) [Silurana
  misc_feature (8)..(438): Homolog of NCBI NO: 28839636 NR Description: Unknown (protein for MGC:53076) [Xenopus laevis]
  misc_feature (6)..(437): Homolog of NCBI NO: 32419759 NR Description: hypothetical protein [Neurospora crassa]
MPVAASAIYFLNLRGDVLINRTYRDDVGGNMVDAFRTHIMQTKELGNCPVRQIGGCSFVYMRISNVYIVIVVSSNANVACGFKFVVEAVALFKSYFGGAFDEDAIRNNFVLIYELLDEIMDFGYPQNLSPEILKLYITQEGVRSPFSSKPKDKPVPNATLQVTGAVGWRREGLAYKKNEVFLDIVESVNLLMSSKGNVLRCDVTGKVLMKCFLSGMPDLKLGLNDKIGLEKESEMKSRPAKSGKTIELDDVTFHQCVNLTRFNSEKTVSFVPPDGEFELMKYRITEGVNLPFRVLPTIKELGRTRMEVNVKVKSVFGAKMFALGVVVKIPVPKQTAKTNFQVTTGRAKYNPSIDCLVWKIRKFPGQTESTLSAEIELISTMGEKKSWTRPPIQMEFQVPMFTASGLRVRFLKVWEKSGYNTVEWVRYITKAGSYEIRC

SEQ ID NO: 76507 - protein, 408 aa, Arabidopsis thaliana
  peptide (1)..(408): Ceres Seq. ID no. 7108214
  misc_feature (1)..(408): Pfam Name: Adaptor complexes medium subunit family Pfam Description: Adaptor complexes medium subunit family
  misc_feature (1)..(408): Homolog of NCBI NO: 15237475 NR Description: AP47/50p (gb|AAB88283.1); protein id: supported by cDNA: gi_14326519, supported by cDNA: gi_2271476 thaliana] >gi|2271477|gb|AAB88283.1| AP47/50p [Arabidopsis
  misc_feature (1)..(407): Homolog of NCBI NO: 28828638 NR Description: similar to Dictyostelium discoideum (Slime mold). coat assembly protein AP50 (Clathrin coat associated protein
  misc_feature (1)..(407): Homolog of NCBI NO: 1703328 NR Description: CLATHRIN COAT ASSEMBLY PROTEIN AP50 (CLATHRIN COAT
  misc_feature (1)..(408): Homolog of NCBI NO: 6753074 NR Description: adaptor-related protein complex AP-2, mu1;
  misc_feature (1)..(408): Homolog of NCBI NO: 40788880 NR Description: KIAA0109 [Homo sapiens]
  misc_feature (1)..(408): Homolog of NCBI NO: 22219429 NR Description: Chain M, Ap2 Clathrin Adaptor Core
  misc_feature (1)..(408): Homolog of NCBI NO: 7448828 NR Description: assembly protein 50 - human
  misc_feature (1)..(408): Homolog of NCBI NO: 38174423 NR Description: Unknown (protein for MGC:75936) [Silurana
  misc_feature (1)..(408): Homolog of NCBI NO: 28839636 NR Description: Unknown (protein for MGC:53076) [Xenopus laevis]
  misc_feature (1)..(407): Homolog of NCBI NO: 32419759 NR Description: hypothetical protein [Neurospora crassa]
MVDAFRTHIMQTKELGNCPVRQIGGCSFVYMRISNVYIVIVVSSNANVACGFKFVVEAVALFKSYFGGAFDEDAIRNNFVLIYELLDEIMDFGYPQNLSPEILKLYITQEGVRSPFSSKPKDKPVPNATLQVTGAVGWRREGLAYKKNEVFLDIVESVNLLMSSKGNVLRCDVTGKVLMKCFLSGMPDLKLGLNDKIGLEKESEMKSRPAKSGKTIELDDVTFHQCVNLTRFNSEKTVSFVPPDGEFELMKYRITEGVNLPFRVLPTIKELGRTRMEVNVKVKSVFGAKMFALGVVVKIPVPKQTAKTNFQVTTGRAKYNPSIDCLVWKIRKFPGQTESTLSAEIELISTMGEKKSWTRPPIQMEFQVPMFTASGLRVRFLKVWEKSGYNTVEWVRYITKAGSYEIRC

SEQ ID NO: 76508 - DNA, 1075 bp, Arabidopsis thaliana
  misc_feature (1)..(1075): Ceres Seq. ID no. 7108279
  misc_feature: MA Experiment ID: 108434 Result: Down-regulated in Transcription
  misc_feature: MA Experiment 108434 PARAMETER Experiment Name: At_Root_Tips_cDNA_P Parameter: Tissue Value: Root Tips
  misc_feature: MA Experiment ID: 108488 Result: Down-regulated in Transcription
  misc_feature: MA Experiment ID: 108501 Result: Down-regulated in Transcription
  misc_feature: MA Experiment 108501 PARAMETER Experiment Name: At_ap2_floral_buds_cDNA_P Parameter: Plant Line Value: ap2 (Ler.)
  misc_feature: MA Experiment 108501 PARAMETER Experiment Name: At_ap2_floral_buds_cDNA_P Parameter: Tissue Value: Closed Flower
  misc_feature: MA Experiment ID: 108561 Result: Up-regulated in Transcription
  misc_feature: MA Experiment 108561 PARAMETER Experiment Name: At_100uM_ABA_cDNA_P Parameter: Timepoint (hr) Value: 6
  misc_feature: MA Experiment 108561 PARAMETER Experiment Name: At_100uM_ABA_cDNA_P Parameter: Tissue Value: Aerial
  misc_feature: MA Experiment 108561 PARAMETER Experiment Name: At_100uM_ABA_cDNA_P Parameter: Treatment Value: 100uM ABA vs. No Treatment
  misc_feature: MA Experiment ID: 108569 Result: Up-regulated in Transcription
  misc_feature: MA Experiment 108569 PARAMETER Experiment Name: At_0.001%_MeJA__cDNA_P Parameter: Timepoint (hr) Value: 6
  misc_feature: MA Experiment 108569 PARAMETER Experiment Name: At_0.001%_MeJA__cDNA_P Parameter: Tissue Value: Aerial
  misc_feature: MA Experiment 108569 PARAMETER Experiment Name: At_0.001%_MeJA__cDNA_P Parameter: Treatment Value: 0.001% MeJA vs. No Treatment
  misc_feature: MA Experiment ID: 108573 Result: Up-regulated in Transcription
  misc_feature: MA Experiment 108573 PARAMETER Experiment Name: At_Drought_cDNA_P Parameter: Timepoint (hr) Value: 6
  misc_feature: MA Experiment 108573 PARAMETER Experiment Name: At_Drought_cDNA_P Parameter: Tissue Value: Aerial
  misc_feature: MA Experiment 108573 PARAMETER Experiment Name: At_Drought_cDNA_P Parameter: Treatment Value: Drought vs. No Drought
  misc_feature: MA Experiment ID: 108585 Result: Up-regulated in Transcription
  misc_feature: MA Experiment 108585 PARAMETER Experiment Name: At_5mM_NaNP_cDNA_P Parameter: Timepoint (hr) Value: 6
  misc_feature: MA Experiment 108585 PARAMETER Experiment Name: At_5mM_NaNP_cDNA_P Parameter: Tissue Value: Aerial
  misc_feature: MA Experiment 108585 PARAMETER Experiment Name: At_5mM_NaNP_cDNA_P Parameter: Treatment Value: null
  misc_feature: MA Experiment ID: 108605 Result: Up-regulated in Transcription
  misc_feature: MA Experiment 108605 PARAMETER Experiment Name: At_100uM_ABA_cDNA_P Parameter: Timepoint (hr) Value: 6
  misc_feature: MA Experiment 108605 PARAMETER Experiment Name: At_100uM_ABA_cDNA_P Parameter: Tissue Value: Aerial
  misc_feature: MA Experiment 108605 PARAMETER Experiment Name: At_100uM_ABA_cDNA_P Parameter: Treatment Value: 100uM ABA vs. No Treatment
  misc_feature: MA Experiment ID: 108607 Result: Up-regulated in Transcription
  misc_feature: MA Experiment 108607 PARAMETER Experiment Name: At_100uM_ABA_cDNA_P Parameter: Timepoint (hr) Value: 4
  misc_feature: MA Experiment 108607 PARAMETER Experiment Name: At_100uM_ABA_cDNA_P Parameter: Tissue Value: Aerial
  misc_feature: MA Experiment 108607 PARAMETER Experiment Name: At_100uM_ABA_cDNA_P Parameter: Treatment Value: 100uM ABA vs. No Treatment
  misc_feature: MA Experiment ID: 108609 Result: Up-regulated in Transcription
  misc_feature: MA Experiment 108609 PARAMETER Experiment Name: At_100uM_ABA_cDNA_P Parameter: Timepoint (hr) Value: 24
  misc_feature: MA Experiment 108609 PARAMETER Experiment Name: At_100uM_ABA_cDNA_P Parameter: Tissue Value: Aerial
  misc_feature: MA Experiment 108609 PARAMETER Experiment Name: At_100uM_ABA_cDNA_P Parameter: Treatment Value: 100uM ABA vs. No Treatment
  misc_feature: MA Experiment ID: 108668 Result: Up-regulated in Transcription
  misc_feature: MA Experiment 108668 PARAMETER Experiment Name: At_2mM_SA_cDNA_P Parameter: Plant Line Value: WS
  misc_feature: MA Experiment 108668 PARAMETER Experiment Name: At_2mM_SA_cDNA_P Parameter: Timepoint (hr) Value: 6
  misc_feature: MA Experiment 108668 PARAMETER Experiment Name: At_2mM_SA_cDNA_P Parameter: Treatment Value: 2mM SA vs. No Treatment
  misc_feature: MA Experiment ID: 20000069 Result: Up-regulated in Transcription
  misc_feature: MA Experiment 20000069 PARAMETER Experiment Name: At_100uM_ABA_Mutants_cDNA_P Parameter: Plant Line Value: CS23
  misc_feature: MA Experiment 20000069 PARAMETER Experiment Name: At_100uM_ABA_Mutants_cDNA_P Parameter: Timepoint (hr) Value: 6
  misc_feature: MA Experiment 20000069 PARAMETER Experiment Name: At_100uM_ABA_Mutants_cDNA_P Parameter: Tissue Value: Aerial
  misc_feature: MA Experiment 20000069 PARAMETER Experiment Name: At_100uM_ABA_Mutants_cDNA_P Parameter: Treatment Value: 100uM ABA vs. No Treatment
  misc_feature: MA Experiment ID: 20000070 Result: Up-regulated in Transcription
  misc_feature: MA Experiment 20000070 PARAMETER Experiment Name: At_100uM_ABA_Mutants_cDNA_P Parameter: Plant Line Value: CS24
  misc_feature: MA Experiment 20000070 PARAMETER Experiment Name: At_100uM_ABA_Mutants_cDNA_P Parameter: Timepoint (hr) Value: 6
  misc_feature: MA Experiment 20000070 PARAMETER Experiment Name: At_100uM_ABA_Mutants_cDNA_P Parameter: Tissue Value: Aerial
  misc_feature: MA Experiment 20000070 PARAMETER Experiment Name: At_100uM_ABA_Mutants_cDNA_P Parameter: Treatment Value: 100uM ABA vs. No Treatment
  misc_feature: MA Experiment ID: 20000071 Result: Up-regulated in Transcription
  misc_feature: MA Experiment 20000071 PARAMETER Experiment Name: At_100uM_ABA_Mutants_cDNA_P Parameter: Plant Line Value: CS8104
  misc_feature: MA Experiment 20000071 PARAMETER Experiment Name: At_100uM_ABA_Mutants_cDNA_P Parameter: Timepoint (hr) Value: 6
  misc_feature: MA Experiment 20000071 PARAMETER Experiment Name: At_100uM_ABA_Mutants_cDNA_P Parameter: Tissue Value: Aerial
  misc_feature: MA Experiment 20000071 PARAMETER Experiment Name: At_100uM_ABA_Mutants_cDNA_P Parameter: Treatment Value: 100uM ABA vs. No Treatment
  misc_feature: MA Experiment ID: 20000072 Result: Up-regulated in Transcription
  misc_feature: MA Experiment 20000072 PARAMETER Experiment Name: At_100uM_ABA_Mutants_cDNA_P Parameter: Plant Line Value: CS8105
  misc_feature: MA Experiment 20000072 PARAMETER Experiment Name: At_100uM_ABA_Mutants_cDNA_P Parameter: Timepoint (hr) Value: 6
  misc_feature: MA Experiment 20000072 PARAMETER Experiment Name: At_100uM_ABA_Mutants_cDNA_P Parameter: Tissue Value: Aerial
  misc_feature: MA Experiment 20000072 PARAMETER Experiment Name: At_100uM_ABA_Mutants_cDNA_P Parameter: Treatment Value: 100uM ABA vs. No Treatment
  misc_feature: MA Experiment ID: 20000086 Result: Up-regulated in Transcription
  misc_feature: MA Experiment 20000086 PARAMETER Experiment Name: At_100uM_ABA_Mutants_cDNA_P Parameter: Plant Line Value: CS22
  misc_feature: MA Experiment 20000086 PARAMETER Experiment Name: At_100uM_ABA_Mutants_cDNA_P Parameter: Timepoint (hr) Value: 6
  misc_feature: MA Experiment 20000086 PARAMETER Experiment Name: At_100uM_ABA_Mutants_cDNA_P Parameter: Tissue Value: Aerial
  misc_feature: MA Experiment 20000086 PARAMETER Experiment Name: At_100uM_ABA_Mutants_cDNA_P Parameter: Treatment Value: 100uM ABA vs. No Treatment
  misc_feature: MA Experiment ID: 20000087 Result: Up-regulated in Transcription
  misc_feature: MA Experiment 20000087 PARAMETER Experiment Name: At_100uM_ABA_Mutants_cDNA_P Parameter: Plant Line Value: WS
  misc_feature: MA Experiment 20000087 PARAMETER Experiment Name: At_100uM_ABA_Mutants_cDNA_P Parameter: Timepoint (hr) Value: 6
  misc_feature: MA Experiment 20000087 PARAMETER Experiment Name: At_100uM_ABA_Mutants_cDNA_P Parameter: Tissue Value: Aerial
  misc_feature: MA Experiment 20000087 PARAMETER Experiment Name: At_100uM_ABA_Mutants_cDNA_P Parameter: Treatment Value: 100uM ABA vs. No Treatment
  misc_feature: MA Experiment ID: 20000117 Result: Up-regulated in Transcription
  misc_feature: MA Experiment 20000117 PARAMETER Experiment Name: At_100uM_ABA_Mutants_cDNA_P Parameter: Plant Line Value: Columbia
  misc_feature: MA Experiment 20000117 PARAMETER Experiment Name: At_100uM_ABA_Mutants_cDNA_P Parameter: Timepoint (hr) Value: 6
  misc_feature: MA Experiment 20000117 PARAMETER Experiment Name: At_100uM_ABA_Mutants_cDNA_P Parameter: Tissue Value: Aerial
  misc_feature: MA Experiment 20000117 PARAMETER Experiment Name: At_100uM_ABA_Mutants_cDNA_P Parameter: Treatment Value: 100uM ABA vs. No Treatment
  misc_feature: MA Experiment ID: 20000169 Result: Up-regulated in Transcription
  misc_feature: MA Experiment 20000169 PARAMETER Experiment Name: At_100uM_ABA_P Parameter: Age (day) Value: 14
  misc_feature: MA Experiment 20000169 PARAMETER Experiment Name: At_100uM_ABA_P Parameter: Organism Value: A. thaliana
  misc_feature: MA Experiment 20000169 PARAMETER Experiment Name: At_100uM_ABA_P Parameter: Plant Line Value: WS
  misc_feature: MA Experiment 20000169 PARAMETER Experiment Name: At_100uM_ABA_P Parameter: Timepoint (hr) Value: 6
  misc_feature: MA Experiment 20000169 PARAMETER Experiment Name: At_100uM_ABA_P Parameter: Tissue Value: Aerial
  misc_feature: MA Experiment 20000169 PARAMETER Experiment Name: At_100uM_ABA_P Parameter: Treatment Value: 100uM ABA vs. No Treatment
  misc_feature: MA Experiment ID: 20000179 Result: Up-regulated in Transcription
  misc_feature: MA Experiment 20000179 PARAMETER Experiment Name: At_Germinating_Seeds_P Parameter: Age (hr) Value: 6 vs. 0
  misc_feature: MA Experiment 20000179 PARAMETER Experiment Name: At_Germinating_Seeds_P Parameter: Tissue Value: Germinating Seeds
  misc_feature: MA Experiment ID: 20000180 Result: Up-regulated in Transcription
  misc_feature: MA Experiment 20000180 PARAMETER Experiment Name: At_Germinating_Seeds_P Parameter: Age (hr) Value: 24 vs. 0
  misc_feature: MA Experiment 20000180 PARAMETER Experiment Name: At_Germinating_Seeds_P Parameter: Tissue Value: Germinating Seeds
  misc_feature: MA Experiment ID: 20000182 Result: Up-regulated in Transcription
  misc_feature: MA Experiment 20000182 PARAMETER Experiment Name: At_2mM_SA_P Parameter: Age (day) Value: 14
  misc_feature: MA Experiment 20000182 PARAMETER Experiment Name: At_2mM_SA_P Parameter: Organism Value: A. thaliana
  misc_feature: MA Experiment 20000182 PARAMETER Experiment Name: At_2mM_SA_P Parameter: Plant Line Value: WS
  misc_feature: MA Experiment 20000182 PARAMETER Experiment Name: At_2mM_SA_P Parameter: Timepoint (hr) Value: 6
  misc_feature: MA Experiment 20000182 PARAMETER Experiment Name: At_2mM_SA_P Parameter: Tissue Value: Aerial
  misc_feature: MA Experiment 20000182 PARAMETER Experiment Name: At_2mM_SA_P Parameter: Treatment Value: 2mM SA vs. No Treatment
  misc_feature: MA Experiment ID: 20000185 Result: Up-regulated in Transcription
  misc_feature: MA Experiment 20000185 PARAMETER Experiment Name: At_Roots__P Parameter: Age (day) Value: 7 vs. 21
  misc_feature: MA Experiment 20000185 PARAMETER Experiment Name: At_Roots__P Parameter: Organism Value: A. thaliana
  misc_feature: MA Experiment 20000185 PARAMETER Experiment Name: At_Roots__P Parameter: Tissue Value: Roots vs. Whole Plant
  misc_feature: MA Experiment ID: 20000227 Result: Down-regulated in Transcription
  misc_feature: MA Experiment 20000227 PARAMETER Experiment Name: At_Root-Tips-vs-Tops_P Parameter: Tissue Value: Root Tips vs. Root Tops
  misc_feature: MA Experiment ID: 20000234 Result: Down-regulated in Transcription
  misc_feature: MA Experiment 20000234 PARAMETER Experiment Name: At_Siliques_P Parameter: Age (day) Value: 21
  misc_feature: MA Experiment 20000234 PARAMETER Experiment Name: At_Siliques_P Parameter: Organism Value: A. thaliana
  misc_feature: MA Experiment 20000234 PARAMETER Experiment Name: At_Siliques_P Parameter: Plant Line Value: WS
  misc_feature: MA Experiment 20000234 PARAMETER Experiment Name: At_Siliques_P Parameter: Tissue Value: Less Than 5mm Siliques vs. Whole Plant
  misc_feature: MA Experiment ID: 20000235 Result: Down-regulated in Transcription
  misc_feature: MA Experiment 20000235 PARAMETER Experiment Name: At_Siliques_P Parameter: Age (day) Value: 21
  misc_feature: MA Experiment 20000235 PARAMETER Experiment Name: At_Siliques_P Parameter: Organism Value: A. thaliana
  misc_feature: MA Experiment 20000235 PARAMETER Experiment Name: At_Siliques_P Parameter: Plant Line Value: WS
  misc_feature: MA Experiment 20000235 PARAMETER Experiment Name: At_Siliques_P Parameter: Tissue Value: 5-10mm Siliques vs. Whole Plant
  misc_feature: MA Experiment ID: 20000436 Result: Up-regulated in Transcription
  misc_feature: MA Experiment 20000436 PARAMETER Experiment Name: At_Drought_P Parameter: Age (day) Value: 7
  misc_feature: MA Experiment 20000436 PARAMETER Experiment Name: At_Drought_P Parameter: Organism Value: A. thaliana
  misc_feature: MA Experiment 20000436 PARAMETER Experiment Name: At_Drought_P Parameter: Plant Line Value: WS
  misc_feature: MA Experiment 20000436 PARAMETER Experiment Name: At_Drought_P Parameter: Timepoint (hr) Value: 12
  misc_feature: MA Experiment 20000436 PARAMETER Experiment Name: At_Drought_P Parameter: Tissue Value: Whole Plant
  misc_feature: MA Experiment 20000436 PARAMETER Experiment Name: At_Drought_P Parameter: Treatment Value: Drought vs. No Drought
  misc_feature: MA Experiment ID: 20000437 Result: Up-regulated in Transcription
  misc_feature: MA Experiment 20000437 PARAMETER Experiment Name: At_Drought_P Parameter: Age (day) Value: 8
  misc_feature: MA Experiment 20000437 PARAMETER Experiment Name: At_Drought_P Parameter: Organism Value: A. thaliana
  misc_feature: MA Experiment 20000437 PARAMETER Experiment Name: At_Drought_P Parameter: Plant Line Value: WS
  misc_feature: MA Experiment 20000437 PARAMETER Experiment Name: At_Drought_P Parameter: Timepoint (hr) Value: 24
  misc_feature: MA Experiment 20000437 PARAMETER Experiment Name: At_Drought_P Parameter: Tissue Value: Whole Plant
  misc_feature: MA Experiment 20000437 PARAMETER Experiment Name: At_Drought_P Parameter: Treatment Value: Drought vs. No Drought
  misc_feature: MA Experiment ID: 20000438 Result: Down-regulated in Transcription
  misc_feature: MA Experiment 20000438 PARAMETER Experiment Name: At_Shoots__P Parameter: Age (day) Value: 14
  misc_feature: MA Experiment 20000438 PARAMETER Experiment Name: At_Shoots__P Parameter: Tissue Value: Shoots vs. Whole Plant
  misc_feature: MA Experiment ID: 20000439 Result: Up-regulated in Transcription
  misc_feature: MA Experiment 20000439 PARAMETER Experiment Name: At_Roots__P Parameter: Age (day) Value: 14 vs. 21
  misc_feature: MA Experiment 20000439 PARAMETER Experiment Name: At_Roots__P Parameter: Organism Value: A. thaliana
  misc_feature: MA Experiment 20000439 PARAMETER Experiment Name: At_Roots__P Parameter: Tissue Value: Roots vs. Whole Plant
  misc_feature: MA Experiment ID: 20000453 Result: Up-regulated in Transcription
  misc_feature: MA Experiment 20000453 PARAMETER Experiment Name: At_100uM_ABA_P Parameter: Age (day) Value: 15
  misc_feature: MA Experiment 20000453 PARAMETER Experiment Name: At_100uM_ABA_P Parameter: Organism Value: A. thaliana
  misc_feature: MA Experiment 20000453 PARAMETER Experiment Name: At_100uM_ABA_P Parameter: Plant Line Value: WS
  misc_feature: MA Experiment 20000453 PARAMETER Experiment Name: At_100uM_ABA_P Parameter: Timepoint (hr) Value: 24
  misc_feature: MA Experiment 20000453 PARAMETER Experiment Name: At_100uM_ABA_P Parameter: Tissue Value: Aerial
  misc_feature: MA Experiment 20000453 PARAMETER Experiment Name: At_100uM_ABA_P Parameter: Treatment Value: 100uM ABA vs. No Treatment
  misc_feature: MA Experiment ID: 20000455 Result: Up-regulated in Transcription
  misc_feature: MA Experiment 20000455 PARAMETER Experiment Name: At_100uM_ABA_P Parameter: Age (day) Value: 16
  misc_feature: MA Experiment 20000455 PARAMETER Experiment Name: At_100uM_ABA_P Parameter: Organism Value: A. thaliana
  misc_feature: MA Experiment 20000455 PARAMETER Experiment Name: At_100uM_ABA_P Parameter: Plant Line Value: WS
  misc_feature: MA Experiment 20000455 PARAMETER Experiment Name: At_100uM_ABA_P Parameter: Timepoint (hr) Value: 48
  misc_feature: MA Experiment 20000455 PARAMETER Experiment Name: At_100uM_ABA_P Parameter: Tissue Value: Aerial
  misc_feature: MA Experiment 20000455 PARAMETER Experiment Name: At_100uM_ABA_P Parameter: Treatment Value: 100uM ABA vs. No Treatment
  misc_feature: MA Experiment ID: 20000527 Result: Down-regulated in Transcription
  misc_feature: MA Experiment 20000527 PARAMETER Experiment Name: At_10percent_PEG_P Parameter: Age (day) Value: 20
  misc_feature: MA Experiment 20000527 PARAMETER Experiment Name: At_10percent_PEG_P Parameter: Organism Value: A. thaliana
  misc_feature: MA Experiment 20000527 PARAMETER Experiment Name: At_10percent_PEG_P Parameter: Plant Line Value: WS
  misc_feature: MA Experiment 20000527 PARAMETER Experiment Name: At_10percent_PEG_P Parameter: Timepoint (day) Value: 20
  misc_feature: MA Experiment 20000527 PARAMETER Experiment Name: At_10percent_PEG_P Parameter: Tissue Value: Whole Plant
  misc_feature: MA Experiment 20000527 PARAMETER Experiment Name: At_10percent_PEG_P Parameter: Treatment Value: 10percent PEG vs. No Treatment
  misc_feature: MA Experiment ID: 20001556 Result: Up-regulated in Transcription
  misc_feature: MA Experiment 20001556 PARAMETER Experiment Name: At_Drought_Soil_Dry_P Parameter: Age (day) Value: 26
  misc_feature: MA Experiment 20001556 PARAMETER Experiment Name: At_Drought_Soil_Dry_P Parameter: Organism Value: A. thaliana
  misc_feature: MA Experiment 20001556 PARAMETER Experiment Name: At_Drought_Soil_Dry_P Parameter: Plant Line Value: WS
  misc_feature: MA Experiment 20001556 PARAMETER Experiment Name: At_Drought_Soil_Dry_P Parameter: Post Timepoint (hr) Value: None
  misc_feature: MA Experiment 20001556 PARAMETER Experiment Name: At_Drought_Soil_Dry_P Parameter: Post-Treatment Value: None
  misc_feature: MA Experiment 20001556 PARAMETER Experiment Name: At_Drought_Soil_Dry_P Parameter: Timepoint (day) Value: 12
  misc_feature: MA Experiment 20001556 PARAMETER Experiment Name: At_Drought_Soil_Dry_P Parameter: Treatment Value: Drought vs. No Drought
  misc_feature: MA Experiment ID: 20001557 Result: Up-regulated in Transcription
  misc_feature: MA Experiment 20001557 PARAMETER Experiment Name: At_Drought_Soil_Dry_P Parameter: Age (day) Value: 27
  misc_feature: MA Experiment 20001557 PARAMETER Experiment Name: At_Drought_Soil_Dry_P Parameter: Organism Value: A. thaliana
  misc_feature: MA Experiment 20001557 PARAMETER Experiment Name: At_Drought_Soil_Dry_P Parameter: Plant Line Value: WS
  misc_feature: MA Experiment 20001557 PARAMETER Experiment Name: At_Drought_Soil_Dry_P Parameter: Post Timepoint (hr) Value: 3
  misc_feature: MA Experiment 20001557 PARAMETER Experiment Name: At_Drought_Soil_Dry_P Parameter: Post-Treatment Value: Re-Water vs. No Drought
  misc_feature: MA Experiment 20001557 PARAMETER Experiment Name: At_Drought_Soil_Dry_P Parameter: Timepoint (day) Value: 13
  misc_feature: MA Experiment 20001557 PARAMETER Experiment Name: At_Drought_Soil_Dry_P Parameter: Treatment Value: Drought vs. No Drought
  misc_feature: MA Experiment ID: 20001559 Result: Up-regulated in Transcription
  misc_feature: MA Experiment 20001559 PARAMETER Experiment Name: At_Drought_Soil_Dry_P Parameter: Age (day) Value: 28
  misc_feature: MA Experiment 20001559 PARAMETER Experiment Name: At_Drought_Soil_Dry_P Parameter: Organism Value: A. thaliana
  misc_feature: MA Experiment 20001559 PARAMETER Experiment Name: At_Drought_Soil_Dry_P Parameter: Plant Line Value: WS
  misc_feature: MA Experiment 20001559 PARAMETER Experiment Name: At_Drought_Soil_Dry_P Parameter: Post Timepoint (hr) Value: 29
  misc_feature: MA Experiment 20001559 PARAMETER Experiment Name: At_Drought_Soil_Dry_P Parameter: Post-Treatment Value: Re-Water vs. No Drought
  misc_feature: MA Experiment 20001559 PARAMETER Experiment Name: At_Drought_Soil_Dry_P Parameter: Timepoint (day) Value: 14
  misc_feature: MA Experiment 20001559 PARAMETER Experiment Name: At_Drought_Soil_Dry_P Parameter: Treatment Value: Drought vs. No Drought
  misc_feature: MA Experiment ID: 20001904 Result: Up-regulated in Transcription
  misc_feature: MA Experiment 20001904 PARAMETER Experiment Name: At_Drought_Reproduction_P Parameter: Age (day) Value: 37
  misc_feature: MA Experiment 20001904 PARAMETER Experiment Name: At_Drought_Reproduction_P Parameter: Organism Value: A. thaliana
  misc_feature: MA Experiment 20001904 PARAMETER Experiment Name: At_Drought_Reproduction_P Parameter: Plant Line Value: WS
  misc_feature: MA Experiment 20001904 PARAMETER Experiment Name: At_Drought_Reproduction_P Parameter: Timepoint (day) Value: 7
  misc_feature: MA Experiment 20001904 PARAMETER Experiment Name: At_Drought_Reproduction_P Parameter: Tissue Value: Rosettes
  misc_feature: MA Experiment 20001904 PARAMETER Experiment Name: At_Drought_Reproduction_P Parameter: Treatment Value: Drought vs. No Drought
  misc_feature: MA Experiment ID: 20001905 Result: Up-regulated in Transcription
  misc_feature: MA Experiment 20001905 PARAMETER Experiment Name: At_Drought_Reproduction_P Parameter: Age (day) Value: 40
  misc_feature: MA Experiment 20001905 PARAMETER Experiment Name: At_Drought_Reproduction_P Parameter: Organism Value: A. thaliana
  misc_feature: MA Experiment 20001905 PARAMETER Experiment Name: At_Drought_Reproduction_P Parameter: Plant Line Value: WS
  misc_feature: MA Experiment 20001905 PARAMETER Experiment Name: At_Drought_Reproduction_P Parameter: Timepoint (day) Value: 10
  misc_feature: MA Experiment 20001905 PARAMETER Experiment Name: At_Drought_Reproduction_P Parameter: Tissue Value: Rosettes
  misc_feature: MA Experiment 20001905 PARAMETER Experiment Name: At_Drought_Reproduction_P Parameter: Treatment Value: Drought vs. No Drought
  misc_feature: MA Experiment ID: 20001911 Result: Up-regulated in Transcription
  misc_feature: MA Experiment 20001911 PARAMETER Experiment Name: At_Drought_Reproduction_P Parameter: Age (day) Value: 40
  misc_feature: MA Experiment 20001911 PARAMETER Experiment Name: At_Drought_Reproduction_P Parameter: Organism Value: A. thaliana
  misc_feature: MA Experiment 20001911 PARAMETER Experiment Name: At_Drought_Reproduction_P Parameter: Plant Line Value: WS
  misc_feature: MA Experiment 20001911 PARAMETER Experiment Name: At_Drought_Reproduction_P Parameter: Timepoint (day) Value: 10
  misc_feature: MA Experiment 20001911 PARAMETER Experiment Name: At_Drought_Reproduction_P Parameter: Tissue Value: Flowers
  misc_feature: MA Experiment 20001911 PARAMETER Experiment Name: At_Drought_Reproduction_P Parameter: Treatment Value: Drought vs. No Drought
gaattcggcacgagggtatgacgtcgttttgctccatgatttctcttcttcttcttctctctctttcatcgccggttttctccgatgacgcttctttccagaaacttccggtgccggaaactaggtcaggtcccgaagctttcgcttttgattccaccggtaaagggttctataccggtgtctccggtggtaaaatcctcaagtacctccccgagacgggttatgttgactttgcccagatcactgaatcctcgaactcttcatggtgcgatggtactattggaacggctttagccggacgctgtggtcgaccagcaggaatagcattcaacgagaaaacaggtgatctttacgtcgccgatgctccgttgggtcttcacgttatttctcccgccggtggtttggctacgaagatcaccgacagtgttgacggaaagcctttcaagtttcttgacggtcttgacgttgatcccactactggtgtcgtctacttcacttccttcagctcacgcttctccccaatccaagtgttgattgcattggggttaaaggacgcgaccggaaagctctacaaatacgacccatcgaccaaagtcgtgactgtactgatggaagggctaagtggttcagccgggtgtgcagtgagctcagatggttcgtttgtgctggttagtcagttcacaaaaagtaacatcaagaggtattggatcaagggacccaaagctggttcttctgaagacttcaccaactcagtctcaaaccctgacaatatcaaaagaattggctctactggaaacttttgggtcgcttcagtggtgaacaagatcatcgtacctacgaacccatcagcagtcaaagttaactctaatggtgaagttcttcaaaccattcctctcaaagataaatttggagacactttgctcagcgaagtcaacgaattcgagggcaatttatatataggaactctcaccggaccatttgctggaattcttaagatcgaaaagggttcttgtcctgccacttagatctcttatttgaatgcagccgatgtgttacaatcatatatatattattt

SEQ ID NO: 76509 - protein, 340 aa, Arabidopsis thaliana
  peptide (1)..(340): Ceres Seq. ID no. 7108280
  misc_feature (7)..(327): Pfam Name: Strictosidine synthase Pfam Description: Strictosidine synthase
  misc_feature (6)..(340): Homolog of NCBI NO: 1754983 NR Description: strictosidine synthase >gi|1754985|gb|AAB40594.1|
  misc_feature (6)..(340): Homolog of NCBI NO: 15221106 NR Description: strictosidine synthase family; protein id: supported by cDNA: gi_14334593, supported by cDNA: gi_17104522, by cDNA: gi_1754984 [Arabidopsis thaliana]
  misc_feature (6)..(332): Homolog of NCBI NO: 15221105 NR Description: strictosidine synthase family; protein id: supported by cDNA: 17206. [Arabidopsis thaliana]
  misc_feature (6)..(332): Homolog of NCBI NO: 21431845 NR Description: Strictosidine synthase 3 precursor (SS-3)
  misc_feature (6)..(332): Homolog of NCBI NO: 30698979 NR Description: strictosidine synthase family [Arabidopsis
  misc_feature (6)..(318): Homolog of NCBI NO: 1754987 NR Description: strictosidine synthase
  misc_feature (42)..(269): Homolog of NCBI NO: 11280567 NR Description: hypothetical protein F24I3.110 - Arabidopsis >gi|6911873|emb|CAB72173.1| putative protein [Arabidopsis
  misc_feature (42)..(269): Homolog of NCBI NO: 30694556 NR Description: strictosidine synthase-related [Arabidopsis
  misc_feature (277)..(329): Homolog of NCBI NO: 11280567 NR Description: hypothetical protein F24I3.110 - Arabidopsis >gi|6911873|emb|CAB72173.1| putative protein [Arabidopsis
  misc_feature (277)..(329): Homolog of NCBI NO: 30694556 NR Description: strictosidine synthase-related [Arabidopsis
IRHEGMTSFCSMISLLLLLSLSSPVFSDDASFQKLPVPETRSGPEAFAFDSTGKGFYTGVSGGKILKYLPETGYVDFAQITESSNSSWCDGTIGTALAGRCGRPAGIAFNEKTGDLYVADAPLGLHVISPAGGLATKITDSVDGKPFKFLDGLDVDPTTGVVYFTSFSSRFSPIQVLIALGLKDATGKLYKYDPSTKVVTVLMEGLSGSAGCAVSSDGSFVLVSQFTKSNIKRYWIKGPKAGSSEDFTNSVSNPDNIKRIGSTGNFWVASVVNKIIVPTNPSAVKVNSNGEVLQTIPLKDKFGDTLLSEVNEFEGNLYIGTLTGPFAGILKIEKGSCPAT

SEQ ID NO: 76510 - protein, 335 aa, Arabidopsis thaliana
  peptide (1)..(335): Ceres Seq. ID no. 7108281
  misc_feature (2)..(322): Pfam Name: Strictosidine synthase Pfam Description: Strictosidine synthase
  misc_feature (1)..(335): Homolog of NCBI NO: 1754983 NR Description: strictosidine synthase >gi|1754985|gb|AAB40594.1|
  misc_feature (1)..(335): Homolog of NCBI NO: 15221106 NR Description: strictosidine synthase family; protein id: supported by cDNA: gi_14334593, supported by cDNA: gi_17104522, by cDNA: gi_1754984 [Arabidopsis thaliana]
  misc_feature (1)..(327): Homolog of NCBI NO: 15221105 NR Description: strictosidine synthase family; protein id: supported by cDNA: 17206. [Arabidopsis thaliana]
  misc_feature (1)..(327): Homolog of NCBI NO: 21431845 NR Description: Strictosidine synthase 3 precursor (SS-3)
  misc_feature (1)..(327): Homolog of NCBI NO: 30698979 NR Description: strictosidine synthase family [Arabidopsis
  misc_feature (1)..(313): Homolog of NCBI NO: 1754987 NR Description: strictosidine synthase
  misc_feature (37)..(264): Homolog of NCBI NO: 11280567 NR Description: hypothetical protein F24I3.110 - Arabidopsis >gi|6911873|emb|CAB72173.1| putative protein [Arabidopsis
  misc_feature (37)..(264): Homolog of NCBI NO: 30694556 NR Description: strictosidine synthase-related [Arabidopsis
  misc_feature (272)..(324): Homolog of NCBI NO: 11280567 NR Description: hypothetical protein F24I3.110 - Arabidopsis >gi|6911873|emb|CAB72173.1| putative protein [Arabidopsis
  misc_feature (272)..(324): Homolog of NCBI NO: 30694556 NR Description: strictosidine synthase-related [Arabidopsis
MTSFCSMISLLLLLSLSSPVFSDDASFQKLPVPETRSGPEAFAFDSTGKGFYTGVSGGKILKYLPETGYVDFAQITESSNSSWCDGTIGTALAGRCGRPAGIAFNEKTGDLYVADAPLGLHVISPAGGLATKITDSVDGKPFKFLDGLDVDPTTGVVYFTSFSSRFSPIQVLIALGLKDATGKLYKYDPSTKVVTVLMEGLSGSAGCAVSSDGSFVLVSQFTKSNIKRYWIKGPKAGSSEDFTNSVSNPDNIKRIGSTGNFWVASVVNKIIVPTNPSAVKVNSNGEVLQTIPLKDKFGDTLLSEVNEFEGNLYIGTLTGPFAGILKIEKGSCPAT

SEQ ID NO: 76511 - protein, 329 aa, Arabidopsis thaliana
  peptide (1)..(329): Ceres Seq. ID no. 7108282
  misc_feature (1)..(316): Pfam Name: Strictosidine synthase Pfam Description: Strictosidine synthase
  misc_feature (1)..(329): Homolog of NCBI NO: 1754983 NR Description: strictosidine synthase >gi|1754985|gb|AAB40594.1|
  misc_feature (1)..(329): Homolog of NCBI NO: 15221106 NR Description: strictosidine synthase family; protein id: supported by cDNA: gi_14334593, supported by cDNA: gi_17104522, by cDNA: gi_1754984 [Arabidopsis thaliana]
  misc_feature (1)..(321): Homolog of NCBI NO: 15221105 NR Description: strictosidine synthase family; protein id: supported by cDNA: 17206. [Arabidopsis thaliana]
  misc_feature (1)..(321): Homolog of NCBI NO: 21431845 NR Description: Strictosidine synthase 3 precursor (SS-3)
  misc_feature (1)..(321): Homolog of NCBI NO: 30698979 NR Description: strictosidine synthase family [Arabidopsis
  misc_feature (1)..(307): Homolog of NCBI NO: 1754987 NR Description: strictosidine synthase
  misc_feature (31)..(258): Homolog of NCBI NO: 11280567 NR Description: hypothetical protein F24I3.110 - Arabidopsis >gi|6911873|emb|CAB72173.1| putative protein [Arabidopsis
  misc_feature (31)..(258): Homolog of NCBI NO: 30694556 NR Description: strictosidine synthase-related [Arabidopsis
  misc_feature (266)..(318): Homolog of NCBI NO: 11280567 NR Description: hypothetical protein F24I3.110 - Arabidopsis >gi|6911873|emb|CAB72173.1| putative protein [Arabidopsis
  misc_feature (266)..(318): Homolog of NCBI NO: 30694556 NR Description: strictosidine synthase-related [Arabidopsis
MISLLLLLSLSSPVFSDDASFQKLPVPETRSGPEAFAFDSTGKGFYTGVSGGKILKYLPETGYVDFAQITESSNSSWCDGTIGTALAGRCGRPAGIAFNEKTGDLYVADAPLGLHVISPAGGLATKITDSVDGKPFKFLDGLDVDPTTGVVYFTSFSSRFSPIQVLIALGLKDATGKLYKYDPSTKVVTVLMEGLSGSAGCAVSSDGSFVLVSQFTKSNIKRYWIKGPKAGSSEDFTNSVSNPDNIKRIGSTGNFWVASVVNKIIVPTNPSAVKVNSNGEVLQTIPLKDKFGDTLLSEVNEFEGNLYIGTLTGPFAGILKIEKGSCPAT

SEQ ID NO: 76512 - DNA, 1762 bp, Arabidopsis thaliana
  misc_feature (1)..(1762): Ceres Seq. ID no. 7108294
  misc_feature: MA Experiment ID: 108435 Result: Down-regulated in Transcription
  misc_feature: MA Experiment 108435 PARAMETER Experiment Name: At_stm_Mutants_cDNA_P Parameter: Plant Line Value: wt Landsburg vs stm
  misc_feature: MA Experiment 108435 PARAMETER Experiment Name: At_stm_Mutants_cDNA_P Parameter: Tissue Value: Shoot Apical Meristem Region
  misc_feature: MA Experiment ID: 108461 Result: Up-regulated in Transcription
  misc_feature: MA Experiment 108461 PARAMETER Experiment Name: At_Germinating_Seeds_cDNA_P Parameter: Age (day) Value: 1 vs. 0
  misc_feature: MA Experiment 108461 PARAMETER Experiment Name: At_Germinating_Seeds_cDNA_P Parameter: Tissue Value: Germinating Seeds
  misc_feature: MA Experiment ID: 108462 Result: Up-regulated in Transcription
  misc_feature: MA Experiment 108462 PARAMETER Experiment Name: At_Germinating_Seeds_cDNA_P Parameter: Age (day) Value: 2 vs. 0
  misc_feature: MA Experiment 108462 PARAMETER Experiment Name: At_Germinating_Seeds_cDNA_P Parameter: Tissue Value: Germinating Seeds
  misc_feature: MA Experiment ID: 108463 Result: Up-regulated in Transcription
  misc_feature: MA Experiment 108463 PARAMETER Experiment Name: At_Germinating_Seeds_cDNA_P Parameter: Age (day) Value: 3 vs. 0
  misc_feature: MA Experiment 108463 PARAMETER Experiment Name: At_Germinating_Seeds_cDNA_P Parameter: Tissue Value: Germinating Seeds
  misc_feature: MA Experiment ID: 108464 Result: Up-regulated in Transcription
  misc_feature: MA Experiment 108464 PARAMETER Experiment Name: At_Germinating_Seeds_cDNA_P Parameter: Age (day) Value: 4 vs. 0
  misc_feature: MA Experiment 108464 PARAMETER Experiment Name: At_Germinating_Seeds_cDNA_P Parameter: Tissue Value: Germinating Seeds
  misc_feature: MA Experiment ID: 108595 Result: Down-regulated in Transcription
  misc_feature: MA Experiment 108595 PARAMETER Experiment Name: At_Ler-pi_Ovule_cDNA_P Parameter: Plant Line Value: null
  misc_feature: MA Experiment ID: 20000087 Result: Down-regulated in Transcription
  misc_feature: MA Experiment 20000087 PARAMETER Experiment Name: At_100uM_ABA_Mutants_cDNA_P Parameter: Plant Line Value: WS
  misc_feature: MA Experiment 20000087 PARAMETER Experiment Name: At_100uM_ABA_Mutants_cDNA_P Parameter: Timepoint (hr) Value: 6
  misc_feature: MA Experiment 20000087 PARAMETER Experiment Name: At_100uM_ABA_Mutants_cDNA_P Parameter: Tissue Value: Aerial
  misc_feature: MA Experiment 20000087 PARAMETER Experiment Name: At_100uM_ABA_Mutants_cDNA_P Parameter: Treatment Value: 100uM ABA vs. No Treatment
  misc_feature: MA Experiment ID: 20000179 Result: Up-regulated in Transcription
  misc_feature: MA Experiment 20000179 PARAMETER Experiment Name: At_Germinating_Seeds_P Parameter: Age (hr) Value: 6 vs. 0
  misc_feature: MA Experiment 20000179 PARAMETER Experiment Name: At_Germinating_Seeds_P Parameter: Tissue Value: Germinating Seeds
  misc_feature: MA Experiment ID: 20000180 Result: Up-regulated in Transcription
  misc_feature: MA Experiment 20000180 PARAMETER Experiment Name: At_Germinating_Seeds_P Parameter: Age (hr) Value: 24 vs. 0
  misc_feature: MA Experiment 20000180 PARAMETER Experiment Name: At_Germinating_Seeds_P Parameter: Tissue Value: Germinating Seeds
  misc_feature: MA Experiment ID: 20000185 Result: Down-regulated in Transcription
  misc_feature: MA Experiment 20000185 PARAMETER Experiment Name: At_Roots__P Parameter: Age (day) Value: 7 vs. 21
  misc_feature: MA Experiment 20000185 PARAMETER Experiment Name: At_Roots__P Parameter: Organism Value: A. thaliana
  misc_feature: MA Experiment 20000185 PARAMETER Experiment Name: At_Roots__P Parameter: Tissue Value: Roots vs. Whole Plant
  misc_feature: MA Experiment ID: 20000439 Result: Down-regulated in Transcription
  misc_feature: MA Experiment 20000439 PARAMETER Experiment Name: At_Roots__P Parameter: Age (day) Value: 14 vs. 21
  misc_feature: MA Experiment 20000439 PARAMETER Experiment Name: At_Roots__P Parameter: Organism Value: A. thaliana
  misc_feature: MA Experiment 20000439 PARAMETER Experiment Name: At_Roots__P Parameter: Tissue Value: Roots vs. Whole Plant
  misc_feature: MA Experiment ID: 20000451 Result: Up-regulated in Transcription
  misc_feature: MA Experiment 20000451 PARAMETER Experiment Name: At_CS6879_Shoots-Roots_P Parameter: Age (day) Value: 14
  misc_feature: MA Experiment 20000451 PARAMETER Experiment Name: At_CS6879_Shoots-Roots_P Parameter: Organism Value: A. thaliana
  misc_feature: MA Experiment 20000451 PARAMETER Experiment Name: At_CS6879_Shoots-Roots_P Parameter: Plant Line Value: CS6879 vs. WS
  misc_feature: MA Experiment 20000451 PARAMETER Experiment Name: At_CS6879_Shoots-Roots_P Parameter: Tissue Value: Roots
  misc_feature: MA Experiment ID: 20000495 Result: Down-regulated in Transcription
  misc_feature: MA Experiment 20000495 PARAMETER Experiment Name: At_Guard_Cells_P Parameter: Harvest Date Value: 8/2/2002
  misc_feature: MA Experiment 20000495 PARAMETER Experiment Name: At_Guard_Cells_P Parameter: Organism Value: A. thaliana
  misc_feature: MA Experiment 20000495 PARAMETER Experiment Name: At_Guard_Cells_P Parameter: Tissue Value: Guard Cells vs. Leaves
  misc_feature: MA Experiment ID: 20000794 Result: Down-regulated in Transcription
  misc_feature: MA Experiment 20000794 PARAMETER Experiment Name: At_Petals_P Parameter: Age (day) Value: 23-25 days
  misc_feature: MA Experiment 20000794 PARAMETER Experiment Name: At_Petals_P Parameter: Plant Line Value: WS
  misc_feature: MA Experiment 20000794 PARAMETER Experiment Name: At_Petals_P Parameter: Tissue Value: Petals vs. Whole plant
  misc_feature: MA Experiment ID: 20001248 Result: Down-regulated in Transcription
  misc_feature: MA Experiment 20001248 PARAMETER Experiment Name: At_Far-red-induction_P Parameter: Age (day) Value: 7
  misc_feature: MA Experiment 20001248 PARAMETER Experiment Name: At_Far-red-induction_P Parameter: Light Value: Far-red vs. White
  misc_feature: MA Experiment 20001248 PARAMETER Experiment Name: At_Far-red-induction_P Parameter: Organism Value: A. thaliana
  misc_feature: MA Experiment 20001248 PARAMETER Experiment Name: At_Far-red-induction_P Parameter: Plant Line Value: Columbia
  misc_feature: MA Experiment 20001248 PARAMETER Experiment Name: At_Far-red-induction_P Parameter: Timepoint (hr) Value: 4
  misc_feature: MA Experiment 20001248 PARAMETER Experiment Name: At_Far-red-induction_P Parameter: Tissue Value: Whole Plant
  misc_feature: MA Experiment ID: 20001450 Result: Down-regulated in Transcription
  misc_feature: MA Experiment 20001450 PARAMETER Experiment Name: At_Far-red-induction_P Parameter: Age (day) Value: 7
  misc_feature: MA Experiment 20001450 PARAMETER Experiment Name: At_Far-red-induction_P Parameter: Light Value: Far-red vs. White
  misc_feature: MA Experiment 20001450 PARAMETER Experiment Name: At_Far-red-induction_P Parameter: Organism Value: A. thaliana
  misc_feature: MA Experiment 20001450 PARAMETER Experiment Name: At_Far-red-induction_P Parameter: Plant Line Value: Columbia
  misc_feature: MA Experiment 20001450 PARAMETER Experiment Name: At_Far-red-induction_P Parameter: Timepoint (hr) Value: 8
  misc_feature: MA Experiment 20001450 PARAMETER Experiment Name: At_Far-red-induction_P Parameter: Tissue Value: Whole Plant
  misc_feature: MA Experiment ID: 20001451 Result: Down-regulated in Transcription
  misc_feature: MA Experiment 20001451 PARAMETER Experiment Name: At_Far-red-induction_P Parameter: Age (day) Value: 7
  misc_feature: MA Experiment 20001451 PARAMETER Experiment Name: At_Far-red-induction_P Parameter: Light Value: Far-red vs. White
  misc_feature: MA Experiment 20001451 PARAMETER Experiment Name: At_Far-red-induction_P Parameter: Organism Value: A. thaliana
  misc_feature: MA Experiment 20001451 PARAMETER Experiment Name: At_Far-red-induction_P Parameter: Plant Line Value: Columbia
  misc_feature: MA Experiment 20001451 PARAMETER Experiment Name: At_Far-red-induction_P Parameter: Timepoint (hr) Value: 24
  misc_feature: MA Experiment 20001451 PARAMETER Experiment Name: At_Far-red-induction_P Parameter: Tissue Value: Whole Plant
caaaactctcactccaaaactctcaattttgccttcctttgatcgaatactacaatggcgtctgtatctgcaattggagttctcaaggtacctcctgcttcgacttccaattccaccggaaaagccacggaggcggttcccacgaggactctttctttctcctcctctgttacttcatccgacgacaagatttcactcaaatccaccgtctcccgtctttgtaaatctgttgttcgcaggaatccgatcatcgtctctcccaaagccgtctcagattctcaaaactctcaaacttgtctcgatcctgatgctagcagcagtgttttggggataatcttaggaggtggagctggaactcgtctttatccacttacgaagaagagagcgaaaccagctgtgcctcttggtgctaactataggcttattgatattcctgtgagcaactgtttgaatagcaacatatccaagatctatgttcttactcagttcaattccgcgtctttgaatcgtcatctttcacgagcttatgctagtaacatgggaggttataagaatgaaggattcgttgaagttctcgctgctcaacagagtcctgaaaaccccaactggttccaggggacagctgatgccgtcacggattacttgtggttgttcgaggagcataatgtcttggagtatctcattcttgctggggatcatttgtatagaatggactatgagaagtttattcaagcacatagggagactgatgctgatatcacagtagctgcattaccaatggacgagcaacgagccactgcttttgggctgatgaagattgatgaggaaggacgtattattgaattttctgaaaaaccaaaaggggagcacctaaaggccatgaaggttgacacaacaattctaggtcttgatgatcagagagccaaggagatgcctttcattgctagtatgggtatttatgttgtaagcagagatgtaatgctagacttactacggaatcagtttcctggagctaatgactttggaagtgaagtcattcccggtgccacttcccttggactgagggtgcaagcttacctatatgatggttactgggaagacattggtactatagaggcattttataacgctaatcttggaatcaccaagaaaccagttcctgattttagtttctatgaccgttctgctccgatctacacacagccgcgttatttaccaccgtctaagatgcttgatgctgatgttactgacagtgtcatcggagagggctgtgttatcaagaactgcaaaattcatcactctgtggttggactccgttcctgcatatcagaaggtgctattattgaagattcgttattaatgggagctgattattacgagactgctacggaaaagagcctcttagccgcgaaaggaagtgtacccataggtattgggaaaaactcgcacatcaaaagggccatcatcgacaaaaactcacgtataggtgacaatgtcaagatcataaacagcgacaacgtgcaagaggcagcgagagagactgatggatatttcataaagagcggaattgtaacggttatcaaagacgccttaatcccaaccggcactgtcatctgaagtacacataattctcctttctttatttcttcatctttctaatgccctatcaataagttttctttatggctttttaagccccaataaatctactactagttgtaatgctgcttacgaaagagattacgaaatcatgttttcactt

SEQ ID NO: 76513 - protein, 520 aa, Arabidopsis thaliana
  peptide (1)..(520): Ceres Seq. ID no. 7108295
  misc_feature (91)..(366): Pfam Name: Nucleotidyl transferase Pfam Description: Nucleotidyl transferase
  misc_feature (1)..(520): Homolog of NCBI NO: 1575754 NR Description: ADP glucose pyrophosphorylase small subunit
  misc_feature (1)..(520): Homolog of NCBI NO: 15238933 NR Description: ADPG pyrophosphorylase small subunit (gb protein id: At5g48300.1, supported by cDNA: gi_15146247,
  misc_feature (1)..(520): Homolog of NCBI NO: 17865468 NR Description: Glucose-1-phosphate adenylyltransferase small
  misc_feature (1)..(520): Homolog of NCBI NO: 13487787 NR Description: ADP-glucose pyrophosphorylase small subunit
  misc_feature (1)..(520): Homolog of NCBI NO: 1237080 NR Description: ADP-glucose pyrophosphorylase [Pisum sativum]
  misc_feature (5)..(520): Homolog of NCBI NO: 1071859 NR Description: glucose-1-phosphate adenylyltransferase (EC
  misc_feature (4)..(520): Homolog of NCBI NO: 1707944 NR Description: Glucose-1-phosphate adenylyltransferase small
  misc_feature (5)..(520): Homolog of NCBI NO: 232164 NR Description: Glucose-1-phosphate adenylyltransferase small
  misc_feature (1)..(520): Homolog of NCBI NO: 29421116 NR Description: ADP-glucose pyrophosphorylase small subunit
  misc_feature (5)..(520): Homolog of NCBI NO: 17865461 NR Description: Glucose-1-phosphate adenylyltransferase small
MASVSAIGVLKVPPASTSNSTGKATEAVPTRTLSFSSSVTSSDDKISLKSTVSRLCKSVVRRNPIIVSPKAVSDSQNSQTCLDPDASSSVLGIILGGGAGTRLYPLTKKRAKPAVPLGANYRLIDIPVSNCLNSNISKIYVLTQFNSASLNRHLSRAYASNMGGYKNEGFVEVLAAQQSPENPNWFQGTADAVTDYLWLFEEHNVLEYLILAGDHLYRMDYEKFIQAHRETDADITVAALPMDEQRATAFGLMKIDEEGRIIEFSEKPKGEHLKAMKVDTTILGLDDQRAKEMPFIASMGIYVVSRDVMLDLLRNQFPGANDFGSEVIPGATSLGLRVQAYLYDGYWEDIGTIEAFYNANLGITKKPVPDFSFYDRSAPIYTQPRYLPPSKMLDADVTDSVIGEGCVIKNCKIHHSVVGLRSCISEGAIIEDSLLMGADYYETATEKSLLAAKGSVPIGIGKNSHIKRAIIDKNSRIGDNVKIINSDNVQEAARETDGYFIKSGIVTVIKDALIPTGTVI

SEQ ID NO: 76514 - protein, 359 aa, Arabidopsis thaliana
  peptide (1)..(359): Ceres Seq. ID no. 7108296
  misc_feature (1)..(205): Pfam Name: Nucleotidyl transferase Pfam Description: Nucleotidyl transferase
  misc_feature (1)..(359): Homolog of NCBI NO: 1575754 NR Description: ADP glucose pyrophosphorylase small subunit
  misc_feature (1)..(359): Homolog of NCBI NO: 15238933 NR Description: ADPG pyrophosphorylase small subunit (gb protein id: At5g48300.1, supported by cDNA: gi_15146247,
  misc_feature (1)..(359): Homolog of NCBI NO: 17865468 NR Description: Glucose-1-phosphate adenylyltransferase small
  misc_feature (1)..(359): Homolog of NCBI NO: 13487787 NR Description: ADP-glucose pyrophosphorylase small subunit
  misc_feature (1)..(359): Homolog of NCBI NO: 1237080 NR Description: ADP-glucose pyrophosphorylase [Pisum sativum]
  misc_feature (1)..(359): Homolog of NCBI NO: 1071859 NR Description: glucose-1-phosphate adenylyltransferase (EC
  misc_feature (1)..(359): Homolog of NCBI NO: 1707944 NR Description: Glucose-1-phosphate adenylyltransferase small
  misc_feature (1)..(359): Homolog of NCBI NO: 232164 NR Description: Glucose-1-phosphate adenylyltransferase small
  misc_feature (1)..(359): Homolog of NCBI NO: 29421116 NR Description: ADP-glucose pyrophosphorylase small subunit
  misc_feature (1)..(359): Homolog of NCBI NO: 17865461 NR Description: Glucose-1-phosphate adenylyltransferase small
MGGYKNEGFVEVLAAQQSPENPNWFQGTADAVTDYLWLFEEHNVLEYLILAGDHLYRMDYEKFIQAHRETDADITVAALPMDEQRATAFGLMKIDEEGRIIEFSEKPKGEHLKAMKVDTTILGLDDQRAKEMPFIASMGIYVVSRDVMLDLLRNQFPGANDFGSEVIPGATSLGLRVQAYLYDGYWEDIGTIEAFYNANLGITKKPVPDFSFYDRSAPIYTQPRYLPPSKMLDADVTDSVIGEGCVIKNCKIHHSVVGLRSCISEGAIIEDSLLMGADYYETATEKSLLAAKGSVPIGIGKNSHIKRAIIDKNSRIGDNVKIINSDNVQEAARETDGYFIKSGIVTVIKDALIPTGTVI

SEQ ID NO: 76515 - protein, 302 aa, Arabidopsis thaliana
  peptide (1)..(302): Ceres Seq. ID no. 7108297
  misc_feature (1)..(148): Pfam Name: Nucleotidyl transferase Pfam Description: Nucleotidyl transferase
  misc_feature (1)..(302): Homolog of NCBI NO: 1575754 NR Description: ADP glucose pyrophosphorylase small subunit
  misc_feature (1)..(302): Homolog of NCBI NO: 15238933 NR Description: ADPG pyrophosphorylase small subunit (gb protein id: At5g48300.1, supported by cDNA: gi_15146247,
  misc_feature (1)..(302): Homolog of NCBI NO: 17865468 NR Description: Glucose-1-phosphate adenylyltransferase small
  misc_feature (1)..(302): Homolog of NCBI NO: 13487787 NR Description: ADP-glucose pyrophosphorylase small subunit
  misc_feature (1)..(302): Homolog of NCBI NO: 1237080 NR Description: ADP-glucose pyrophosphorylase [Pisum sativum]
  misc_feature (1)..(302): Homolog of NCBI NO: 1071859 NR Description: glucose-1-phosphate adenylyltransferase (EC
  misc_feature (1)..(302): Homolog of NCBI NO: 1707944 NR Description: Glucose-1-phosphate adenylyltransferase small
  misc_feature (1)..(302): Homolog of NCBI NO: 232164 NR Description: Glucose-1-phosphate adenylyltransferase small
  misc_feature (1)..(302): Homolog of NCBI NO: 29421116 NR Description: ADP-glucose pyrophosphorylase small subunit
  misc_feature (1)..(302): Homolog of NCBI NO: 17865461 NR Description: Glucose-1-phosphate adenylyltransferase small
MDYEKFIQAHRETDADITVAALPMDEQRATAFGLMKIDEEGRIIEFSEKPKGEHLKAMKVDTTILGLDDQRAKEMPFIASMGIYVVSRDVMLDLLRNQFPGANDFGSEVIPGATSLGLRVQAYLYDGYWEDIGTIEAFYNANLGITKKPVPDFSFYDRSAPIYTQPRYLPPSKMLDADVTDSVIGEGCVIKNCKIHHSVVGLRSCISEGAIIEDSLLMGADYYETATEKSLLAAKGSVPIGIGKNSHIKRAIIDKNSRIGDNVKIINSDNVQEAARETDGYFIKSGIVTVIKDALIPTGTVI

SEQ ID NO: 76516 - DNA, 1249 bp, Arabidopsis thaliana
  misc_feature (1)..(1249): Ceres Seq. ID no. 7108298
  misc_feature: MA Experiment ID: 108433 Result: Down-regulated in Transcription
  misc_feature: MA Experiment 108433 PARAMETER Experiment Name: At_rhl_Mutant2_cDNA_P Parameter: Age (day) Value: 7
  misc_feature: MA Experiment 108433 PARAMETER Experiment Name: At_rhl_Mutant2_cDNA_P Parameter: Organism Value: A. thaliana
  misc_feature: MA Experiment 108433 PARAMETER Experiment Name: At_rhl_Mutant2_cDNA_P Parameter: Plant Line Value: rhl Mutant vs. wt landsburg
  misc_feature: MA Experiment 108433 PARAMETER Experiment Name: At_rhl_Mutant2_cDNA_P Parameter: Tissue Value: Roots
  misc_feature: MA Experiment ID: 108434 Result: Up-regulated in Transcription
  misc_feature: MA Experiment 108434 PARAMETER Experiment Name: At_Root_Tips_cDNA_P Parameter: Tissue Value: Root Tips
  misc_feature: MA Experiment ID: 108569 Result: Up-regulated in Transcription
  misc_feature: MA Experiment 108569 PARAMETER Experiment Name: At_0.001%_MeJA__cDNA_P Parameter: Timepoint (hr) Value: 6
  misc_feature: MA Experiment 108569 PARAMETER Experiment Name: At_0.001%_MeJA__cDNA_P Parameter: Tissue Value: Aerial
  misc_feature: MA Experiment 108569 PARAMETER Experiment Name: At_0.001%_MeJA__cDNA_P Parameter: Treatment Value: 0.001% MeJA vs. No Treatment
  misc_feature: MA Experiment ID: 108595 Result: Down-regulated in Transcription
  misc_feature: MA Experiment 108595 PARAMETER Experiment Name: At_Ler-pi_Ovule_cDNA_P Parameter: Plant Line Value: null
  misc_feature: MA Experiment ID: 20000224 Result: Down-regulated in Transcription
  misc_feature: MA Experiment ID: 20000227 Result: Up-regulated in Transcription
  misc_feature: MA Experiment 20000227 PARAMETER Experiment Name: At_Root-Tips-vs-Tops_P Parameter: Tissue Value: Root Tips vs. Root Tops
  misc_feature: MA Experiment ID: 20000437 Result: Down-regulated in Transcription
  misc_feature: MA Experiment 20000437 PARAMETER Experiment Name: At_Drought_P Parameter: Age (day) Value: 8
  misc_feature: MA Experiment 20000437 PARAMETER Experiment Name: At_Drought_P Parameter: Organism Value: A. thaliana
  misc_feature: MA Experiment 20000437 PARAMETER Experiment Name: At_Drought_P Parameter: Plant Line Value: WS
  misc_feature: MA Experiment 20000437 PARAMETER Experiment Name: At_Drought_P Parameter: Timepoint (hr) Value: 24
  misc_feature: MA Experiment 20000437 PARAMETER Experiment Name: At_Drought_P Parameter: Tissue Value: Whole Plant
  misc_feature: MA Experiment 20000437 PARAMETER Experiment Name: At_Drought_P Parameter: Treatment Value: Drought vs. No Drought
  misc_feature: MA Experiment ID: 20001247 Result: Up-regulated in Transcription
  misc_feature: MA Experiment 20001247 PARAMETER Experiment Name: At_Far-red-induction_P Parameter: Age (day) Value: 7
  misc_feature: MA Experiment 20001247 PARAMETER Experiment Name: At_Far-red-induction_P Parameter: Light Value: Far-red vs. White
  misc_feature: MA Experiment 20001247 PARAMETER Experiment Name: At_Far-red-induction_P Parameter: Organism Value: A. thaliana
  misc_feature: MA Experiment 20001247 PARAMETER Experiment Name: At_Far-red-induction_P Parameter: Plant Line Value: Columbia
  misc_feature: MA Experiment 20001247 PARAMETER Experiment Name: At_Far-red-induction_P Parameter: Timepoint (hr) Value: 1
  misc_feature: MA Experiment 20001247 PARAMETER Experiment Name: At_Far-red-induction_P Parameter: Tissue Value: Whole Plant
  misc_feature: MA Experiment ID: 20001450 Result: Up-regulated in Transcription
  misc_feature: MA Experiment 20001450 PARAMETER Experiment Name: At_Far-red-induction_P Parameter: Age (day) Value: 7
  misc_feature: MA Experiment 20001450 PARAMETER Experiment Name: At_Far-red-induction_P Parameter: Light Value: Far-red vs. White
  misc_feature: MA Experiment 20001450 PARAMETER Experiment Name: At_Far-red-induction_P Parameter: Organism Value: A. thaliana
  misc_feature: MA Experiment 20001450 PARAMETER Experiment Name: At_Far-red-induction_P Parameter: Plant Line Value: Columbia
  misc_feature: MA Experiment 20001450 PARAMETER Experiment Name: At_Far-red-induction_P Parameter: Timepoint (hr) Value: 8
  misc_feature: MA Experiment 20001450 PARAMETER Experiment Name: At_Far-red-induction_P Parameter: Tissue Value: Whole Plant
  misc_feature: MA Experiment ID: 20001557 Result: Up-regulated in Transcription
  misc_feature: MA Experiment 20001557 PARAMETER Experiment Name: At_Drought_Soil_Dry_P Parameter: Age (day) Value: 27
  misc_feature: MA Experiment 20001557 PARAMETER Experiment Name: At_Drought_Soil_Dry_P Parameter: Organism Value: A. thaliana
  misc_feature: MA Experiment 20001557 PARAMETER Experiment Name: At_Drought_Soil_Dry_P Parameter: Plant Line Value: WS
  misc_feature: MA Experiment 20001557 PARAMETER Experiment Name: At_Drought_Soil_Dry_P Parameter: Post Timepoint (hr) Value: 3
  misc_feature: MA Experiment 20001557 PARAMETER Experiment Name: At_Drought_Soil_Dry_P Parameter: Post-Treatment Value: Re-Water vs. No Drought
  misc_feature: MA Experiment 20001557 PARAMETER Experiment Name: At_Drought_Soil_Dry_P Parameter: Timepoint (day) Value: 13
  misc_feature: MA Experiment 20001557 PARAMETER Experiment Name: At_Drought_Soil_Dry_P Parameter: Treatment Value: Drought vs. No Drought
  misc_feature: MA Experiment ID: 20001558 Result: Up-regulated in Transcription
  misc_feature: MA Experiment 20001558 PARAMETER Experiment Name: At_Drought_Soil_Dry_P Parameter: Age (day) Value: 27
  misc_feature: MA Experiment 20001558 PARAMETER Experiment Name: At_Drought_Soil_Dry_P Parameter: Organism Value: A. thaliana
  misc_feature: MA Experiment 20001558 PARAMETER Experiment Name: At_Drought_Soil_Dry_P Parameter: Plant Line Value: WS
  misc_feature: MA Experiment 20001558 PARAMETER Experiment Name: At_Drought_Soil_Dry_P Parameter: Post Timepoint (hr) Value: 6
  misc_feature: MA Experiment 20001558 PARAMETER Experiment Name: At_Drought_Soil_Dry_P Parameter: Post-Treatment Value: Re-Water vs. No Drought
  misc_feature: MA Experiment 20001558 PARAMETER Experiment Name: At_Drought_Soil_Dry_P Parameter: Timepoint (day) Value: 13
  misc_feature: MA Experiment 20001558 PARAMETER Experiment Name: At_Drought_Soil_Dry_P Parameter: Treatment Value: Drought vs. No Drought
  misc_feature: MA Experiment ID: 20001560 Result: Up-regulated in Transcription
  misc_feature: MA Experiment 20001560 PARAMETER Experiment Name: At_Drought_Soil_Dry_P Parameter: Age (day) Value: 28
  misc_feature: MA Experiment 20001560 PARAMETER Experiment Name: At_Drought_Soil_Dry_P Parameter: Organism Value: A. thaliana
  misc_feature: MA Experiment 20001560 PARAMETER Experiment Name: At_Drought_Soil_Dry_P Parameter: Plant Line Value: WS
  misc_feature: MA Experiment 20001560 PARAMETER Experiment Name: At_Drought_Soil_Dry_P Parameter: Post Timepoint (hr) Value: None
  misc_feature: MA Experiment 20001560 PARAMETER Experiment Name: At_Drought_Soil_Dry_P Parameter: Post-Treatment Value: None
  misc_feature: MA Experiment 20001560 PARAMETER Experiment Name: At_Drought_Soil_Dry_P Parameter: Timepoint (day) Value: 14
  misc_feature: MA Experiment 20001560 PARAMETER Experiment Name: At_Drought_Soil_Dry_P Parameter: Treatment Value: Drought vs. No Drought
  misc_feature: MA Experiment ID: 20001911 Result: Down-regulated in Transcription
  misc_feature: MA Experiment 20001911 PARAMETER Experiment Name: At_Drought_Reproduction_P Parameter: Age (day) Value: 40
  misc_feature: MA Experiment 20001911 PARAMETER Experiment Name: At_Drought_Reproduction_P Parameter: Organism Value: A. thaliana
  misc_feature: MA Experiment 20001911 PARAMETER Experiment Name: At_Drought_Reproduction_P Parameter: Plant Line Value: WS
  misc_feature: MA Experiment 20001911 PARAMETER Experiment Name: At_Drought_Reproduction_P Parameter: Timepoint (day) Value: 10
  misc_feature: MA Experiment 20001911 PARAMETER Experiment Name: At_Drought_Reproduction_P Parameter: Tissue Value: Flowers
  misc_feature: MA Experiment 20001911 PARAMETER Experiment Name: At_Drought_Reproduction_P Parameter: Treatment Value: Drought vs. No Drought
ctttctccctgtgaaaaaatggactcggtggctctctactgcaccgctggtctcattgccggcgccgtctactggttcatatgcgtcctaggtccagcagaacgaaaaggcaaacgagcctctgatctctccggcggctcaatctccgcagaaaaagtcaaagacaactataaccaatactggtctttcttccgcaaaccaaaagagatcgaatcagccgagaaagtacctgacttcgtcgacacgttctacaatcttgtcactgatacctacgagtggggatggggacaatctttccatttctctcctcatgtccctggaaaatccgacaaagacgccacaagaatccacgaagaaatggccgtcgatctcatcaaagtgaaaccgggacaaaagattcttgacgctggttgcggcgtgggtgggccgatgagagccatcgcggcccattccaaggcccaagtcactggaatcactatcaacgagtaccaagtgcaacgagccaagcttcacaacaagaaagctggacttgattctctctgcaacgtcgtttgtggtaactttttaaagatgccgttcgatgaaaacacgtttgacggagcttactcgatcgaagctacgtgtcacgctcctaagctcgaagaagtatactcggagatcttcagagtgatgaaaccaggatctttgttcgtgtcctacgaatgggtcaccactgaaaaatacagagacgatgacgaagaacacaaggacgtgattcaagggatcgagagaggagacgcacttcctggactaagaagctacgctgatatagccgtgacggcgaagaaagttgggtttgaggtagtgaaggagaaagatttggctaaaccaccgtctaaaccgtggtggaaccggttaaagatgggaaggattgcttattggagaaaccatgttgtggttgtgattctttctgctattggggttgctcctaaaggaactgttgatgttcataagatgttgtttaagactgctgattatttgaccagaggtggtgagactggaatcttctctccgatgcatatgattctctgtagaaaaccagagaaagcttctgaatgaatgattgagaatacttcttccttgttctcgttttcttcttctttctttctaagttcatgtttttccccttaagaatctctttgtccgtcgtattaatgttatcactttgttgtttattgtatttttttttttcaatttgctaaattactcc

SEQ ID NO: 76517 - protein, 365 aa, Arabidopsis thaliana
  peptide (1)..(365): Ceres Seq. ID no. 7108299
  misc_feature (87)..(287): Pfam Name: ubiE/COQ5 methyltransferase family Pfam Description: ubiE/COQ5 methyltransferase family
  misc_feature (7)..(365): Homolog of NCBI NO: 2246456 NR Description: S-adenosyl-methionine-sterol-C-methyltransferase
  misc_feature (7)..(365): Homolog of NCBI NO: 15222955 NR Description: S-adenosyl-methionine-sterol-C-methyltransferase, protein id: At1g76090.1, supported by cDNA: gi_14030612, by cDNA: gi_2246455 [Arabidopsis thaliana]
  misc_feature (7)..(365): Homolog of NCBI NO: 15217917 NR Description: sterol-C-methyltransferase; protein id: supported by cDNA: 2688., supported by cDNA: gi_12083241, by cDNA: gi_15028254, supported by cDNA: gi_21281106 [Arabidopsis
  misc_feature (7)..(365): Homolog of NCBI NO: 22136020 NR Description: 24-sterol C-methyltransferase [Arabidopsis
  misc_feature (7)..(365): Homolog of NCBI NO: 23397216 NR Description: putative sterol-C-methyltransferase [Arabidopsis
  misc_feature (7)..(365): Homolog of NCBI NO: 1061040 NR Description: sterol-C-methyltransferase [Arabidopsis thaliana]
  misc_feature (7)..(365): Homolog of NCBI NO: 21555010 NR Description: sterol-C-methyltransferase [Arabidopsis thaliana]
  misc_feature (7)..(362): Homolog of NCBI NO: 7443718 NR Description: probable sterol 24-C-methyltransferase (EC
  misc_feature (15)..(362): Homolog of NCBI NO: 7443717 NR Description: probable sterol 24-C-methyltransferase (EC
  misc_feature (7)..(360): Homolog of NCBI NO: 3560533 NR Description: 24-methylene lophenol C24(1)methyltransferase
LSPCEKMDSVALYCTAGLIAGAVYWFICVLGPAERKGKRASDLSGGSISAEKVKDNYNQYWSFFRKPKEIESAEKVPDFVDTFYNLVTDTYEWGWGQSFHFSPHVPGKSDKDATRIHEEMAVDLIKVKPGQKILDAGCGVGGPMRAIAAHSKAQVTGITINEYQVQRAKLHNKKAGLDSLCNVVCGNFLKMPFDENTFDGAYSIEATCHAPKLEEVYSEIFRVMKPGSLFVSYEWVTTEKYRDDDEEHKDVIQGIERGDALPGLRSYADIAVTAKKVGFEVVKEKDLAKPPSKPWWNRLKMGRIAYWRNHVVVVILSAIGVAPKGTVDVHKMLFKTADYLTRGGETGIFSPMHMILCRKPEKASE

SEQ ID NO: 76518 - protein, 359 aa, Arabidopsis thaliana
  peptide (1)..(359): Ceres Seq. ID no. 7108300
  misc_feature (81)..(281): Pfam Name: ubiE/COQ5 methyltransferase family Pfam Description: ubiE/COQ5 methyltransferase family
  misc_feature (1)..(359): Homolog of NCBI NO: 2246456 NR Description: S-adenosyl-methionine-sterol-C-methyltransferase
  misc_feature (1)..(359): Homolog of NCBI NO: 15222955 NR Description: S-adenosyl-methionine-sterol-C-methyltransferase, protein id: At1g76090.1, supported by cDNA: gi_14030612, by cDNA: gi_2246455 [Arabidopsis thaliana]
  misc_feature (1)..(359): Homolog of NCBI NO: 15217917 NR Description: sterol-C-methyltransferase; protein id: supported by cDNA: 2688., supported by cDNA: gi_12083241, by cDNA: gi_15028254, supported by cDNA: gi_21281106 [Arabidopsis
  misc_feature (1)..(359): Homolog of NCBI NO: 22136020 NR Description: 24-sterol C-methyltransferase [Arabidopsis
  misc_feature (1)..(359): Homolog of NCBI NO: 23397216 NR Description: putative sterol-C-methyltransferase [Arabidopsis
  misc_feature (1)..(359): Homolog of NCBI NO: 1061040 NR Description: sterol-C-methyltransferase [Arabidopsis thaliana]
  misc_feature (1)..(359): Homolog of NCBI NO: 21555010 NR Description: sterol-C-methyltransferase [Arabidopsis thaliana]
  misc_feature (1)..(356): Homolog of NCBI NO: 7443718 NR Description: probable sterol 24-C-methyltransferase (EC
  misc_feature (9)..(356): Homolog of NCBI NO: 7443717 NR Description: probable sterol 24-C-methyltransferase (EC
  misc_feature (1)..(354): Homolog of NCBI NO: 3560533 NR Description: 24-methylene lophenol C24(1)methyltransferase
MDSVALYCTAGLIAGAVYWFICVLGPAERKGKRASDLSGGSISAEKVKDNYNQYWSFFRKPKEIESAEKVPDFVDTFYNLVTDTYEWGWGQSFHFSPHVPGKSDKDATRIHEEMAVDLIKVKPGQKILDAGCGVGGPMRAIAAHSKAQVTGITINEYQVQRAKLHNKKAGLDSLCNVVCGNFLKMPFDENTFDGAYSIEATCHAPKLEEVYSEIFRVMKPGSLFVSYEWVTTEKYRDDDEEHKDVIQGIERGDALPGLRSYADIAVTAKKVGFEVVKEKDLAKPPSKPWWNRLKMGRIAYWRNHVVVVILSAIGVAPKGTVDVHKMLFKTADYLTRGGETGIFSPMHMILCRKPEKASE

SEQ ID NO: 76519 - protein, 246 aa, Arabidopsis thaliana; identical to SEQ ID NO: 38170
  peptide (1)..(246): Ceres Seq. ID no. 7108301
  misc_feature (1)..(168): Pfam Name: ubiE/COQ5 methyltransferase family Pfam Description: ubiE/COQ5 methyltransferase family
  misc_feature (1)..(246): Homolog of NCBI NO: 2246456 NR Description: S-adenosyl-methionine-sterol-C-methyltransferase
  misc_feature (1)..(246): Homolog of NCBI NO: 15222955 NR Description: S-adenosyl-methionine-sterol-C-methyltransferase, protein id: At1g76090.1, supported by cDNA: gi_14030612, by cDNA: gi_2246455 [Arabidopsis thaliana]
  misc_feature (1)..(246): Homolog of NCBI NO: 15217917 NR Description: sterol-C-methyltransferase; protein id: supported by cDNA: 2688., supported by cDNA: gi_12083241, by cDNA: gi_15028254, supported by cDNA: gi_21281106 [Arabidopsis
  misc_feature (1)..(246): Homolog of NCBI NO: 22136020 NR Description: 24-sterol C-methyltransferase [Arabidopsis
  misc_feature (1)..(246): Homolog of NCBI NO: 23397216 NR Description: putative sterol-C-methyltransferase [Arabidopsis
  misc_feature (1)..(246): Homolog of NCBI NO: 1061040 NR Description: sterol-C-methyltransferase [Arabidopsis thaliana]
  misc_feature (1)..(246): Homolog of NCBI NO: 21555010 NR Description: sterol-C-methyltransferase [Arabidopsis thaliana]
  misc_feature (1)..(243): Homolog of NCBI NO: 7443718 NR Description: probable sterol 24-C-methyltransferase (EC
  misc_feature (1)..(243): Homolog of NCBI NO: 7443717 NR Description: probable sterol 24-C-methyltransferase (EC
  misc_feature (1)..(241): Homolog of NCBI NO: 3560533 NR Description: 24-methylene lophenol C24(1)methyltransferase

SEQ ID NO: 76520 - DNA, 1145 bp, Arabidopsis thaliana
  misc_feature (1)..(1145): Ceres Seq. ID no. 7108302
  misc_feature: MA Experiment ID: 108595 Result: Down-regulated in Transcription
  misc_feature: MA Experiment 108595 PARAMETER Experiment Name: At_Ler-pi_Ovule_cDNA_P Parameter: Plant Line Value: null
  misc_feature: MA Experiment ID: 20000224 Result: Down-regulated in Transcription
  misc_feature: Pfam Name: Sterol_desat Pfam Description: Sterol desaturase
cagtgtgagtaatttagcattactactgttgacttgttcaataaaggtaaagtaagatcaatccggcgcaatcttctttcgttttccggcaccgatctcggtggatctccgattcacatggcggcggataatgcttatctgatgcagtttgttgacgaaacctctttttacaaccgaatcgttctgagtcatcttttgccggcgaatctatgggaacccttacctcattttctccagacatggctccgaaattacctcgccggaaccctactatacatcatctccggtttcctctggtgcttctacatctattaccgtaaaatcaacgtttaccttcccaaagatgcaattcctacaataaaggctatgcgtttgcaaatgtttgtggcaatgaaggctatgccatggtacactcttcttccaactgtctccgagagtatgattgaacgtggttggaccaaatgttttgctagcataggcgaattcggttggattctgtattttgtttacatcgccatctatcttgttttcgttgagtttggtatttattggatgcacagagagcttcatgacattaagcctctctataagtatctccatgccacccatcatatctacaacaagcagaatacactctctccatttgccgggcttgcatttcacccagtagacgggatacttcaggctgtaccgcatgtgatagcgctgtttatagtgccaattcatttcacaactcatataggtcttttgttcatggaagcgatatgggcggcgaacatccatgactgcatccatggcaacatctggccagtaatgggtgcaggataccatacgatacaccacacgacatacaagcataactatggtcattataccatatggatggattggatgtttggctctcttagggatcctctcttagaagaagatgacaacaaagacagcttcaagaaagcagagtgaggatgcccacttgggggttgttcttctgtgttgtcttgtgttgttgttgtccaaagtttcagcctttcttgttctttttcttcttcttcttattcatgtgtctctctcaacctttccaattatattgttacaaacatttgctgtctagtttaaaacatgtaaatgtttgatgatctttcccc

SEQ ID NO: 76521 - protein, 281 aa, Arabidopsis thaliana
  peptide (1)..(281): Ceres Seq. ID no. 7108303
  misc_feature: Pfam Name: Sterol_desat Pfam Description: Sterol desaturase
  misc_feature (1)..(281): Homolog of NCBI NO: 2129741 NR Description: C-5 sterol desaturase (EC 1.-.-.-) - Arabidopsis
  misc_feature (1)..(281): Homolog of NCBI NO: 15232935 NR Description: sterol-C5-desaturase; protein id: At3g02580.1,
  misc_feature (1)..(281): Homolog of NCBI NO: 21594971 NR Description: sterol-C5-desaturase [Arabidopsis thaliana]
  misc_feature (1)..(281): Homolog of NCBI NO: 5031219 NR Description: delta7 sterol C-5 desaturase [Arabidopsis
  misc_feature (1)..(281): Homolog of NCBI NO: 15232937 NR Description: putative sterol-C5-desaturase; protein id:
  misc_feature (7)..(274): Homolog of NCBI NO: 33301670 NR Description: Delta-7-sterol-C5(6)-desaturase (Delta-7-C-5
  misc_feature (7)..(270): Homolog of NCBI NO: 4426627 NR Description: sterol-C5(6)-desaturase homolog [Nicotiana
  misc_feature (7)..(177): Homolog of NCBI NO: 34895618 NR Description: putative sterol-C5(6)-desaturase [Oryza sativa
  misc_feature (212)..(271): Homolog of NCBI NO: 34895618 NR Description: putative sterol-C5(6)-desaturase [Oryza sativa
  misc_feature (47)..(279): Homolog of NCBI NO: 25742651 NR Description: sterol-C5-desaturase (fungal ERG3,
MAADNAYLMQFVDETSFYNRIVLSHLLPANLWEPLPHFLQTWLRNYLAGTLLYIISGFLWCFYIYYRKINVYLPKDAIPTIKAMRLQMFVAMKAMPWYTLLPTVSESMIERGWTKCFASIGEFGWILYFVYIAIYLVFVEFGIYWMHRELHDIKPLYKYLHATHHIYNKQNTLSPFAGLAFHPVDGILQAVPHVIALFIVPIHFTTHIGLLFMEAIWAANIHDCIHGNIWPVMGAGYHTIHHTTYKHNYGHYTIWMDWMFGSLRDPLLEEDDNKDSFKKAE

SEQ ID NO: 76522 - protein, 273 aa, Arabidopsis thaliana
  peptide (1)..(273): Ceres Seq. ID no. 7108304
  misc_feature: Pfam Name: Sterol_desat Pfam Description: Sterol desaturase
  misc_feature (1)..(273): Homolog of NCBI NO: 2129741 NR Description: C-5 sterol desaturase (EC 1.-.-.-) - Arabidopsis
  misc_feature (1)..(273): Homolog of NCBI NO: 15232935 NR Description: sterol-C5-desaturase; protein id: At3g02580.1,
  misc_feature (1)..(273): Homolog of NCBI NO: 21594971 NR Description: sterol-C5-desaturase [Arabidopsis thaliana]
  misc_feature (1)..(273): Homolog of NCBI NO: 5031219 NR Description: delta7 sterol C-5 desaturase [Arabidopsis
  misc_feature (1)..(273): Homolog of NCBI NO: 15232937 NR Description: putative sterol-C5-desaturase; protein id:
  misc_feature (1)..(266): Homolog of NCBI NO: 33301670 NR Description: Delta-7-sterol-C5(6)-desaturase (Delta-7-C-5
  misc_feature (1)..(262): Homolog of NCBI NO: 4426627 NR Description: sterol-C5(6)-desaturase homolog [Nicotiana
  misc_feature (1)..(169): Homolog of NCBI NO: 34895618 NR Description: putative sterol-C5(6)-desaturase [Oryza sativa
  misc_feature (204)..(263): Homolog of NCBI NO: 34895618 NR Description: putative sterol-C5(6)-desaturase [Oryza sativa
  misc_feature (39)..(271): Homolog of NCBI NO: 25742651 NR Description: sterol-C5-desaturase (fungal ERG3,
MQFVDETSFYNRIVLSHLLPANLWEPLPHFLQTWLRNYLAGTLLYIISGFLWCFYIYYRKINVYLPKDAIPTIKAMRLQMFVAMKAMPWYTLLPTVSESMIERGWTKCFASIGEFGWILYFVYIAIYLVFVEFGIYWMHRELHDIKPLYKYLHATHHIYNKQNTLSPFAGLAFHPVDGILQAVPHVIALFIVPIHFTTHIGLLFMEAIWAANIHDCIHGNIWPVMGAGYHTIHHTTYKHNYGHYTIWMDWMFGSLRDPLLEEDDNKDSFKKAE

SEQ ID NO: 76523 - protein, 198 aa, Arabidopsis thaliana
  peptide (1)..(198): Ceres Seq. ID no. 7108305
  misc_feature: Pfam Name: Sterol_desat Pfam Description: Sterol desaturase
  misc_feature (1)..(198): Homolog of NCBI NO: 2129741 NR Description: C-5 sterol desaturase (EC 1.-.-.-) - Arabidopsis
  misc_feature (1)..(198): Homolog of NCBI NO: 15232935 NR Description: sterol-C5-desaturase; protein id: At3g02580.1,
  misc_feature (1)..(198): Homolog of NCBI NO: 21594971 NR Description: sterol-C5-desaturase [Arabidopsis thaliana]
  misc_feature (1)..(198): Homolog of NCBI NO: 5031219 NR Description: delta7 sterol C-5 desaturase [Arabidopsis
  misc_feature (1)..(198): Homolog of NCBI NO: 15232937 NR Description: putative sterol-C5-desaturase; protein id:
  misc_feature (1)..(191): Homolog of NCBI NO: 33301670 NR Description: Delta-7-sterol-C5(6)-desaturase (Delta-7-C-5
  misc_feature (1)..(187): Homolog of NCBI NO: 4426627 NR Description: sterol-C5(6)-desaturase homolog [Nicotiana
  misc_feature (1)..(94): Homolog of NCBI NO: 34895618 NR Description: putative sterol-C5(6)-desaturase [Oryza sativa
  misc_feature (129)..(188): Homolog of NCBI NO: 34895618 NR Description: putative sterol-C5(6)-desaturase [Oryza sativa
  misc_feature (1)..(196): Homolog of NCBI NO: 25742651 NR Description: sterol-C5-desaturase (fungal ERG3,
MRLQMFVAMKAMPWYTLLPTVSESMIERGWTKCFASIGEFGWILYFVYIAIYLVFVEFGIYWMHRELHDIKPLYKYLHATHHIYNKQNTLSPFAGLAFHPVDGILQAVPHVIALFIVPIHFTTHIGLLFMEAIWAANIHDCIHGNIWPVMGAGYHTIHHTTYKHNYGHYTIWMDWMFGSLRDPLLEEDDNKDSFKKAE

SEQ ID NO: 76524 - DNA, 597 bp, Arabidopsis thaliana
  misc_feature (1)..(597): Ceres Seq. ID no. 7108322
  misc_feature: MA Experiment ID: 108434 Result: Down-regulated in Transcription
  misc_feature: MA Experiment 108434 PARAMETER Experiment Name: At_Root_Tips_cDNA_P Parameter: Tissue Value: Root Tips
  misc_feature: MA Experiment ID: 108609 Result: Up-regulated in Transcription
  misc_feature: MA Experiment 108609 PARAMETER Experiment Name: At_100uM_ABA_cDNA_P Parameter: Timepoint (hr) Value: 24
  misc_feature: MA Experiment 108609 PARAMETER Experiment Name: At_100uM_ABA_cDNA_P Parameter: Tissue Value: Aerial
  misc_feature: MA Experiment 108609 PARAMETER Experiment Name: At_100uM_ABA_cDNA_P Parameter: Treatment Value: 100uM ABA vs. No Treatment
  misc_feature: MA Experiment ID: 20000227 Result: Down-regulated in Transcription
  misc_feature: MA Experiment 20000227 PARAMETER Experiment Name: At_Root-Tips-vs-Tops_P Parameter: Tissue Value: Root Tips vs. Root Tops
  misc_feature: MA Experiment ID: 20000234 Result: Down-regulated in Transcription
  misc_feature: MA Experiment 20000234 PARAMETER Experiment Name: At_Siliques_P Parameter: Age (day) Value: 21
  misc_feature: MA Experiment 20000234 PARAMETER Experiment Name: At_Siliques_P Parameter: Organism Value: A. thaliana
  misc_feature: MA Experiment 20000234 PARAMETER Experiment Name: At_Siliques_P Parameter: Plant Line Value: WS
  misc_feature: MA Experiment 20000234 PARAMETER Experiment Name: At_Siliques_P Parameter: Tissue Value: Less Than 5mm Siliques vs. Whole Plant
  misc_feature: MA Experiment ID: 20000264 Result: Down-regulated in Transcription
  misc_feature: MA Experiment 20000264 PARAMETER Experiment Name: At_Open_Flower_P Parameter: Age (day) Value: 21
  misc_feature: MA Experiment 20000264 PARAMETER Experiment Name: At_Open_Flower_P Parameter: Plant Line Value: WS
  misc_feature: MA Experiment 20000264 PARAMETER Experiment Name: At_Open_Flower_P Parameter: Tissue Value: Open Flower vs. Whole Plant
  misc_feature: MA Experiment ID: 20000265 Result: Down-regulated in Transcription
  misc_feature: MA Experiment 20000265 PARAMETER Experiment Name: At_Open_Flower_P Parameter: Age (day) Value: 21
  misc_feature: MA Experiment 20000265 PARAMETER Experiment Name: At_Open_Flower_P Parameter: Plant Line Value: WS
  misc_feature: MA Experiment 20000265 PARAMETER Experiment Name: At_Open_Flower_P Parameter: Tissue Value: Closed Flower vs. Whole Plant
  misc_feature: MA Experiment ID: 20000286 Result: Down-regulated in Transcription
  misc_feature: MA Experiment 20000286 PARAMETER Experiment Name: At_Open_Flower_P Parameter: Age (day) Value: 21
  misc_feature: MA Experiment 20000286 PARAMETER Experiment Name: At_Open_Flower_P Parameter: Plant Line Value: WS
  misc_feature: MA Experiment 20000286 PARAMETER Experiment Name: At_Open_Flower_P Parameter: Tissue Value: Half Open vs. Whole Plant
  misc_feature: MA Experiment ID: 20000794 Result: Down-regulated in Transcription
  misc_feature: MA Experiment 20000794 PARAMETER Experiment Name: At_Petals_P Parameter: Age (day) Value: 23-25 days
  misc_feature: MA Experiment 20000794 PARAMETER Experiment Name: At_Petals_P Parameter: Plant Line Value: WS
  misc_feature: MA Experiment 20000794 PARAMETER Experiment Name: At_Petals_P Parameter: Tissue Value: Petals vs. Whole plant
  misc_feature: MA Experiment ID: 20001451 Result: Up-regulated in Transcription
  misc_feature: MA Experiment 20001451 PARAMETER Experiment Name: At_Far-red-induction_P Parameter: Age (day) Value: 7
  misc_feature: MA Experiment 20001451 PARAMETER Experiment Name: At_Far-red-induction_P Parameter: Light Value: Far-red vs. White
  misc_feature: MA Experiment 20001451 PARAMETER Experiment Name: At_Far-red-induction_P Parameter: Organism Value: A. thaliana
  misc_feature: MA Experiment 20001451 PARAMETER Experiment Name: At_Far-red-induction_P Parameter: Plant Line Value: Columbia
  misc_feature: MA Experiment 20001451 PARAMETER Experiment Name: At_Far-red-induction_P Parameter: Timepoint (hr) Value: 24
  misc_feature: MA Experiment 20001451 PARAMETER Experiment Name: At_Far-red-induction_P Parameter: Tissue Value: Whole Plant
  misc_feature: MA Experiment ID: 20001557 Result: Down-regulated in Transcription
  misc_feature: MA Experiment 20001557 PARAMETER Experiment Name: At_Drought_Soil_Dry_P Parameter: Age (day) Value: 27
  misc_feature: MA Experiment 20001557 PARAMETER Experiment Name: At_Drought_Soil_Dry_P Parameter: Organism Value: A. thaliana
  misc_feature: MA Experiment 20001557 PARAMETER Experiment Name: At_Drought_Soil_Dry_P Parameter: Plant Line Value: WS
  misc_feature: MA Experiment 20001557 PARAMETER Experiment Name: At_Drought_Soil_Dry_P Parameter: Post Timepoint (hr) Value: 3
  misc_feature: MA Experiment 20001557 PARAMETER Experiment Name: At_Drought_Soil_Dry_P Parameter: Post-Treatment Value: Re-Water vs. No Drought
  misc_feature: MA Experiment 20001557 PARAMETER Experiment Name: At_Drought_Soil_Dry_P Parameter: Timepoint (day) Value: 13
  misc_feature: MA Experiment 20001557 PARAMETER Experiment Name: At_Drought_Soil_Dry_P Parameter: Treatment Value: Drought vs. No Drought
  misc_feature: MA Experiment ID: 20001558 Result: Down-regulated in Transcription
  misc_feature: MA Experiment 20001558 PARAMETER Experiment Name: At_Drought_Soil_Dry_P Parameter: Age (day) Value: 27
  misc_feature: MA Experiment 20001558 PARAMETER Experiment Name: At_Drought_Soil_Dry_P Parameter: Organism Value: A. thaliana
  misc_feature: MA Experiment 20001558 PARAMETER Experiment Name: At_Drought_Soil_Dry_P Parameter: Plant Line Value: WS
  misc_feature: MA Experiment 20001558 PARAMETER Experiment Name: At_Drought_Soil_Dry_P Parameter: Post Timepoint (hr) Value: 6
  misc_feature: MA Experiment 20001558 PARAMETER Experiment Name: At_Drought_Soil_Dry_P Parameter: Post-Treatment Value: Re-Water vs. No Drought
  misc_feature: MA Experiment 20001558 PARAMETER Experiment Name: At_Drought_Soil_Dry_P Parameter: Timepoint (day) Value: 13
  misc_feature: MA Experiment 20001558 PARAMETER Experiment Name: At_Drought_Soil_Dry_P Parameter: Treatment Value: Drought vs. No Drought
ccagtgtgagtaatttagcattgaaaaaaatggcggacgagagcagagtcccatcatcggtgtcggtaacagtcgcccacgaccttcttctagccggccaccgctatctagacgtcaggactccagaagagttcagccagggacatgtccctgtggggtcgatcaacgtgccttacatgaatcgaggagcatcagggatgtcaaagaaccccgacttcctggaacaagtctcctcccatttcggacaatccgataacatcattgttggctgccagagcggtggtagatctatcaaagccaccaccgatcttctccatgcaggtttcacgggagtcaaagatatcgtcggtggctatagtgcctgggccaagaatggcttcctacaaaagcttgatgactcaccattcaccaaacatctttccttatctcttcgtctccttcttcttcaataatgcatcctttctgcatgtaatcatcaataaatgaccctcctttctctttgtctgatgtgatagcttggagggaggggttcatcgcgatctttttaaaatatataaaaatacgagtgtgtgttgattcgttttttttttttttttt

SEQ ID NO: 76525 - protein, 149 aa, Arabidopsis thaliana
  peptide (1)..(149): Ceres Seq. ID no. 7108323
  misc_feature (22)..(124): Pfam Name: Rhodanese-like domain Pfam Description: Rhodanese-like domain
  misc_feature (10)..(149): Homolog of NCBI NO: 2129628 NR Description: ketoconazole resistance protein - Arabidopsis >gi|928938|emb|CAA61433.1| ketoconazole resistent protein
  misc_feature (10)..(129): Homolog of NCBI NO: 30698182 NR Description: senescence-associated protein [Arabidopsis
  misc_feature (14)..(125): Homolog of NCBI NO: 7594903 NR Description: Ntdin [Nicotiana tabacum]
  misc_feature (11)..(124): Homolog of NCBI NO: 7488606 NR Description: senescence-associated protein din1,
  misc_feature (11)..(124): Homolog of NCBI NO: 1046268 NR Description: senescence-associated protein [Arabidopsis
  misc_feature (11)..(124): Homolog of NCBI NO: 15233328 NR Description: senescence-associated protein sen1; protein id: supported by cDNA: 13699., supported by cDNA: gi_1046269, by cDNA: gi_18958010, supported by cDNA: gi_20147106 [Arabidopsis
  misc_feature (11)..(124): Homolog of NCBI NO: 21537402 NR Description: senescence-associated protein sen1 [Arabidopsis
  misc_feature (14)..(124): Homolog of NCBI NO: 118636 NR Description: Senescence-associated protein DIN1
  misc_feature (4)..(125): Homolog of NCBI NO: 7340289 NR Description: OP1 [Cucumis sativus]
  misc_feature (66)..(129): Homolog of NCBI NO: 30698184 NR Description: senescence-associated protein [Arabidopsis
SVSNLALKKMADESRVPSSVSVTVAHDLLLAGHRYLDVRTPEEFSQGHVPVGSINVPYMNRGASGMSKNPDFLEQVSSHFGQSDNIIVGCQSGGRSIKATTDLLHAGFTGVKDIVGGYSAWAKNGFLQKLDDSPFTKHLSLSLRLLLLQ

SEQ ID NO: 76526 - protein, 140 aa, Arabidopsis thaliana
  peptide (1)..(140): Ceres Seq. ID no. 7108324
  misc_feature (13)..(115): Pfam Name: Rhodanese-like domain Pfam Description: Rhodanese-like domain
  misc_feature (1)..(140): Homolog of NCBI NO: 2129628 NR Description: ketoconazole resistance protein - Arabidopsis >gi|928938|emb|CAA61433.1| ketoconazole resistent protein
  misc_feature (1)..(120): Homolog of NCBI NO: 30698182 NR Description: senescence-associated protein [Arabidopsis
  misc_feature (5)..(116): Homolog of NCBI NO: 7594903 NR Description: Ntdin [Nicotiana tabacum]
  misc_feature (2)..(115): Homolog of NCBI NO: 7488606 NR Description: senescence-associated protein din1,
  misc_feature (2)..(115): Homolog of NCBI NO: 1046268 NR Description: senescence-associated protein [Arabidopsis
  misc_feature (2)..(115): Homolog of NCBI NO: 15233328 NR Description: senescence-associated protein sen1; protein id: supported by cDNA: 13699., supported by cDNA: gi_1046269, by cDNA: gi_18958010, supported by cDNA: gi_20147106 [Arabidopsis
  misc_feature (2)..(115): Homolog of NCBI NO: 21537402 NR Description: senescence-associated protein sen1 [Arabidopsis
  misc_feature (5)..(115): Homolog of NCBI NO: 118636 NR Description: Senescence-associated protein DIN1
  misc_feature (1)..(116): Homolog of NCBI NO: 7340289 NR Description: OP1 [Cucumis sativus]
  misc_feature (57)..(120): Homolog of NCBI NO: 30698184 NR Description: senescence-associated protein [Arabidopsis
MADESRVPSSVSVTVAHDLLLAGHRYLDVRTPEEFSQGHVPVGSINVPYMNRGASGMSKNPDFLEQVSSHFGQSDNIIVGCQSGGRSIKATTDLLHAGFTGVKDIVGGYSAWAKNGFLQKLDDSPFTKHLSLSLRLLLLQ

SEQ ID NO: 76527 - protein, 91 aa, Arabidopsis thaliana
  peptide (1)..(91): Ceres Seq. ID no. 7108325
  misc_feature (1)..(66): Pfam Name: Rhodanese-like domain Pfam Description: Rhodanese-like domain
  misc_feature (1)..(91): Homolog of NCBI NO: 2129628 NR Description: ketoconazole resistance protein - Arabidopsis >gi|928938|emb|CAA61433.1| ketoconazole resistent protein
  misc_feature (1)..(71): Homolog of NCBI NO: 30698182 NR Description: senescence-associated protein [Arabidopsis
  misc_feature (1)..(67): Homolog of NCBI NO: 7594903 NR Description: Ntdin [Nicotiana tabacum]
  misc_feature (1)..(66): Homolog of NCBI NO: 7488606 NR Description: senescence-associated protein din1,
  misc_feature (1)..(66): Homolog of NCBI NO: 1046268 NR Description: senescence-associated protein [Arabidopsis
  misc_feature (1)..(66): Homolog of NCBI NO: 15233328 NR Description: senescence-associated protein sen1; protein id: supported by cDNA: 13699., supported by cDNA: gi_1046269, by cDNA: gi_18958010, supported by cDNA: gi_20147106 [Arabidopsis
  misc_feature (1)..(66): Homolog of NCBI NO: 21537402 NR Description: senescence-associated protein sen1 [Arabidopsis
  misc_feature (1)..(66): Homolog of NCBI NO: 118636 NR Description: Senescence-associated protein DIN1
  misc_feature (1)..(67): Homolog of NCBI NO: 7340289 NR Description: OP1 [Cucumis sativus]
  misc_feature (8)..(71): Homolog of NCBI NO: 30698184 NR Description: senescence-associated protein [Arabidopsis
MNRGASGMSKNPDFLEQVSSHFGQSDNIIVGCQSGGRSIKATTDLLHAGFTGVKDIVGGYSAWAKNGFLQKLDDSPFTKHLSLSLRLLLLQ

SEQ ID NO: 76528 - DNA, 795 bp, Arabidopsis thaliana
  misc_feature (1)..(795): Ceres Seq. ID no. 7108326
  misc_feature: MA Experiment ID: 108434 Result: Up-regulated in Transcription
  misc_feature: MA Experiment 108434 PARAMETER Experiment Name: At_Root_Tips_cDNA_P Parameter: Tissue Value: Root Tips
  misc_feature: MA Experiment ID: 108462 Result: Down-regulated in Transcription
  misc_feature: MA Experiment 108462 PARAMETER Experiment Name: At_Germinating_Seeds_cDNA_P Parameter: Age (day) Value: 2 vs. 0
  misc_feature: MA Experiment 108462 PARAMETER Experiment Name: At_Germinating_Seeds_cDNA_P Parameter: Tissue Value: Germinating Seeds
  misc_feature: MA Experiment ID: 108463 Result: Down-regulated in Transcription
  misc_feature: MA Experiment 108463 PARAMETER Experiment Name: At_Germinating_Seeds_cDNA_P Parameter: Age (day) Value: 3 vs. 0
  misc_feature: MA Experiment 108463 PARAMETER Experiment Name: At_Germinating_Seeds_cDNA_P Parameter: Tissue Value: Germinating Seeds
  misc_feature: MA Experiment ID: 108464 Result: Down-regulated in Transcription
  misc_feature: MA Experiment 108464 PARAMETER Experiment Name: At_Germinating_Seeds_cDNA_P Parameter: Age (day) Value: 4 vs. 0
  misc_feature: MA Experiment 108464 PARAMETER Experiment Name: At_Germinating_Seeds_cDNA_P Parameter: Tissue Value: Germinating Seeds
  misc_feature: MA Experiment ID: 108579 Result: Down-regulated in Transcription
  misc_feature: MA Experiment 108579 PARAMETER Experiment Name: At_4deg_Cold_cDNA_P Parameter: Temperature (deg C) Value: 4 vs. 22
  misc_feature: MA Experiment 108579 PARAMETER Experiment Name: At_4deg_Cold_cDNA_P Parameter: Timepoint (hr) Value: 6
  misc_feature: MA Experiment 108579 PARAMETER Experiment Name: At_4deg_Cold_cDNA_P Parameter: Tissue Value: Aerial
  misc_feature: MA Experiment ID: 20000224 Result: Down-regulated in Transcription
  misc_feature: MA Experiment ID: 20000451 Result: Down-regulated in Transcription
  misc_feature: MA Experiment 20000451 PARAMETER Experiment Name: At_CS6879_Shoots-Roots_P Parameter: Age (day) Value: 14
  misc_feature: MA Experiment 20000451 PARAMETER Experiment Name: At_CS6879_Shoots-Roots_P Parameter: Organism Value: A. thaliana
  misc_feature: MA Experiment 20000451 PARAMETER Experiment Name: At_CS6879_Shoots-Roots_P Parameter: Plant Line Value: CS6879 vs. WS
  misc_feature: MA Experiment 20000451 PARAMETER Experiment Name: At_CS6879_Shoots-Roots_P Parameter: Tissue Value: Roots
  misc_feature: MA Experiment ID: 20000452 Result: Down-regulated in Transcription
  misc_feature: MA Experiment 20000452 PARAMETER Experiment Name: At_CS6879_Shoots-Roots_P Parameter: Age (day) Value: 14
  misc_feature: MA Experiment 20000452 PARAMETER Experiment Name: At_CS6879_Shoots-Roots_P Parameter: Organism Value: A. thaliana
  misc_feature: MA Experiment 20000452 PARAMETER Experiment Name: At_CS6879_Shoots-Roots_P Parameter: Plant Line Value: CS6879 vs. WS
  misc_feature: MA Experiment 20000452 PARAMETER Experiment Name: At_CS6879_Shoots-Roots_P Parameter: Tissue Value: Shoots
ccacgcgtccggtttcaacggagactcactagtcgatcccgatcctttcttctacccgcccgaaatccgtcgaaacttctcttctttaccattgatttgcctcgtctcagctcaattctcttccgttgctgcttcgtttagttgttgcttcgcttcagtactctggtggtgggagagatgaatcacggccaacaatctggtgaggcaaagcatgaagatgatgctgctcttacagagttccttgcttctctgatggattatactcctactattcctgatgatttagtggagcactacttggctaagagtggatttcagtgccccgacgtacgattgataaggctagttgctgtggctacacaaaagtttgttgcagatgttgccagtgacgcccttcagcattgcaaggctagaccagcaccagttgtgaaagacaaaaaacagcaaaaggataagcgtttggtattgacaatggaagatctttcaaaagctttgcgtgagtatggtgtgaacgtgaagcatccagaatattttgctgatagcccttcgactggaatggaccctgcaacaagggacgaatagaaaccaggaattcctcaaaatctttgcctagtaaggacggtcatgtgactcagatccctgattctctgttgtgtttcagttaaaaacaaaactcacttgtcttgctagtcctcaattactacattacatgtatattcgtttgttgtttgttctctggtgatttttggggttctacatcacttatccaccattcttgcaagtctccaagtcgtg

SEQ ID NO: 76529 - protein, 134 aa, Arabidopsis thaliana; identical to SEQ ID NO: 36011
  peptide (1)..(134): Ceres Seq. ID no. 7108327
  misc_feature (30)..(80): Pfam Name: Transcription initiation factor TFIID 23-30kDa subunit Pfam Description: Transcription initiation factor TFIID 23-30kDa
  misc_feature (1)..(134): Homolog of NCBI NO: 15236059 NR Description: Transcription factor II homolog; protein id: supported by cDNA: 25793., supported by cDNA: gi_13492647, by cDNA: gi_13549155 [Arabidopsis thaliana]
  misc_feature (1)..(134): Homolog of NCBI NO: 26450720 NR Description: putative transcription factor II [Arabidopsis
  misc_feature (7)..(119): Homolog of NCBI NO: 9910576 NR Description: TAF10 RNA polymerase II, TATA box binding protein
  misc_feature (7)..(119): Homolog of NCBI NO: 26338586 NR Description: unnamed protein product [Mus musculus]
  misc_feature (7)..(119): Homolog of NCBI NO: 21619259 NR Description: Similar to TAF10 RNA polymerase II, TATA box
  misc_feature (7)..(119): Homolog of NCBI NO: 34859827 NR Description: similar to Ilk protein [Rattus norvegicus]
  misc_feature (18)..(119): Homolog of NCBI NO: 5454106 NR Description: TBP-related factor 10; TATA box binding protein associated factor, RNA polymerase II; TAF10 RNA polymerase II,
  misc_feature (7)..(119): Homolog of NCBI NO: 20863106 NR Description: similar to Transcription initiation factor TFIID
  misc_feature (18)..(119): Homolog of NCBI NO: 2136293 NR Description: transcription factor IID 30k chain - human
  misc_feature (1)..(118): Homolog of NCBI NO: 17137648 NR Description: TBP-associated factor 10b CG3069-PA [Drosophila

SEQ ID NO: 76530 - protein, 109 aa, Arabidopsis thaliana; identical to SEQ ID NO: 36012
  peptide (1)..(109): Ceres Seq. ID no. 7108328
  misc_feature (5)..(55): Pfam Name: Transcription initiation factor TFIID 23-30kDa subunit Pfam Description: Transcription initiation factor TFIID 23-30kDa
  misc_feature (1)..(109): Homolog of NCBI NO: 15236059 NR Description: Transcription factor II homolog; protein id: supported by cDNA: 25793., supported by cDNA: gi_13492647, by cDNA: gi_13549155 [Arabidopsis thaliana]
  misc_feature (1)..(109): Homolog of NCBI NO: 26450720 NR Description: putative transcription factor II [Arabidopsis
  misc_feature (1)..(94): Homolog of NCBI NO: 9910576 NR Description: TAF10 RNA polymerase II, TATA box binding protein
  misc_feature (1)..(94): Homolog of NCBI NO: 26338586 NR Description: unnamed protein product [Mus musculus]
  misc_feature (1)..(94): Homolog of NCBI NO: 21619259 NR Description: Similar to TAF10 RNA polymerase II, TATA box
  misc_feature (1)..(94): Homolog of NCBI NO: 34859827 NR Description: similar to Ilk protein [Rattus norvegicus]
  misc_feature (1)..(94): Homolog of NCBI NO: 5454106 NR Description: TBP-related factor 10; TATA box binding protein associated factor, RNA polymerase II; TAF10 RNA polymerase II,
  misc_feature (1)..(94): Homolog of NCBI NO: 20863106 NR Description: similar to Transcription initiation factor TFIID
  misc_feature (1)..(94): Homolog of NCBI NO: 2136293 NR Description: transcription factor IID 30k chain - human
  misc_feature (1)..(93): Homolog of NCBI NO: 17137648 NR Description: TBP-associated factor 10b CG3069-PA [Drosophila

SEQ ID NO: 76531 - DNA, 2220 bp, Arabidopsis thaliana
  misc_feature (1)..(2220): Ceres Seq. ID no. 7108333
  misc_feature: MA Experiment ID: 108434 Result: Up-regulated in Transcription
  misc_feature: MA Experiment 108434 PARAMETER Experiment Name: At_Root_Tips_cDNA_P Parameter: Tissue Value: Root Tips
  misc_feature: MA Experiment ID: 108463 Result: Down-regulated in Transcription
  misc_feature: MA Experiment 108463 PARAMETER Experiment Name: At_Germinating_Seeds_cDNA_P Parameter: Age (day) Value: 3 vs. 0
  misc_feature: MA Experiment 108463 PARAMETER Experiment Name: At_Germinating_Seeds_cDNA_P Parameter: Tissue Value: Germinating Seeds
  misc_feature: MA Experiment ID: 108469 Result: Up-regulated in Transcription
  misc_feature: MA Experiment ID: 108573 Result: Down-regulated in Transcription
  misc_feature: MA Experiment 108573 PARAMETER Experiment Name: At_Drought_cDNA_P Parameter: Timepoint (hr) Value: 6
  misc_feature: MA Experiment 108573 PARAMETER Experiment Name: At_Drought_cDNA_P Parameter: Tissue Value: Aerial
  misc_feature: MA Experiment 108573 PARAMETER Experiment Name: At_Drought_cDNA_P Parameter: Treatment Value: Drought vs. No Drought
  misc_feature: MA Experiment ID: 108576 Result: Up-regulated in Transcription
  misc_feature: MA Experiment 108576 PARAMETER Experiment Name: At_42deg_Heat_cDNA_P Parameter: Temperature (deg C) Value: 42 vs. 22
  misc_feature: MA Experiment 108576 PARAMETER Experiment Name: At_42deg_Heat_cDNA_P Parameter: Timepoint (hr) Value: 1
  misc_feature: MA Experiment 108576 PARAMETER Experiment Name: At_42deg_Heat_cDNA_P Parameter: Tissue Value: Aerial
  misc_feature: MA Experiment ID: 108577 Result: Up-regulated in Transcription
  misc_feature: MA Experiment 108577 PARAMETER Experiment Name: At_42deg_Heat_cDNA_P Parameter: Temperature (deg C) Value: 42 vs. 22
  misc_feature: MA Experiment 108577 PARAMETER Experiment Name: At_42deg_Heat_cDNA_P Parameter: Timepoint (hr) Value: 6
  misc_feature: MA Experiment 108577 PARAMETER Experiment Name: At_42deg_Heat_cDNA_P Parameter: Tissue Value: Aerial
  misc_feature: MA Experiment ID: 108595 Result: Up-regulated in Transcription
  misc_feature: MA Experiment 108595 PARAMETER Experiment Name: At_Ler-pi_Ovule_cDNA_P Parameter: Plant Line Value: null
  misc_feature: MA Experiment ID: 108668 Result: Up-regulated in Transcription
  misc_feature: MA Experiment 108668 PARAMETER Experiment Name: At_2mM_SA_cDNA_P Parameter: Plant Line Value: WS
  misc_feature: MA Experiment 108668 PARAMETER Experiment Name: At_2mM_SA_cDNA_P Parameter: Timepoint (hr) Value: 6
  misc_feature: MA Experiment 108668 PARAMETER Experiment Name: At_2mM_SA_cDNA_P Parameter: Treatment Value: 2mM SA vs. No Treatment
  misc_feature: MA Experiment ID: 20000086 Result: Up-regulated in Transcription
  misc_feature: MA Experiment 20000086 PARAMETER Experiment Name: At_100uM_ABA_Mutants_cDNA_P Parameter: Plant Line Value: CS22
  misc_feature: MA Experiment 20000086 PARAMETER Experiment Name: At_100uM_ABA_Mutants_cDNA_P Parameter: Timepoint (hr) Value: 6
  misc_feature: MA Experiment 20000086 PARAMETER Experiment Name: At_100uM_ABA_Mutants_cDNA_P Parameter: Tissue Value: Aerial
  misc_feature: MA Experiment 20000086 PARAMETER Experiment Name: At_100uM_ABA_Mutants_cDNA_P Parameter: Treatment Value: 100uM ABA vs. No Treatment
  misc_feature: MA Experiment ID: 20000089 Result: Up-regulated in Transcription
  misc_feature: MA Experiment ID: 20000090 Result: Up-regulated in Transcription
  misc_feature: MA Experiment ID: 20000093 Result: Up-regulated in Transcription
  misc_feature: MA Experiment 20000093 PARAMETER Experiment Name: At_42deg_Heat_cDNA_P Parameter: Temperature (deg C) Value: 42 vs. 22
  misc_feature: MA Experiment 20000093 PARAMETER Experiment Name: At_42deg_Heat_cDNA_P Parameter: Timepoint (hr) Value: 0.5
  misc_feature: MA Experiment 20000093 PARAMETER Experiment Name: At_42deg_Heat_cDNA_P Parameter: Tissue Value: Aerial
  misc_feature: MA Experiment ID: 20000111 Result: Up-regulated in Transcription
  misc_feature: MA Experiment 20000111 PARAMETER Experiment Name: At_42deg_Heat_cDNA_P Parameter: Temperature (deg C) Value: 42 vs. 22
  misc_feature: MA Experiment 20000111 PARAMETER Experiment Name: At_42deg_Heat_cDNA_P Parameter: Timepoint (hr) Value: 6
  misc_feature: MA Experiment 20000111 PARAMETER Experiment Name: At_42deg_Heat_cDNA_P Parameter: Tissue Value: Aerial
  misc_feature: MA Experiment ID: 20000112 Result: Up-regulated in Transcription
  misc_feature: MA Experiment 20000112 PARAMETER Experiment Name: At_42deg_Heat_cDNA_P Parameter: Temperature (deg C) Value: 42 vs. 22
  misc_feature: MA Experiment 20000112 PARAMETER Experiment Name: At_42deg_Heat_cDNA_P Parameter: Timepoint (hr) Value: 2
  misc_feature: MA Experiment 20000112 PARAMETER Experiment Name: At_42deg_Heat_cDNA_P Parameter: Tissue Value: Aerial
  misc_feature: MA Experiment ID: 20000224 Result: Up-regulated in Transcription
  misc_feature: MA Experiment ID: 20000327 Result: Up-regulated in Transcription
  misc_feature: MA Experiment 20000327 PARAMETER Experiment Name: At_42deg_Heat_Sub_P Parameter: Age (day) Value: 14
  misc_feature: MA Experiment 20000327 PARAMETER Experiment Name: At_42deg_Heat_Sub_P Parameter: Organism Value: A. thaliana
  misc_feature: MA Experiment 20000327 PARAMETER Experiment Name: At_42deg_Heat_Sub_P Parameter: Plant Line Value: WS
  misc_feature: MA Experiment 20000327 PARAMETER Experiment Name: At_42deg_Heat_Sub_P Parameter: Temperature (deg C) Value: 42 vs. 22
  misc_feature: MA Experiment 20000327 PARAMETER Experiment Name: At_42deg_Heat_Sub_P Parameter: Timepoint (hr) Value: 1
  misc_feature: MA Experiment 20000327 PARAMETER Experiment Name: At_42deg_Heat_Sub_P Parameter: Tissue Value: Aerial
  misc_feature: MA Experiment ID: 20000328 Result: Up-regulated in Transcription
  misc_feature: MA Experiment 20000328 PARAMETER Experiment Name: At_42deg_Heat_Sub_P Parameter: Age (day) Value: 14
  misc_feature: MA Experiment 20000328 PARAMETER Experiment Name: At_42deg_Heat_Sub_P Parameter: Organism Value: A. thaliana
  misc_feature: MA Experiment 20000328 PARAMETER Experiment Name: At_42deg_Heat_Sub_P Parameter: Plant Line Value: WS
  misc_feature: MA Experiment 20000328 PARAMETER Experiment Name: At_42deg_Heat_Sub_P Parameter: Temperature (deg C) Value: 42 vs. 22
  misc_feature: MA Experiment 20000328 PARAMETER Experiment Name: At_42deg_Heat_Sub_P Parameter: Timepoint (hr) Value: 6
  misc_feature: MA Experiment 20000328 PARAMETER Experiment Name: At_42deg_Heat_Sub_P Parameter: Tissue Value: Aerial
  misc_feature: Pfam Name: HSP70 Pfam Description: Hsp70 protein
ggaagctctctgttcaaatcaaaagagagatcgtacgcaaaagtttccgatatggctcgctcgtttggagcaaacagcactgttgtgcttgcgatcatcttcttcggatgtttatttgcgttttccactgcaaaagaagaggctacgaagttaggatcagttattgggatagatcttggtaccacttactcttgtgttggtgtttacaagaatggtcatgttgaaattattgccaatgaccaaggaaaccgtattacaccttcatgggttggttttactgactctgaaaggctcattggtgaggctgctaagaatcaagcagctgttaatccagagaggactgtcttcgacgttaagagattgatcgggcgaaaatttgaggacaaggaggttcaaaaggacaggaaacttgtaccttaccagattgtgaacaaggatggtaagccatacattcaagtcaagatcaaggatggtgagactaaggttttcagtcctgaggagatcagtgccatgattctgactaagatgaaggagacagccgaagcctaccttggaaagaaaatcaaggacgctgttgtcactgttccagcttacttcaatgatgctcaaaggcaagctaccaaggatgccggtgttattgctgggctcaatgttgctagaatcatcaacgaacctactgctgctgctattgcctacggtcttgataagaagggtggtgagaagaacatccttgtatttgaccttggtggtggtacttttgatgtcagtgtcttgaccattgataacggagtgtttgaggttctctccacaaatggtgacactcacttgggaggtgaggactttgaccacaggatcatggagtacttcatcaagttaattaagaagaagcaccagaaggacatcagcaaggacaacaaggctcttggtaagctccgaagggaatgtgagagggcaaagagagctctaagcagtcagcaccaagtccgtgtagagattgagtcactctttgatggtgttgatttatctgagccactcaccagagctcgtttcgaggagcttaacaatgatttgttcaggaagaccatgggacctgtgaagaaggccatggatgatgccggtctacagaagagccagatcgatgagattgtccttgttggtggaagcaccaggatcccaaaggttcagcaactgttgaaggacttctttgaaggtaaagagccaaacaagggtgtgaaccccgacgaggctgttgcctatggtgctgctgttcagggtggtattttgagcggagaaggcggtgatgagaccaaagatatccttcttcttgatgttgcgccactcactttaggtatcgagactgtaggaggagtgatgacaaagttgatcccaagaaacacggttattccaaccaagaaatctcaggttttcacaacgtaccaagaccagcagaccaccgtctccattcaggtctttgaaggtgaaagaagtctcaccaaggactgcagcctactcgggaaattcgacctcactggagtcccaccggccccaagaggaacccctcaaatcgaggtcacatttgaagtggacgccaacggtattcttaatgtgaaagcagaggacaaggcgagtggtaaatcagagaagattacaatcacaaacgagaagggtcgtctgagccaagaagagattgaccggatggtgaaggaggcagaggagtttgcagaggaagacaagaaggtgaaggagaagatcgacgccaggaatgccctggagacatacgtgtacaacatgaagaaccaagtgagcgacaaggacaagcttgcagacaaattggaaggagatgagaaggagaagatagaagcagcgacgaaagaggccttggagtggctcgacgagaaccaaaactcagagaaagaagagtacgacgagaagctcaaggaggtagaggcagtgtgtaacccaatcatcacagcagtttaccagagatcaggcggagcaccaggtgcaggaggagaatcatcgactgaggaggaagatgagtctcacgatgagctctagatgtcttctgttattgttaatttattaaaccatagagacaagttttgaggatgaaacgtcgtttttgttttttgtatttggtttcctttttcttatggatttttaggaaaggggagagattaagtagcgtcccttctttagtctccctggaccctgacgtag

SEQ ID NO: 76532 - protein, 685 aa, Arabidopsis thaliana
  peptide (1)..(685): Ceres Seq. ID no. 7108334
  misc_feature: Pfam Name: HSP70 Pfam Description: Hsp70 protein
  misc_feature (10)..(680): Homolog of NCBI NO: 13897312 NR Description: luminal binding protein, BiP [Scherffelia dubia]
  misc_feature (54)..(685): Homolog of NCBI NO: 1037176 NR Description: immunoglobulin heavy chain binding protein
  misc_feature (37)..(685): Homolog of NCBI NO: 29539338 NR Description: Heat shock 70 kDa protein [Cyanidioschyzon
  misc_feature (32)..(685): Homolog of NCBI NO: 23480384 NR Description: heat shock protein [Plasmodium yoelii yoelii]
  misc_feature (216)..(685): Homolog of NCBI NO: 168424 NR Description: polypeptide chain-binding protein
  misc_feature (52)..(677): Homolog of NCBI NO: 21263753 NR Description: Heat shock cognate 71 kDa protein (Hsc70.1)
  misc_feature (4)..(685): Homolog of NCBI NO: 121568 NR Description: 78 KD GLUCOSE-REGULATED PROTEIN HOMOLOG PRECURSOR
  misc_feature (51)..(671): Homolog of NCBI NO: 14423732 NR Description: Heat shock 70 kDa protein
GSSLFKSKERSYAKVSDMARSFGANSTVVLAIIFFGCLFAFSTAKEEATKLGSVIGIDLGTTYSCVGVYKNGHVEIIANDQGNRITPSWVGFTDSERLIGEAAKNQAAVNPERTVFDVKRLIGRKFEDKEVQKDRKLVPYQIVNKDGKPYIQVKIKDGETKVFSPEEISAMILTKMKETAEAYLGKKIKDAVVTVPAYFNDAQRQATKDAGVIAGLNVARIINEPTAAAIAYGLDKKGGEKNILVFDLGGGTFDVSVLTIDNGVFEVLSTNGDTHLGGEDFDHRIMEYFIKLIKKKHQKDISKDNKALGKLRRECERAKRALSSQHQVRVEIESLFDGVDLSEPLTRARFEELNNDLFRKTMGPVKKAMDDAGLQKSQIDEIVLVGGSTRIPKVQQLLKDFFEGKEPNKGVNPDEAVAYGAAVQGGILSGEGGDETKDILLLDVAPLTLGIETVGGVMTKLIPRNTVIPTKKSQVFTTYQDQQTTVSIQVFEGERSLTKDCSLLGKFDLTGVPPAPRGTPQIEVTFEVDANGILNVKAEDKASGKSEKITITNEKGRLSQEEIDRMVKEAEEFAEEDKKVKEKIDARNALETYVYNMKNQVSDKDKLADKLEGDEKEKIEAATKEALEWLDENQNSEKEEYDEKLKEVEAVCNPIITAVYQRSGGAPGAGGESSTEEEDESHDEL

SEQ ID NO: 76533 - protein, 668 aa, Arabidopsis thaliana
  peptide (1)..(668): Ceres Seq. ID no. 7108335
  misc_feature: Pfam Name: HSP70 Pfam Description: Hsp70 protein
  misc_feature (1)..(663): Homolog of NCBI NO: 13897312 NR Description: luminal binding protein, BiP [Scherffelia dubia]
  misc_feature (37)..(668): Homolog of NCBI NO: 1037176 NR Description: immunoglobulin heavy chain binding protein
  misc_feature (20)..(668): Homolog of NCBI NO: 29539338 NR Description: Heat shock 70 kDa protein [Cyanidioschyzon
  misc_feature (15)..(668): Homolog of NCBI NO: 23480384 NR Description: heat shock protein [Plasmodium yoelii yoelii]
  misc_feature (199)..(668): Homolog of NCBI NO: 168424 NR Description: polypeptide chain-binding protein
  misc_feature (35)..(660): Homolog of NCBI NO: 21263753 NR Description: Heat shock cognate 71 kDa protein (Hsc70.1)
  misc_feature (1)..(668): Homolog of NCBI NO: 121568 NR Description: 78 KD GLUCOSE-REGULATED PROTEIN HOMOLOG PRECURSOR
  misc_feature (34)..(654): Homolog of NCBI NO: 14423732 NR Description: Heat shock 70 kDa protein
MARSFGANSTVVLAIIFFGCLFAFSTAKEEATKLGSVIGIDLGTTYSCVGVYKNGHVEIIANDQGNRITPSWVGFTDSERLIGEAAKNQAAVNPERTVFDVKRLIGRKFEDKEVQKDRKLVPYQIVNKDGKPYIQVKIKDGETKVFSPEEISAMILTKMKETAEAYLGKKIKDAVVTVPAYFNDAQRQATKDAGVIAGLNVARIINEPTAAAIAYGLDKKGGEKNILVFDLGGGTFDVSVLTIDNGVFEVLSTNGDTHLGGEDFDHRIMEYFIKLIKKKHQKDISKDNKALGKLRRECERAKRALSSQHQVRVEIESLFDGVDLSEPLTRARFEELNNDLFRKTMGPVKKAMDDAGLQKSQIDEIVLVGGSTRIPKVQQLLKDFFEGKEPNKGVNPDEAVAYGAAVQGGILSGEGGDETKDILLLDVAPLTLGIETVGGVMTKLIPRNTVIPTKKSQVFTTYQDQQTTVSIQVFEGERSLTKDCSLLGKFDLTGVPPAPRGTPQIEVTFEVDANGILNVKAEDKASGKSEKITITNEKGRLSQEEIDRMVKEAEEFAEEDKKVKEKIDARNALETYVYNMKNQVSDKDKLADKLEGDEKEKIEAATKEALEWLDENQNSEKEEYDEKLKEVEAVCNPIITAVYQRSGGAPGAGGESSTEEEDESHDEL

SEQ ID NO: 76534 - protein, 515 aa, Arabidopsis thaliana
  peptide (1)..(515): Ceres Seq. ID no. 7108336
  misc_feature: Pfam Name: HSP70 Pfam Description: Hsp70 protein
  misc_feature (1)..(510): Homolog of NCBI NO: 13897312 NR Description: luminal binding protein, BiP [Scherffelia dubia]
  misc_feature (1)..(515): Homolog of NCBI NO: 1037176 NR Description: immunoglobulin heavy chain binding protein
  misc_feature (1)..(515): Homolog of NCBI NO: 29539338 NR Description: Heat shock 70 kDa protein [Cyanidioschyzon
  misc_feature (1)..(515): Homolog of NCBI NO: 23480384 NR Description: heat shock protein [Plasmodium yoelii yoelii]
  misc_feature (46)..(515): Homolog of NCBI NO: 168424 NR Description: polypeptide chain-binding protein
  misc_feature (1)..(507): Homolog of NCBI NO: 21263753 NR Description: Heat shock cognate 71 kDa protein (Hsc70.1)
  misc_feature (1)..(515): Homolog of NCBI NO: 121568 NR Description: 78 KD GLUCOSE-REGULATED PROTEIN HOMOLOG PRECURSOR
  misc_feature (1)..(501): Homolog of NCBI NO: 14423732 NR Description: Heat shock 70 kDa protein
MILTKMKETAEAYLGKKIKDAVVTVPAYFNDAQRQATKDAGVIAGLNVARIINEPTAAAIAYGLDKKGGEKNILVFDLGGGTFDVSVLTIDNGVFEVLSTNGDTHLGGEDFDHRIMEYFIKLIKKKHQKDISKDNKALGKLRRECERAKRALSSQHQVRVEIESLFDGVDLSEPLTRARFEELNNDLFRKTMGPVKKAMDDAGLQKSQIDEIVLVGGSTRIPKVQQLLKDFFEGKEPNKGVNPDEAVAYGAAVQGGILSGEGGDETKDILLLDVAPLTLGIETVGGVMTKLIPRNTVIPTKKSQVFTTYQDQQTTVSIQVFEGERSLTKDCSLLGKFDLTGVPPAPRGTPQIEVTFEVDANGILNVKAEDKASGKSEKITITNEKGRLSQEEIDRMVKEAEEFAEEDKKVKEKIDARNALETYVYNMKNQVSDKDKLADKLEGDEKEKIEAATKEALEWLDENQNSEKEEYDEKLKEVEAVCNPIITAVYQRSGGAPGAGGESSTEEEDESHDEL

SEQ ID NO: 76535 - DNA, 1457 bp, Arabidopsis thaliana
  misc_feature (1)..(1457): Ceres Seq. ID no. 7108337
  misc_feature: MA Experiment ID: 20000184 Result: Down-regulated in Transcription
  misc_feature: MA Experiment 20000184 PARAMETER Experiment Name: At_Shoots__P Parameter: Age (day) Value: 7
  misc_feature: MA Experiment 20000184 PARAMETER Experiment Name: At_Shoots__P Parameter: Tissue Value: Shoots vs. Whole Plant
  misc_feature: MA Experiment ID: 20000234 Result: Up-regulated in Transcription
  misc_feature: MA Experiment 20000234 PARAMETER Experiment Name: At_Siliques_P Parameter: Age (day) Value: 21
  misc_feature: MA Experiment 20000234 PARAMETER Experiment Name: At_Siliques_P Parameter: Organism Value: A. thaliana
  misc_feature: MA Experiment 20000234 PARAMETER Experiment Name: At_Siliques_P Parameter: Plant Line Value: WS
  misc_feature: MA Experiment 20000234 PARAMETER Experiment Name: At_Siliques_P Parameter: Tissue Value: Less Than 5mm Siliques vs. Whole Plant
  misc_feature: MA Experiment ID: 20000264 Result: Up-regulated in Transcription
  misc_feature: MA Experiment 20000264 PARAMETER Experiment Name: At_Open_Flower_P Parameter: Age (day) Value: 21
  misc_feature: MA Experiment 20000264 PARAMETER Experiment Name: At_Open_Flower_P Parameter: Plant Line Value: WS
  misc_feature: MA Experiment 20000264 PARAMETER Experiment Name: At_Open_Flower_P Parameter: Tissue Value: Open Flower vs. Whole Plant
  misc_feature: MA Experiment ID: 20000265 Result: Up-regulated in Transcription
  misc_feature: MA Experiment 20000265 PARAMETER Experiment Name: At_Open_Flower_P Parameter: Age (day) Value: 21
  misc_feature: MA Experiment 20000265 PARAMETER Experiment Name: At_Open_Flower_P Parameter: Plant Line Value: WS
  misc_feature: MA Experiment 20000265 PARAMETER Experiment Name: At_Open_Flower_P Parameter: Tissue Value: Closed Flower vs. Whole Plant
  misc_feature: MA Experiment ID: 20000286 Result: Up-regulated in Transcription
  misc_feature: MA Experiment 20000286 PARAMETER Experiment Name: At_Open_Flower_P Parameter: Age (day) Value: 21
  misc_feature: MA Experiment 20000286 PARAMETER Experiment Name: At_Open_Flower_P Parameter: Plant Line Value: WS
  misc_feature: MA Experiment 20000286 PARAMETER Experiment Name: At_Open_Flower_P Parameter: Tissue Value: Half Open vs. Whole Plant
  misc_feature: MA Experiment ID: 20000438 Result: Down-regulated in Transcription
  misc_feature: MA Experiment 20000438 PARAMETER Experiment Name: At_Shoots__P Parameter: Age (day) Value: 14
  misc_feature: MA Experiment 20000438 PARAMETER Experiment Name: At_Shoots__P Parameter: Tissue Value: Shoots vs. Whole Plant
  misc_feature: MA Experiment ID: 20001911 Result: Down-regulated in Transcription
  misc_feature: MA Experiment 20001911 PARAMETER Experiment Name: At_Drought_Reproduction_P Parameter: Age (day) Value: 40
  misc_feature: MA Experiment 20001911 PARAMETER Experiment Name: At_Drought_Reproduction_P Parameter: Organism Value: A. thaliana
  misc_feature: MA Experiment 20001911 PARAMETER Experiment Name: At_Drought_Reproduction_P Parameter: Plant Line Value: WS
  misc_feature: MA Experiment 20001911 PARAMETER Experiment Name: At_Drought_Reproduction_P Parameter: Timepoint (day) Value: 10
  misc_feature: MA Experiment 20001911 PARAMETER Experiment Name: At_Drought_Reproduction_P Parameter: Tissue Value: Flowers
  misc_feature: MA Experiment 20001911 PARAMETER Experiment Name: At_Drought_Reproduction_P Parameter: Treatment Value: Drought vs. No Drought
ctaaatgtactgaaaagaaacaccagtttaattaattatactttcctcacatataactatcaaccaagtacaaaacttttgtcaattctcaaaatcaactttcaccacataattatctaacatgtgtatgttccaaaaccagtttaaatgaattacttttcagaaaatacatgtatattaactctatctaataaagaagaaacacatacttatctcatagattccattcataaaactatgctttagtgagtaagaaaaccagtaatcaaacacaaattgacaagacactatatggatgtaaaaagtggggaaaatatggtgataaatagtagagaaaattaaaaagaaaaaataatattcctttataaatgtatatacccatctcttcaccagcacaaccttaccttccattttccattttctgcaacttctccaaatctcatactttccagaaaatcattttcccaagaaaaataaaactttcccctttgttcttctccccccaacagcaatcacggcgtaccaatcggagctaggaggagattcctctcccttgaggaaatctgggagaggaaagatcgaaatcaaacggatcgagaacacaacgaatcgtcaagtcactttttgcaaacgtagaaatggtttgctcaagaaagcttacgagctctctgttctctgtgatgctgaagtcgcactcatcgttttctctagccgtggtcgtctctatgagtactctaacaacagtgtaaaaggtactattgagaggtacaagaaggcaatatcggacaattctaacaccggatcggtggcagaaattaatgcacagtattatcaacaagaatcagccaaattgcgtcaacaaattatcagcatacaaaactccaacaggcaattgatgggtgagacgatagggtcaatgtctcccaaagagctcaggaacttggaaggcagattagagagaagtattacccgaatccgatccaagaagaatgagctcttattttctgaaatcgactacatgcagaaaagagaagttgatttgcataacgataaccagattcttcgtgcaaagatagctgaaaatgagaggaacaatccgagtataagtctaatgccaggaggatctaactacgagcagcttatgccaccacctcaaacgcaatctcaaccgtttgattcacggaattatttccaagtcgcggcattgcaacctaacaatcaccattactcatccgccggtcgccaagaccaaaccgctctccagttagtgtaatattggctgaaggaaatggcctggagtgaataaaaaccagaattgggttgagcaagcaatataaagctaatgcatgttatatatatatttatcccatgaatgttgtatcagtgaattcttatgcttnatgttgatgtgaaattaatatcttaaagacatgtcattaatgtgcttaatttgcttc

SEQ ID NO: 76536 - protein, 125 aa, Arabidopsis thaliana; identical to SEQ ID NO: 49348
  peptide (1)..(125): Ceres Seq. ID no. 7108338
  misc_feature (1)..(62): Pfam Name: K-box region Pfam Description: K-box region
  misc_feature (1)..(125): Homolog of NCBI NO: 22328782 NR Description: floral homeotic protein agamous (AGAMOUS);
  misc_feature (1)..(125): Homolog of NCBI NO: 1345505 NR Description: agamous gene product (AA 1-285) [Arabidopsis
  misc_feature (1)..(125): Homolog of NCBI NO: 7446527 NR Description: floral homeotic protein agamous - Arabidopsis
  misc_feature (1)..(125): Homolog of NCBI NO: 3915597 NR Description: AGAMOUS PROTEIN
  misc_feature (1)..(125): Homolog of NCBI NO: 399096 NR Description: AGAMOUS protein >gi|322650|pir||A43484 probable
  misc_feature (1)..(125): Homolog of NCBI NO: 2981131 NR Description: AGAMOUS homolog [Populus balsamifera subsp.
  misc_feature (1)..(124): Homolog of NCBI NO: 602900 NR Description: SLM1 [Silene latifolia]
  misc_feature (1)..(125): Homolog of NCBI NO: 3913005 NR Description: AGAMOUS protein (GAG2) >gi|861081|emb|CAA86585.1|
  misc_feature (1)..(125): Homolog of NCBI NO: 16973298 NR Description: C-type MADS box protein [Malus x domestica]
  misc_feature (1)..(122): Homolog of NCBI NO: 19743774 NR Description: AP3-like protein [Gossypium hirsutum]

SEQ ID NO: 76537 - protein, 118 aa, Arabidopsis thaliana; identical to SEQ ID NO: 49349
  peptide (1)..(118): Ceres Seq. ID no. 7108339
  misc_feature (1)..(55): Pfam Name: K-box region Pfam Description: K-box region
  misc_feature (1)..(118): Homolog of NCBI NO: 22328782 NR Description: floral homeotic protein agamous (AGAMOUS);
  misc_feature (1)..(118): Homolog of NCBI NO: 1345505 NR Description: agamous gene product (AA 1-285) [Arabidopsis
  misc_feature (1)..(118): Homolog of NCBI NO: 7446527 NR Description: floral homeotic protein agamous - Arabidopsis
  misc_feature (1)..(118): Homolog of NCBI NO: 3915597 NR Description: AGAMOUS PROTEIN
  misc_feature (1)..(118): Homolog of NCBI NO: 399096 NR Description: AGAMOUS protein >gi|322650|pir||A43484 probable
  misc_feature (1)..(118): Homolog of NCBI NO: 2981131 NR Description: AGAMOUS homolog [Populus balsamifera subsp.
  misc_feature (1)..(117): Homolog of NCBI NO: 602900 NR Description: SLM1 [Silene latifolia]
  misc_feature (1)..(118): Homolog of NCBI NO: 3913005 NR Description: AGAMOUS protein (GAG2) >gi|861081|emb|CAA86585.1|
  misc_feature (1)..(118): Homolog of NCBI NO: 16973298 NR Description: C-type MADS box protein [Malus x domestica]
  misc_feature (1)..(115): Homolog of NCBI NO: 19743774 NR Description: AP3-like protein [Gossypium hirsutum]

SEQ ID NO: 76538 - protein, 84 aa, Arabidopsis thaliana; identical to SEQ ID NO: 49350
  peptide (1)..(84): Ceres Seq. ID no. 7108340
  misc_feature (1)..(84): Homolog of NCBI NO: 22328782 NR Description: floral homeotic protein agamous (AGAMOUS);
  misc_feature (1)..(84): Homolog of NCBI NO: 1345505 NR Description: agamous gene product (AA 1-285) [Arabidopsis
  misc_feature (1)..(84): Homolog of NCBI NO: 7446527 NR Description: floral homeotic protein agamous - Arabidopsis
  misc_feature (1)..(84): Homolog of NCBI NO: 3915597 NR Description: AGAMOUS PROTEIN
  misc_feature (1)..(84): Homolog of NCBI NO: 399096 NR Description: AGAMOUS protein >gi|322650|pir||A43484 probable
  misc_feature (1)..(84): Homolog of NCBI NO: 2981131 NR Description: AGAMOUS homolog [Populus balsamifera subsp.
  misc_feature (1)..(83): Homolog of NCBI NO: 602900 NR Description: SLM1 [Silene latifolia]
  misc_feature (1)..(84): Homolog of NCBI NO: 3913005 NR Description: AGAMOUS protein (GAG2) >gi|861081|emb|CAA86585.1|
  misc_feature (1)..(84): Homolog of NCBI NO: 16973298 NR Description: C-type MADS box protein [Malus x domestica]
  misc_feature (1)..(81): Homolog of NCBI NO: 19743774 NR Description: AP3-like protein [Gossypium hirsutum]

SEQ ID NO: 76539 - DNA, 1789 bp, Arabidopsis thaliana
  misc_feature (1)..(1789): Ceres Seq. ID no. 7108345
  misc_feature: MA Experiment ID: 20000169 Result: Up-regulated in Transcription
  misc_feature: MA Experiment 20000169 PARAMETER Experiment Name: At_100uM_ABA_P Parameter: Age (day) Value: 14
  misc_feature: MA Experiment 20000169 PARAMETER Experiment Name: At_100uM_ABA_P Parameter: Organism Value: A. thaliana
  misc_feature: MA Experiment 20000169 PARAMETER Experiment Name: At_100uM_ABA_P Parameter: Plant Line Value: WS
  misc_feature: MA Experiment 20000169 PARAMETER Experiment Name: At_100uM_ABA_P Parameter: Timepoint (hr) Value: 6
  misc_feature: MA Experiment 20000169 PARAMETER Experiment Name: At_100uM_ABA_P Parameter: Tissue Value: Aerial
  misc_feature: MA Experiment 20000169 PARAMETER Experiment Name: At_100uM_ABA_P Parameter: Treatment Value: 100uM ABA vs. No Treatment
  misc_feature: MA Experiment ID: 20000173 Result: Down-regulated in Transcription
  misc_feature: MA Experiment 20000173 PARAMETER Experiment Name: At_42deg_Heat_P Parameter: Age (day) Value: 14
  misc_feature: MA Experiment 20000173 PARAMETER Experiment Name: At_42deg_Heat_P Parameter: Organism Value: A. thaliana
  misc_feature: MA Experiment 20000173 PARAMETER Experiment Name: At_42deg_Heat_P Parameter: Plant Line Value: WS
  misc_feature: MA Experiment 20000173 PARAMETER Experiment Name: At_42deg_Heat_P Parameter: Temperature (deg C) Value: 42 vs. 22
  misc_feature: MA Experiment 20000173 PARAMETER Experiment Name: At_42deg_Heat_P Parameter: Timepoint (hr) Value: 6
  misc_feature: MA Experiment 20000173 PARAMETER Experiment Name: At_42deg_Heat_P Parameter: Tissue Value: Aerial
  misc_feature: MA Experiment ID: 20000179 Result: Up-regulated in Transcription
  misc_feature: MA Experiment 20000179 PARAMETER Experiment Name: At_Germinating_Seeds_P Parameter: Age (hr) Value: 6 vs. 0
  misc_feature: MA Experiment 20000179 PARAMETER Experiment Name: At_Germinating_Seeds_P Parameter: Tissue Value: Germinating Seeds
  misc_feature: MA Experiment ID: 20000180 Result: Up-regulated in Transcription
  misc_feature: MA Experiment 20000180 PARAMETER Experiment Name: At_Germinating_Seeds_P Parameter: Age (hr) Value: 24 vs. 0
  misc_feature: MA Experiment 20000180 PARAMETER Experiment Name: At_Germinating_Seeds_P Parameter: Tissue Value: Germinating Seeds
  misc_feature: MA Experiment ID: 20000184 Result: Up-regulated in Transcription
  misc_feature: MA Experiment 20000184 PARAMETER Experiment Name: At_Shoots__P Parameter: Age (day) Value: 7
  misc_feature: MA Experiment 20000184 PARAMETER Experiment Name: At_Shoots__P Parameter: Tissue Value: Shoots vs. Whole Plant
  misc_feature: MA Experiment ID: 20000185 Result: Up-regulated in Transcription
  misc_feature: MA Experiment 20000185 PARAMETER Experiment Name: At_Roots__P Parameter: Age (day) Value: 7 vs. 21
  misc_feature: MA Experiment 20000185 PARAMETER Experiment Name: At_Roots__P Parameter: Organism Value: A. thaliana
  misc_feature: MA Experiment 20000185 PARAMETER Experiment Name: At_Roots__P Parameter: Tissue Value: Roots vs. Whole Plant
  misc_feature: MA Experiment ID: 20000235 Result: Down-regulated in Transcription
  misc_feature: MA Experiment 20000235 PARAMETER Experiment Name: At_Siliques_P Parameter: Age (day) Value: 21
  misc_feature: MA Experiment 20000235 PARAMETER Experiment Name: At_Siliques_P Parameter: Organism Value: A. thaliana
  misc_feature: MA Experiment 20000235 PARAMETER Experiment Name: At_Siliques_P Parameter: Plant Line Value: WS
  misc_feature: MA Experiment 20000235 PARAMETER Experiment Name: At_Siliques_P Parameter: Tissue Value: 5-10mm Siliques vs. Whole Plant
  misc_feature: MA Experiment ID: 20000264 Result: Down-regulated in Transcription
  misc_feature: MA Experiment 20000264 PARAMETER Experiment Name: At_Open_Flower_P Parameter: Age (day) Value: 21
  misc_feature: MA Experiment 20000264 PARAMETER Experiment Name: At_Open_Flower_P Parameter: Plant Line Value: WS
  misc_feature: MA Experiment 20000264 PARAMETER Experiment Name: At_Open_Flower_P Parameter: Tissue Value: Open Flower vs. Whole Plant
  misc_feature: MA Experiment ID: 20000286 Result: Down-regulated in Transcription
  misc_feature: MA Experiment 20000286 PARAMETER Experiment Name: At_Open_Flower_P Parameter: Age (day) Value: 21
  misc_feature: MA Experiment 20000286 PARAMETER Experiment Name: At_Open_Flower_P Parameter: Plant Line Value: WS
  misc_feature: MA Experiment 20000286 PARAMETER Experiment Name: At_Open_Flower_P Parameter: Tissue Value: Half Open vs. Whole Plant
  misc_feature: MA Experiment ID: 20000438 Result: Up-regulated in Transcription
  misc_feature: MA Experiment 20000438 PARAMETER Experiment Name: At_Shoots__P Parameter: Age (day) Value: 14
  misc_feature: MA Experiment 20000438 PARAMETER Experiment Name: At_Shoots__P Parameter: Tissue Value: Shoots vs. Whole Plant
  misc_feature: MA Experiment ID: 20000439 Result: Up-regulated in Transcription
  misc_feature: MA Experiment 20000439 PARAMETER Experiment Name: At_Roots__P Parameter: Age (day) Value: 14 vs. 21
  misc_feature: MA Experiment 20000439 PARAMETER Experiment Name: At_Roots__P Parameter: Organism Value: A. thaliana
  misc_feature: MA Experiment 20000439 PARAMETER Experiment Name: At_Roots__P Parameter: Tissue Value: Roots vs. Whole Plant
  misc_feature: MA Experiment ID: 20000445 Result: Down-regulated in Transcription
  misc_feature: MA Experiment 20000445 PARAMETER Experiment Name: At_100uM_NAA__P Parameter: Age (day) Value: 14
  misc_feature: MA Experiment 20000445 PARAMETER Experiment Name: At_100uM_NAA__P Parameter: Organism Value: A. thaliana
  misc_feature: MA Experiment 20000445 PARAMETER Experiment Name: At_100uM_NAA__P Parameter: Plant Line Value: WS
  misc_feature: MA Experiment 20000445 PARAMETER Experiment Name: At_100uM_NAA__P Parameter: Timepoint (hr) Value: 6
  misc_feature: MA Experiment 20000445 PARAMETER Experiment Name: At_100uM_NAA__P Parameter: Tissue Value: Aerial
  misc_feature: MA Experiment 20000445 PARAMETER Experiment Name: At_100uM_NAA__P Parameter: Treatment Value: 100uM NAA vs. No Treatment
  misc_feature: MA Experiment ID: 20000452 Result: Up-regulated in Transcription
  misc_feature: MA Experiment 20000452 PARAMETER Experiment Name: At_CS6879_Shoots-Roots_P Parameter: Age (day) Value: 14
  misc_feature: MA Experiment 20000452 PARAMETER Experiment Name: At_CS6879_Shoots-Roots_P Parameter: Organism Value: A. thaliana
  misc_feature: MA Experiment 20000452 PARAMETER Experiment Name: At_CS6879_Shoots-Roots_P Parameter: Plant Line Value: CS6879 vs. WS
  misc_feature: MA Experiment 20000452 PARAMETER Experiment Name: At_CS6879_Shoots-Roots_P Parameter: Tissue Value: Shoots
  misc_feature: MA Experiment ID: 20000453 Result: Up-regulated in Transcription
  misc_feature: MA Experiment 20000453 PARAMETER Experiment Name: At_100uM_ABA_P Parameter: Age (day) Value: 15
  misc_feature: MA Experiment 20000453 PARAMETER Experiment Name: At_100uM_ABA_P Parameter: Organism Value: A. thaliana
  misc_feature: MA Experiment 20000453 PARAMETER Experiment Name: At_100uM_ABA_P Parameter: Plant Line Value: WS
  misc_feature: MA Experiment 20000453 PARAMETER Experiment Name: At_100uM_ABA_P Parameter: Timepoint (hr) Value: 24
  misc_feature: MA Experiment 20000453 PARAMETER Experiment Name: At_100uM_ABA_P Parameter: Tissue Value: Aerial
  misc_feature: MA Experiment 20000453 PARAMETER Experiment Name: At_100uM_ABA_P Parameter: Treatment Value: 100uM ABA vs. No Treatment
  misc_feature: MA Experiment ID: 20000455 Result: Up-regulated in Transcription
  misc_feature: MA Experiment 20000455 PARAMETER Experiment Name: At_100uM_ABA_P Parameter: Age (day) Value: 16
  misc_feature: MA Experiment 20000455 PARAMETER Experiment Name: At_100uM_ABA_P Parameter: Organism Value: A. thaliana
  misc_feature: MA Experiment 20000455 PARAMETER Experiment Name: At_100uM_ABA_P Parameter: Plant Line Value: WS
  misc_feature: MA Experiment 20000455 PARAMETER Experiment Name: At_100uM_ABA_P Parameter: Timepoint (hr) Value: 48
  misc_feature: MA Experiment 20000455 PARAMETER Experiment Name: At_100uM_ABA_P Parameter: Tissue Value: Aerial
  misc_feature: MA Experiment 20000455 PARAMETER Experiment Name: At_100uM_ABA_P Parameter: Treatment Value: 100uM ABA vs. No Treatment
  misc_feature: MA Experiment ID: 20000495 Result: Up-regulated in Transcription
  misc_feature: MA Experiment 20000495 PARAMETER Experiment Name: At_Guard_Cells_P Parameter: Harvest Date Value: 8/2/2002
  misc_feature: MA Experiment 20000495 PARAMETER Experiment Name: At_Guard_Cells_P Parameter: Organism Value: A. thaliana
  misc_feature: MA Experiment 20000495 PARAMETER Experiment Name: At_Guard_Cells_P Parameter: Tissue Value: Guard Cells vs. Leaves
  misc_feature: MA Experiment ID: 20000794 Result: Down-regulated in Transcription
  misc_feature: MA Experiment 20000794 PARAMETER Experiment Name: At_Petals_P Parameter: Age (day) Value: 23-25 days
  misc_feature: MA Experiment 20000794 PARAMETER Experiment Name: At_Petals_P Parameter: Plant Line Value: WS
  misc_feature: MA Experiment 20000794 PARAMETER Experiment Name: At_Petals_P Parameter: Tissue Value: Petals vs. Whole plant
  misc_feature: MA Experiment ID: 20001450 Result: Down-regulated in Transcription
  misc_feature: MA Experiment 20001450 PARAMETER Experiment Name: At_Far-red-induction_P Parameter: Age (day) Value: 7
  misc_feature: MA Experiment 20001450 PARAMETER Experiment Name: At_Far-red-induction_P Parameter: Light Value: Far-red vs. White
  misc_feature: MA Experiment 20001450 PARAMETER Experiment Name: At_Far-red-induction_P Parameter: Organism Value: A. thaliana
  misc_feature: MA Experiment 20001450 PARAMETER Experiment Name: At_Far-red-induction_P Parameter: Plant Line Value: Columbia
  misc_feature: MA Experiment 20001450 PARAMETER Experiment Name: At_Far-red-induction_P Parameter: Timepoint (hr) Value: 8
  misc_feature: MA Experiment 20001450 PARAMETER Experiment Name: At_Far-red-induction_P Parameter: Tissue Value: Whole Plant
  misc_feature: MA Experiment ID: 20001451 Result: Down-regulated in Transcription
  misc_feature: MA Experiment 20001451 PARAMETER Experiment Name: At_Far-red-induction_P Parameter: Age (day) Value: 7
  misc_feature: MA Experiment 20001451 PARAMETER Experiment Name: At_Far-red-induction_P Parameter: Light Value: Far-red vs. White
  misc_feature: MA Experiment 20001451 PARAMETER Experiment Name: At_Far-red-induction_P Parameter: Organism Value: A. thaliana
  misc_feature: MA Experiment 20001451 PARAMETER Experiment Name: At_Far-red-induction_P Parameter: Plant Line Value: Columbia
  misc_feature: MA Experiment 20001451 PARAMETER Experiment Name: At_Far-red-induction_P Parameter: Timepoint (hr) Value: 24
  misc_feature: MA Experiment 20001451 PARAMETER Experiment Name: At_Far-red-induction_P Parameter: Tissue Value: Whole Plant
  misc_feature: MA Experiment ID: 20001558 Result: Down-regulated in Transcription
  misc_feature: MA Experiment 20001558 PARAMETER Experiment Name: At_Drought_Soil_Dry_P Parameter: Age (day) Value: 27
  misc_feature: MA Experiment 20001558 PARAMETER Experiment Name: At_Drought_Soil_Dry_P Parameter: Organism Value: A. thaliana
  misc_feature: MA Experiment 20001558 PARAMETER Experiment Name: At_Drought_Soil_Dry_P Parameter: Plant Line Value: WS
  misc_feature: MA Experiment 20001558 PARAMETER Experiment Name: At_Drought_Soil_Dry_P Parameter: Post Timepoint (hr) Value: 6
  misc_feature: MA Experiment 20001558 PARAMETER Experiment Name: At_Drought_Soil_Dry_P Parameter: Post-Treatment Value: Re-Water vs. No Drought
  misc_feature: MA Experiment 20001558 PARAMETER Experiment Name: At_Drought_Soil_Dry_P Parameter: Timepoint (day) Value: 13
  misc_feature: MA Experiment 20001558 PARAMETER Experiment Name: At_Drought_Soil_Dry_P Parameter: Treatment Value: Drought vs. No Drought
  misc_feature: MA Experiment ID: 20001768 Result: Down-regulated in Transcription
  misc_feature: MA Experiment 20001768 PARAMETER Experiment Name: At_Far-red-enriched-adult_P Parameter: Age (day) Value: 28
  misc_feature: MA Experiment 20001768 PARAMETER Experiment Name: At_Far-red-enriched-adult_P Parameter: Light Value: Far-red enriched vs. White
  misc_feature: MA Experiment 20001768 PARAMETER Experiment Name: At_Far-red-enriched-adult_P Parameter: Organism Value: A. thaliana
  misc_feature: MA Experiment 20001768 PARAMETER Experiment Name: At_Far-red-enriched-adult_P Parameter: Plant Line Value: Columbia
  misc_feature: MA Experiment 20001768 PARAMETER Experiment Name: At_Far-red-enriched-adult_P Parameter: Timepoint (hr) Value: 1
  misc_feature: MA Experiment 20001768 PARAMETER Experiment Name: At_Far-red-enriched-adult_P Parameter: Tissue Value: Aerial
  misc_feature: Pfam Name: Glyco_hydro_1 Pfam Description: Glycosyl hydrolase family 1
aattcccgggtcgacccacgcgtccgagaattacaaacaaaaatggttttgcaaaagcttcctctcattgggctgcttttgctcctgaccatcgtcgcctctccagcaaatgcagatggacctgtttgcccgccgtcgaacaaactaagccgggcaagtttccctgaaggttttttatttggcacggctactgcggcataccaggtaccaaggttcgatttaatgaaacttgttcgtggaccagccttatgggacatctactgtagaagatatccagagaggtgcaataacgataacggcgatgtggccgttgatttcttccatcgttataaggaagatatccaactaatgaagaatctaaacacagacgcctttagaatgtctatcgcatggccaagaatatttcctcatgggagaaaggagaaaggagtgagtcaagctggtgtgcaattctaccacgacctcatcgacgagctcataaaaaatggtataactccattcgttactgtttttcactgggacactccacaagatttagaagatgaatatggcggctttttaagcgaaaggattgtgaaggatttccgagagtatgcagattttgttttccaagaatacggtggaaaagtgaaacattggatcactttcaatgagccatgggttttctcgcacgctggctatgacgtaggcaaaaaggcacctggtcgttcctcttcttacgtcaatgctaaatgccaagacggacgatcaggatacgaggcttaccttgtcactcacaatctccttatctctcacgcagaagcagttgaagcttaccggaaatgcgaaaagtgtaaaggtgggaagatcggaattgcacatagtcctgcttggttcgaagcacatgaccttgctgattcacaagacggtgcgtccatcgaccgtgcacttgactttattttgggatggcatctagacacaactacatttggagattatccacagatcatgaaagacattgttggacatagattgcctaaatttacaactgagcagaaagcaaaactgaaagcttctaccgatttcgttgggctcaactactatacttcagtgttttcaaaccatttggagaaacctgatccttcaaaaccaagatggatgcaagattctcttattacatgggagtctaagaatgcgcaaaattacgccattggtagcaagcctttgaccgctgcattgaacgtttactcgagaggttttagaagtcttttgaagtacattaaggacaaatacgcaaatccggaaattatgatcatggaaaacggatatggagaagaactaggggcctcagattctgttgctgttggtaccgctgatcataacaggaaatattatcttcagaggcatcttttgagtatgcaagaagctgtttgcatcgacaaagtgaatgttacaggatactttgtatggtcattgttggataacttcgagtggcaagatggttacaaaaacagatttggactctactacgttgatttcaaaaataacctcacacgttacgagaaagaatccggcaagtattacaaggatttcctcagtcaaggtgttcgtccatccgcgctcaagaaggatgagctttaagctatttctgtttcaatgtgtttttcctatgttttactttgtgagtgaccaagattcatgaggtcttggttctaataaaaagagtttatttttcttctcatttttcattgtctacatgatttgccagatctataaggctctggttataataaaatgatcctttgtgcct

SEQ ID NO: 76540 - protein, 539 aa, Arabidopsis thaliana
  peptide (1)..(539): Ceres Seq. ID no. 7108346
  misc_feature: Pfam Name: Glyco_hydro_1 Pfam Description: Glycosyl hydrolase family 1
  misc_feature (15)..(539): Homolog of NCBI NO: 1732570 NR Description: beta-glucosidase [Arabidopsis thaliana]
  misc_feature (15)..(539): Homolog of NCBI NO: 15232626 NR Description: glycosyl hydrolase family 1; protein id: supported by cDNA: gi_14423459, supported by cDNA: gi_1732569 thaliana] >gi|6478919|gb|AAF14024.1|AC011436_8 thioglucosidase 3D
  misc_feature (15)..(539): Homolog of NCBI NO: 1363489 NR Description: thioglucosidase (EC 3.2.1.147) 3D precursor - thaliana >gi|984052|emb|CAA61592.1| thioglucoside glucohydrolase thaliana] >gi|5524767|emb|CAB50792.1| thioglucoside
  misc_feature (15)..(539): Homolog of NCBI NO: 15219623 NR Description: glycosyl hydrolase family 1; protein id: supported by cDNA: gi_18389261 [Arabidopsis thaliana]
  misc_feature (15)..(539): Homolog of NCBI NO: 15219605 NR Description: glycosyl hydrolase family 1, beta-glucosidase; id: At1g66270.1, supported by cDNA: gi_15010793 [Arabidopsis
  misc_feature (15)..(539): Homolog of NCBI NO: 2286069 NR Description: beta-glucosidase [Arabidopsis thaliana]
  misc_feature (15)..(539): Homolog of NCBI NO: 15241841 NR Description: glycosyl hydrolase family 1; protein id:
  misc_feature (104)..(539): Homolog of NCBI NO: 1732572 NR Description: beta-glucosidase [Brassica nigra]
  misc_feature (23)..(539): Homolog of NCBI NO: 9502167 NR Description: contains similarity to Pfam family PF00232
  misc_feature (18)..(537): Homolog of NCBI NO: 12043529 NR Description: beta-glucosidase 1 [Arabidopsis thaliana]
NSRVDPRVRELQTKMVLQKLPLIGLLLLLTIVASPANADGPVCPPSNKLSRASFPEGFLFGTATAAYQVPRFDLMKLVRGPALWDIYCRRYPERCNNDNGDVAVDFFHRYKEDIQLMKNLNTDAFRMSIAWPRIFPHGRKEKGVSQAGVQFYHDLIDELIKNGITPFVTVFHWDTPQDLEDEYGGFLSERIVKDFREYADFVFQEYGGKVKHWITFNEPWVFSHAGYDVGKKAPGRSSSYVNAKCQDGRSGYEAYLVTHNLLISHAEAVEAYRKCEKCKGGKIGIAHSPAWFEAHDLADSQDGASIDRALDFILGWHLDTTTFGDYPQIMKDIVGHRLPKFTTEQKAKLKASTDFVGLNYYTSVFSNHLEKPDPSKPRWMQDSLITWESKNAQNYAIGSKPLTAALNVYSRGFRSLLKYIKDKYANPEIMIMENGYGEELGASDSVAVGTADHNRKYYLQRHLLSMQEAVCIDKVNVTGYFVWSLLDNFEWQDGYKNRFGLYYVDFKNNLTRYEKESGKYYKDFLSQGVRPSALKKDEL

SEQ ID NO: 76541 - protein, 525 aa, Arabidopsis thaliana
  peptide (1)..(525): Ceres Seq. ID no. 7108347
  misc_feature: Pfam Name: Glyco_hydro_1 Pfam Description: Glycosyl hydrolase family 1
  misc_feature (1)..(525): Homolog of NCBI NO: 1732570 NR Description: beta-glucosidase [Arabidopsis thaliana]
  misc_feature (1)..(525): Homolog of NCBI NO: 15232626 NR Description: glycosyl hydrolase family 1; protein id: supported by cDNA: gi_14423459, supported by cDNA: gi_1732569 thaliana] >gi|6478919|gb|AAF14024.1|AC011436_8 thioglucosidase 3D
  misc_feature (1)..(525): Homolog of NCBI NO: 1363489 NR Description: thioglucosidase (EC 3.2.1.147) 3D precursor - thaliana >gi|984052|emb|CAA61592.1| thioglucoside glucohydrolase thaliana] >gi|5524767|emb|CAB50792.1| thioglucoside
  misc_feature (1)..(525): Homolog of NCBI NO: 15219623 NR Description: glycosyl hydrolase family 1; protein id: supported by cDNA: gi_18389261 [Arabidopsis thaliana]
  misc_feature (1)..(525): Homolog of NCBI NO: 15219605 NR Description: glycosyl hydrolase family 1, beta-glucosidase; id: At1g66270.1, supported by cDNA: gi_15010793 [Arabidopsis
  misc_feature (1)..(525): Homolog of NCBI NO: 2286069 NR Description: beta-glucosidase [Arabidopsis thaliana]
  misc_feature (1)..(525): Homolog of NCBI NO: 15241841 NR Description: glycosyl hydrolase family 1; protein id:
  misc_feature (90)..(525): Homolog of NCBI NO: 1732572 NR Description: beta-glucosidase [Brassica nigra]
  misc_feature (9)..(525): Homolog of NCBI NO: 9502167 NR Description: contains similarity to Pfam family PF00232
  misc_feature (4)..(523): Homolog of NCBI NO: 12043529 NR Description: beta-glucosidase 1 [Arabidopsis thaliana]
MVLQKLPLIGLLLLLTIVASPANADGPVCPPSNKLSRASFPEGFLFGTATAAYQVPRFDLMKLVRGPALWDIYCRRYPERCNNDNGDVAVDFFHRYKEDIQLMKNLNTDAFRMSIAWPRIFPHGRKEKGVSQAGVQFYHDLIDELIKNGITPFVTVFHWDTPQDLEDEYGGFLSERIVKDFREYADFVFQEYGGKVKHWITFNEPWVFSHAGYDVGKKAPGRSSSYVNAKCQDGRSGYEAYLVTHNLLISHAEAVEAYRKCEKCKGGKIGIAHSPAWFEAHDLADSQDGASIDRALDFILGWHLDTTTFGDYPQIMKDIVGHRLPKFTTEQKAKLKASTDFVGLNYYTSVFSNHLEKPDPSKPRWMQDSLITWESKNAQNYAIGSKPLTAALNVYSRGFRSLLKYIKDKYANPEIMIMENGYGEELGASDSVAVGTADHNRKYYLQRHLLSMQEAVCIDKVNVTGYFVWSLLDNFEWQDGYKNRFGLYYVDFKNNLTRYEKESGKYYKDFLSQGVRPSALKKDEL

SEQ ID NO: 76542 - protein, 465 aa, Arabidopsis thaliana
  peptide (1)..(465): Ceres Seq. ID no. 7108348
  misc_feature: Pfam Name: Glyco_hydro_1 Pfam Description: Glycosyl hydrolase family 1
  misc_feature (1)..(465): Homolog of NCBI NO: 1732570 NR Description: beta-glucosidase [Arabidopsis thaliana]
  misc_feature (1)..(465): Homolog of NCBI NO: 15232626 NR Description: glycosyl hydrolase family 1; protein id: supported by cDNA: gi_14423459, supported by cDNA: gi_1732569 thaliana] >gi|6478919|gb|AAF14024.1|AC011436_8 thioglucosidase 3D
  misc_feature (1)..(465): Homolog of NCBI NO: 1363489 NR Description: thioglucosidase (EC 3.2.1.147) 3D precursor - thaliana >gi|984052|emb|CAA61592.1| thioglucoside glucohydrolase thaliana] >gi|5524767|emb|CAB50792.1| thioglucoside
  misc_feature (1)..(465): Homolog of NCBI NO: 15219623 NR Description: glycosyl hydrolase family 1; protein id: supported by cDNA: gi_18389261 [Arabidopsis thaliana]
  misc_feature (1)..(465): Homolog of NCBI NO: 15219605 NR Description: glycosyl hydrolase family 1, beta-glucosidase; id: At1g66270.1, supported by cDNA: gi_15010793 [Arabidopsis
  misc_feature (1)..(465): Homolog of NCBI NO: 2286069 NR Description: beta-glucosidase [Arabidopsis thaliana]
  misc_feature (1)..(465): Homolog of NCBI NO: 15241841 NR Description: glycosyl hydrolase family 1; protein id:
  misc_feature (30)..(465): Homolog of NCBI NO: 1732572 NR Description: beta-glucosidase [Brassica nigra]
  misc_feature (1)..(465): Homolog of NCBI NO: 9502167 NR Description: contains similarity to Pfam family PF00232
  misc_feature (1)..(463): Homolog of NCBI NO: 12043529 NR Description: beta-glucosidase 1 [Arabidopsis thaliana]
MKLVRGPALWDIYCRRYPERCNNDNGDVAVDFFHRYKEDIQLMKNLNTDAFRMSIAWPRIFPHGRKEKGVSQAGVQFYHDLIDELIKNGITPFVTVFHWDTPQDLEDEYGGFLSERIVKDFREYADFVFQEYGGKVKHWITFNEPWVFSHAGYDVGKKAPGRSSSYVNAKCQDGRSGYEAYLVTHNLLISHAEAVEAYRKCEKCKGGKIGIAHSPAWFEAHDLADSQDGASIDRALDFILGWHLDTTTFGDYPQIMKDIVGHRLPKFTTEQKAKLKASTDFVGLNYYTSVFSNHLEKPDPSKPRWMQDSLITWESKNAQNYAIGSKPLTAALNVYSRGFRSLLKYIKDKYANPEIMIMENGYGEELGASDSVAVGTADHNRKYYLQRHLLSMQEAVCIDKVNVTGYFVWSLLDNFEWQDGYKNRFGLYYVDFKNNLTRYEKESGKYYKDFLSQGVRPSALKKDEL

SEQ ID NO: 76543 - DNA, 793 bp, Arabidopsis thaliana
  misc_feature (1)..(793): Ceres Seq. ID no. 7108359
  misc_feature: MA Experiment ID: 108434 Result: Up-regulated in Transcription
  misc_feature: MA Experiment 108434 PARAMETER Experiment Name: At_Root_Tips_cDNA_P Parameter: Tissue Value: Root Tips
  misc_feature: MA Experiment ID: 108462 Result: Down-regulated in Transcription
  misc_feature: MA Experiment 108462 PARAMETER Experiment Name: At_Germinating_Seeds_cDNA_P Parameter: Age (day) Value: 2 vs. 0
  misc_feature: MA Experiment 108462 PARAMETER Experiment Name: At_Germinating_Seeds_cDNA_P Parameter: Tissue Value: Germinating Seeds
  misc_feature: MA Experiment ID: 108463 Result: Down-regulated in Transcription
  misc_feature: MA Experiment 108463 PARAMETER Experiment Name: At_Germinating_Seeds_cDNA_P Parameter: Age (day) Value: 3 vs. 0
  misc_feature: MA Experiment 108463 PARAMETER Experiment Name: At_Germinating_Seeds_cDNA_P Parameter: Tissue Value: Germinating Seeds
  misc_feature: MA Experiment ID: 108464 Result: Down-regulated in Transcription
  misc_feature: MA Experiment 108464 PARAMETER Experiment Name: At_Germinating_Seeds_cDNA_P Parameter: Age (day) Value: 4 vs. 0
  misc_feature: MA Experiment 108464 PARAMETER Experiment Name: At_Germinating_Seeds_cDNA_P Parameter: Tissue Value: Germinating Seeds
  misc_feature: MA Experiment ID: 108569 Result: Down-regulated in Transcription
  misc_feature: MA Experiment 108569 PARAMETER Experiment Name: At_0.001%_MeJA__cDNA_P Parameter: Timepoint (hr) Value: 6
  misc_feature: MA Experiment 108569 PARAMETER Experiment Name: At_0.001%_MeJA__cDNA_P Parameter: Tissue Value: Aerial
  misc_feature: MA Experiment 108569 PARAMETER Experiment Name: At_0.001%_MeJA__cDNA_P Parameter: Treatment Value: 0.001% MeJA vs. No Treatment
  misc_feature: MA Experiment ID: 108595 Result: Down-regulated in Transcription
  misc_feature: MA Experiment 108595 PARAMETER Experiment Name: At_Ler-pi_Ovule_cDNA_P Parameter: Plant Line Value: null
  misc_feature: MA Experiment ID: 20000227 Result: Up-regulated in Transcription
  misc_feature: MA Experiment 20000227 PARAMETER Experiment Name: At_Root-Tips-vs-Tops_P Parameter: Tissue Value: Root Tips vs. Root Tops
  misc_feature: MA Experiment ID: 20000496 Result: Up-regulated in Transcription
  misc_feature: MA Experiment 20000496 PARAMETER Experiment Name: At_Guard_Cells_P Parameter: Harvest Date Value: 7/19/2002
  misc_feature: MA Experiment 20000496 PARAMETER Experiment Name: At_Guard_Cells_P Parameter: Organism Value: Canola
  misc_feature: MA Experiment 20000496 PARAMETER Experiment Name: At_Guard_Cells_P Parameter: Tissue Value: Guard Cells vs. Leaves
  misc_feature: MA Experiment ID: 20001557 Result: Up-regulated in Transcription
  misc_feature: MA Experiment 20001557 PARAMETER Experiment Name: At_Drought_Soil_Dry_P Parameter: Age (day) Value: 27
  misc_feature: MA Experiment 20001557 PARAMETER Experiment Name: At_Drought_Soil_Dry_P Parameter: Organism Value: A. thaliana
  misc_feature: MA Experiment 20001557 PARAMETER Experiment Name: At_Drought_Soil_Dry_P Parameter: Plant Line Value: WS
  misc_feature: MA Experiment 20001557 PARAMETER Experiment Name: At_Drought_Soil_Dry_P Parameter: Post Timepoint (hr) Value: 3
  misc_feature: MA Experiment 20001557 PARAMETER Experiment Name: At_Drought_Soil_Dry_P Parameter: Post-Treatment Value: Re-Water vs. No Drought
  misc_feature: MA Experiment 20001557 PARAMETER Experiment Name: At_Drought_Soil_Dry_P Parameter: Timepoint (day) Value: 13
  misc_feature: MA Experiment 20001557 PARAMETER Experiment Name: At_Drought_Soil_Dry_P Parameter: Treatment Value: Drought vs. No Drought
  misc_feature: MA Experiment ID: 20001558 Result: Up-regulated in Transcription
  misc_feature: MA Experiment 20001558 PARAMETER Experiment Name: At_Drought_Soil_Dry_P Parameter: Age (day) Value: 27
  misc_feature: MA Experiment 20001558 PARAMETER Experiment Name: At_Drought_Soil_Dry_P Parameter: Organism Value: A. thaliana
  misc_feature: MA Experiment 20001558 PARAMETER Experiment Name: At_Drought_Soil_Dry_P Parameter: Plant Line Value: WS
  misc_feature: MA Experiment 20001558 PARAMETER Experiment Name: At_Drought_Soil_Dry_P Parameter: Post Timepoint (hr) Value: 6
  misc_feature: MA Experiment 20001558 PARAMETER Experiment Name: At_Drought_Soil_Dry_P Parameter: Post-Treatment Value: Re-Water vs. No Drought
  misc_feature: MA Experiment 20001558 PARAMETER Experiment Name: At_Drought_Soil_Dry_P Parameter: Timepoint (day) Value: 13
  misc_feature: MA Experiment 20001558 PARAMETER Experiment Name: At_Drought_Soil_Dry_P Parameter: Treatment Value: Drought vs. No Drought
  misc_feature: MA Experiment ID: 20001560 Result: Up-regulated in Transcription
  misc_feature: MA Experiment 20001560 PARAMETER Experiment Name: At_Drought_Soil_Dry_P Parameter: Age (day) Value: 28
  misc_feature: MA Experiment 20001560 PARAMETER Experiment Name: At_Drought_Soil_Dry_P Parameter: Organism Value: A. thaliana
  misc_feature: MA Experiment 20001560 PARAMETER Experiment Name: At_Drought_Soil_Dry_P Parameter: Plant Line Value: WS
  misc_feature: MA Experiment 20001560 PARAMETER Experiment Name: At_Drought_Soil_Dry_P Parameter: Post Timepoint (hr) Value: None
  misc_feature: MA Experiment 20001560 PARAMETER Experiment Name: At_Drought_Soil_Dry_P Parameter: Post-Treatment Value: None
  misc_feature: MA Experiment 20001560 PARAMETER Experiment Name: At_Drought_Soil_Dry_P Parameter: Timepoint (day) Value: 14
  misc_feature: MA Experiment 20001560 PARAMETER Experiment Name: At_Drought_Soil_Dry_P Parameter: Treatment Value: Drought vs. No Drought
gagtaatttagctcaactgcgaggaatatggcgaccgatgatgtgaacgagcctctcccggcggcggcggaattaccggcgacagaggcggagaaacaaccacacaagctcgaaagaaagtggagtttctggttcgataaccaatcaaagaaaggcgccgcctggggagcttctcttcgtaaagcctatactttcgacaccgtcgaagatttttggggattgcacgagactatatttcagactagcaaattgacagcgaatgctgaaattcacttgttcaaagctggtgttgagccaaagtgggaagatccagagtgtgctaatggaggaaagtggacttgggttgttactgctaataggaaggaagctttagacaaaggctggcttgaaactttgatggctttgattggagagcaatttgatgaagcagatgagatttgtggtgtggttgctagtgtccgtccacagtcgaagcaagacaagctctccttgtggactaggacgaagtctaatgaagctgttctgatgggtattgggaagaagtggaaggagatacttgatgtcaccgacaagataactttcaataaccatgatgattccagaagaagccggttcactgtctgaagaaacgagtgtgaagccagaggaagatgcaatatggctttttttgtgatactgtttggtcggtttactcaaatagctgagacatttagggacattcactttgaggtgtaaactctacaaagttttctgtttcattaaaatgattttttgttataaattaagttgagtt

SEQ ID NO: 76544 - protein, 198 aa, Arabidopsis thaliana; identical to SEQ ID NO: 35560
  peptide (1)..(198): Ceres Seq. ID no. 7108360
  misc_feature (1)..(198): Pfam Name: Eukaryotic initiation factor 4E Pfam Description: Eukaryotic initiation factor 4E
  misc_feature (1)..(198): Homolog of NCBI NO: 2209274 NR Description: eukaryotic initiation factor (iso)-4F p28 subunit
  misc_feature (1)..(198): Homolog of NCBI NO: 15238558 NR Description: eIF4Eiso protein (emb|CAA71579.1); protein id: supported by cDNA: 23770., supported by cDNA: gi_15451099, by cDNA: gi_20148370 [Arabidopsis thaliana]
  misc_feature (12)..(192): Homolog of NCBI NO: 32698526 NR Description: eukaryotic translation initiation factor iso4E
  misc_feature (9)..(195): Homolog of NCBI NO: 37535224 NR Description: cap-binding protein p28 [Oryza sativa (japonica
  misc_feature (9)..(195): Homolog of NCBI NO: 1352442 NR Description: EUKARYOTIC TRANSLATION INITIATION FACTOR 4E
  misc_feature (9)..(195): Homolog of NCBI NO: 6016335 NR Description: EUKARYOTIC TRANSLATION INITIATION FACTOR 4E
  misc_feature (13)..(195): Homolog of NCBI NO: 170753 NR Description: initiation factor (iso)4F p28 subunit
  misc_feature (13)..(195): Homolog of NCBI NO: 547713 NR Description: EUKARYOTIC TRANSLATION INITIATION FACTOR 4E
  misc_feature (1)..(193): Homolog of NCBI NO: 6016334 NR Description: EUKARYOTIC TRANSLATION INITIATION FACTOR 4E
  misc_feature (1)..(193): Homolog of NCBI NO: 34905982 NR Description: eukaryotic translation initiation factor 4E

SEQ ID NO: 76545 - DNA, 1302 bp, Arabidopsis thaliana
  misc_feature (1)..(1302): Ceres Seq. ID no. 7108365
  misc_feature: MA Experiment ID: 108435 Result: Up-regulated in Transcription
  misc_feature: MA Experiment 108435 PARAMETER Experiment Name: At_stm_Mutants_cDNA_P Parameter: Plant Line Value: wt Landsburg vs stm
  misc_feature: MA Experiment 108435 PARAMETER Experiment Name: At_stm_Mutants_cDNA_P Parameter: Tissue Value: Shoot Apical Meristem Region
  misc_feature: MA Experiment ID: 108462 Result: Up-regulated in Transcription
  misc_feature: MA Experiment 108462 PARAMETER Experiment Name: At_Germinating_Seeds_cDNA_P Parameter: Age (day) Value: 2 vs. 0
  misc_feature: MA Experiment 108462 PARAMETER Experiment Name: At_Germinating_Seeds_cDNA_P Parameter: Tissue Value: Germinating Seeds
  misc_feature: MA Experiment ID: 108463 Result: Up-regulated in Transcription
  misc_feature: MA Experiment 108463 PARAMETER Experiment Name: At_Germinating_Seeds_cDNA_P Parameter: Age (day) Value: 3 vs. 0
  misc_feature: MA Experiment 108463 PARAMETER Experiment Name: At_Germinating_Seeds_cDNA_P Parameter: Tissue Value: Germinating Seeds
  misc_feature: MA Experiment ID: 108464 Result: Up-regulated in Transcription
  misc_feature: MA Experiment 108464 PARAMETER Experiment Name: At_Germinating_Seeds_cDNA_P Parameter: Age (day) Value: 4 vs. 0
  misc_feature: MA Experiment 108464 PARAMETER Experiment Name: At_Germinating_Seeds_cDNA_P Parameter: Tissue Value: Germinating Seeds
  misc_feature: MA Experiment ID: 108474 Result: Down-regulated in Transcription
  misc_feature: MA Experiment 108474 PARAMETER Experiment Name: At_Drought_Flowers_cDNA_P Parameter: Timepoint (hr) Value: null
  misc_feature: MA Experiment 108474 PARAMETER Experiment Name: At_Drought_Flowers_cDNA_P Parameter: Treatment Value: Drought vs. No Drought
  misc_feature: MA Experiment ID: 108561 Result: Down-regulated in Transcription
  misc_feature: MA Experiment 108561 PARAMETER Experiment Name: At_100uM_ABA_cDNA_P Parameter: Timepoint (hr) Value: 6
  misc_feature: MA Experiment 108561 PARAMETER Experiment Name: At_100uM_ABA_cDNA_P Parameter: Tissue Value: Aerial
  misc_feature: MA Experiment 108561 PARAMETER Experiment Name: At_100uM_ABA_cDNA_P Parameter: Treatment Value: 100uM ABA vs. No Treatment
  misc_feature: MA Experiment ID: 108576 Result: Down-regulated in Transcription
  misc_feature: MA Experiment 108576 PARAMETER Experiment Name: At_42deg_Heat_cDNA_P Parameter: Temperature (deg C) Value: 42 vs. 22
  misc_feature: MA Experiment 108576 PARAMETER Experiment Name: At_42deg_Heat_cDNA_P Parameter: Timepoint (hr) Value: 1
  misc_feature: MA Experiment 108576 PARAMETER Experiment Name: At_42deg_Heat_cDNA_P Parameter: Tissue Value: Aerial
  misc_feature: MA Experiment ID: 108577 Result: Down-regulated in Transcription
  misc_feature: MA Experiment 108577 PARAMETER Experiment Name: At_42deg_Heat_cDNA_P Parameter: Temperature (deg C) Value: 42 vs. 22
  misc_feature: MA Experiment 108577 PARAMETER Experiment Name: At_42deg_Heat_cDNA_P Parameter: Timepoint (hr) Value: 6
  misc_feature: MA Experiment 108577 PARAMETER Experiment Name: At_42deg_Heat_cDNA_P Parameter: Tissue Value: Aerial
  misc_feature: MA Experiment ID: 108595 Result: Down-regulated in Transcription
  misc_feature: MA Experiment 108595 PARAMETER Experiment Name: At_Ler-pi_Ovule_cDNA_P Parameter: Plant Line Value: null
  misc_feature: MA Experiment ID: 108605 Result: Down-regulated in Transcription
  misc_feature: MA Experiment 108605 PARAMETER Experiment Name: At_100uM_ABA_cDNA_P Parameter: Timepoint (hr) Value: 6
  misc_feature: MA Experiment 108605 PARAMETER Experiment Name: At_100uM_ABA_cDNA_P Parameter: Tissue Value: Aerial
  misc_feature: MA Experiment 108605 PARAMETER Experiment Name: At_100uM_ABA_cDNA_P Parameter: Treatment Value: 100uM ABA vs. No Treatment
  misc_feature: MA Experiment ID: 108607 Result: Down-regulated in Transcription
  misc_feature: MA Experiment 108607 PARAMETER Experiment Name: At_100uM_ABA_cDNA_P Parameter: Timepoint (hr) Value: 4
  misc_feature: MA Experiment 108607 PARAMETER Experiment Name: At_100uM_ABA_cDNA_P Parameter: Tissue Value: Aerial
  misc_feature: MA Experiment 108607 PARAMETER Experiment Name: At_100uM_ABA_cDNA_P Parameter: Treatment Value: 100uM ABA vs. No Treatment
  misc_feature: MA Experiment ID: 108668 Result: Down-regulated in Transcription
  misc_feature: MA Experiment 108668 PARAMETER Experiment Name: At_2mM_SA_cDNA_P Parameter: Plant Line Value: WS
  misc_feature: MA Experiment 108668 PARAMETER Experiment Name: At_2mM_SA_cDNA_P Parameter: Timepoint (hr) Value: 6
  misc_feature: MA Experiment 108668 PARAMETER Experiment Name: At_2mM_SA_cDNA_P Parameter: Treatment Value: 2mM SA vs. No Treatment
  misc_feature: MA Experiment ID: 20000070 Result: Down-regulated in Transcription
  misc_feature: MA Experiment 20000070 PARAMETER Experiment Name: At_100uM_ABA_Mutants_cDNA_P Parameter: Plant Line Value: CS24
  misc_feature: MA Experiment 20000070 PARAMETER Experiment Name: At_100uM_ABA_Mutants_cDNA_P Parameter: Timepoint (hr) Value: 6
  misc_feature: MA Experiment 20000070 PARAMETER Experiment Name: At_100uM_ABA_Mutants_cDNA_P Parameter: Tissue Value: Aerial
  misc_feature: MA Experiment 20000070 PARAMETER Experiment Name: At_100uM_ABA_Mutants_cDNA_P Parameter: Treatment Value: 100uM ABA vs. No Treatment
  misc_feature: MA Experiment ID: 20000071 Result: Down-regulated in Transcription
  misc_feature: MA Experiment 20000071 PARAMETER Experiment Name: At_100uM_ABA_Mutants_cDNA_P Parameter: Plant Line Value: CS8104
  misc_feature: MA Experiment 20000071 PARAMETER Experiment Name: At_100uM_ABA_Mutants_cDNA_P Parameter: Timepoint (hr) Value: 6
  misc_feature: MA Experiment 20000071 PARAMETER Experiment Name: At_100uM_ABA_Mutants_cDNA_P Parameter: Tissue Value: Aerial
  misc_feature: MA Experiment 20000071 PARAMETER Experiment Name: At_100uM_ABA_Mutants_cDNA_P Parameter: Treatment Value: 100uM ABA vs. No Treatment
  misc_feature: MA Experiment ID: 20000087 Result: Down-regulated in Transcription
  misc_feature: MA Experiment 20000087 PARAMETER Experiment Name: At_100uM_ABA_Mutants_cDNA_P Parameter: Plant Line Value: WS
  misc_feature: MA Experiment 20000087 PARAMETER Experiment Name: At_100uM_ABA_Mutants_cDNA_P Parameter: Timepoint (hr) Value: 6
  misc_feature: MA Experiment 20000087 PARAMETER Experiment Name: At_100uM_ABA_Mutants_cDNA_P Parameter: Tissue Value: Aerial
  misc_feature: MA Experiment 20000087 PARAMETER Experiment Name: At_100uM_ABA_Mutants_cDNA_P Parameter: Treatment Value: 100uM ABA vs. No Treatment
  misc_feature: MA Experiment ID: 20000112 Result: Down-regulated in Transcription
  misc_feature: MA Experiment 20000112 PARAMETER Experiment Name: At_42deg_Heat_cDNA_P Parameter: Temperature (deg C) Value: 42 vs. 22
  misc_feature: MA Experiment 20000112 PARAMETER Experiment Name: At_42deg_Heat_cDNA_P Parameter: Timepoint (hr) Value: 2
  misc_feature: MA Experiment 20000112 PARAMETER Experiment Name: At_42deg_Heat_cDNA_P Parameter: Tissue Value: Aerial
  misc_feature: MA Experiment ID: 20000113 Result: Down-regulated in Transcription
  misc_feature: MA Experiment 20000113 PARAMETER Experiment Name: At_42deg_Heat_cDNA_P Parameter: Temperature (deg C) Value: 42 vs. 22
  misc_feature: MA Experiment 20000113 PARAMETER Experiment Name: At_42deg_Heat_cDNA_P Parameter: Timepoint (hr) Value: 8
  misc_feature: MA Experiment 20000113 PARAMETER Experiment Name: At_42deg_Heat_cDNA_P Parameter: Tissue Value: Aerial
  misc_feature: MA Experiment ID: 20000117 Result: Down-regulated in Transcription
  misc_feature: MA Experiment 20000117 PARAMETER Experiment Name: At_100uM_ABA_Mutants_cDNA_P Parameter: Plant Line Value: Columbia
  misc_feature: MA Experiment 20000117 PARAMETER Experiment Name: At_100uM_ABA_Mutants_cDNA_P Parameter: Timepoint (hr) Value: 6
  misc_feature: MA Experiment 20000117 PARAMETER Experiment Name: At_100uM_ABA_Mutants_cDNA_P Parameter: Tissue Value: Aerial
  misc_feature: MA Experiment 20000117 PARAMETER Experiment Name: At_100uM_ABA_Mutants_cDNA_P Parameter: Treatment Value: 100uM ABA vs. No Treatment
  misc_feature: MA Experiment ID: 20000169 Result: Down-regulated in Transcription
  misc_feature: MA Experiment 20000169 PARAMETER Experiment Name: At_100uM_ABA_P Parameter: Age (day) Value: 14
  misc_feature: MA Experiment 20000169 PARAMETER Experiment Name: At_100uM_ABA_P Parameter: Organism Value: A. thaliana
  misc_feature: MA Experiment 20000169 PARAMETER Experiment Name: At_100uM_ABA_P Parameter: Plant Line Value: WS
  misc_feature: MA Experiment 20000169 PARAMETER Experiment Name: At_100uM_ABA_P Parameter: Timepoint (hr) Value: 6
  misc_feature: MA Experiment 20000169 PARAMETER Experiment Name: At_100uM_ABA_P Parameter: Tissue Value: Aerial
  misc_feature: MA Experiment 20000169 PARAMETER Experiment Name: At_100uM_ABA_P Parameter: Treatment Value: 100uM ABA vs. No Treatment
  misc_feature: MA Experiment ID: 20000173 Result: Down-regulated in Transcription
  misc_feature: MA Experiment 20000173 PARAMETER Experiment Name: At_42deg_Heat_P Parameter: Age (day) Value: 14
  misc_feature: MA Experiment 20000173 PARAMETER Experiment Name: At_42deg_Heat_P Parameter: Organism Value: A. thaliana
  misc_feature: MA Experiment 20000173 PARAMETER Experiment Name: At_42deg_Heat_P Parameter: Plant Line Value: WS
  misc_feature: MA Experiment 20000173 PARAMETER Experiment Name: At_42deg_Heat_P Parameter: Temperature (deg C) Value: 42 vs. 22
  misc_feature: MA Experiment 20000173 PARAMETER Experiment Name: At_42deg_Heat_P Parameter: Timepoint (hr) Value: 6
  misc_feature: MA Experiment 20000173 PARAMETER Experiment Name: At_42deg_Heat_P Parameter: Tissue Value: Aerial
  misc_feature: MA Experiment ID: 20000180 Result: Up-regulated in Transcription
  misc_feature: MA Experiment 20000180 PARAMETER Experiment Name: At_Germinating_Seeds_P Parameter: Age (hr) Value: 24 vs. 0
  misc_feature: MA Experiment 20000180 PARAMETER Experiment Name: At_Germinating_Seeds_P Parameter: Tissue Value: Germinating Seeds
  misc_feature: MA Experiment ID: 20000182 Result: Down-regulated in Transcription
  misc_feature: MA Experiment 20000182 PARAMETER Experiment Name: At_2mM_SA_P Parameter: Age (day) Value: 14
  misc_feature: MA Experiment 20000182 PARAMETER Experiment Name: At_2mM_SA_P Parameter: Organism Value: A. thaliana
  misc_feature: MA Experiment 20000182 PARAMETER Experiment Name: At_2mM_SA_P Parameter: Plant Line Value: WS
  misc_feature: MA Experiment 20000182 PARAMETER Experiment Name: At_2mM_SA_P Parameter: Timepoint (hr) Value: 6
  misc_feature: MA Experiment 20000182 PARAMETER Experiment Name: At_2mM_SA_P Parameter: Tissue Value: Aerial
  misc_feature: MA Experiment 20000182 PARAMETER Experiment Name: At_2mM_SA_P Parameter: Treatment Value: 2mM SA vs. No Treatment
  misc_feature: MA Experiment ID: 20000185 Result: Down-regulated in Transcription
  misc_feature: MA Experiment 20000185 PARAMETER Experiment Name: At_Roots__P Parameter: Age (day) Value: 7 vs. 21
  misc_feature: MA Experiment 20000185 PARAMETER Experiment Name: At_Roots__P Parameter: Organism Value: A. thaliana
  misc_feature: MA Experiment 20000185 PARAMETER Experiment Name: At_Roots__P Parameter: Tissue Value: Roots vs. Whole Plant
  misc_feature: MA Experiment ID: 20000224 Result: Down-regulated in Transcription
  misc_feature: MA Experiment ID: 20000227 Result: Up-regulated in Transcription
  misc_feature: MA Experiment 20000227 PARAMETER Experiment Name: At_Root-Tips-vs-Tops_P Parameter: Tissue Value: Root Tips vs. Root Tops
  misc_feature: MA Experiment ID: 20000234 Result: Down-regulated in Transcription
  misc_feature: MA Experiment 20000234 PARAMETER Experiment Name: At_Siliques_P Parameter: Age (day) Value: 21
  misc_feature: MA Experiment 20000234 PARAMETER Experiment Name: At_Siliques_P Parameter: Organism Value: A. thaliana
  misc_feature: MA Experiment 20000234 PARAMETER Experiment Name: At_Siliques_P Parameter: Plant Line Value: WS
  misc_feature: MA Experiment 20000234 PARAMETER Experiment Name: At_Siliques_P Parameter: Tissue Value: Less Than 5mm Siliques vs. Whole Plant
  misc_feature: MA Experiment ID: 20000265 Result: Down-regulated in Transcription
  misc_feature: MA Experiment 20000265 PARAMETER Experiment Name: At_Open_Flower_P Parameter: Age (day) Value: 21
  misc_feature: MA Experiment 20000265 PARAMETER Experiment Name: At_Open_Flower_P Parameter: Plant Line Value: WS
  misc_feature: MA Experiment 20000265 PARAMETER Experiment Name: At_Open_Flower_P Parameter: Tissue Value: Closed Flower vs. Whole Plant
  misc_feature: MA Experiment ID: 20000268 Result: Down-regulated in Transcription
  misc_feature: MA Experiment 20000268 PARAMETER Experiment Name: At_100mM_NaCl__P Parameter: Age (day) Value: 14
  misc_feature: MA Experiment 20000268 PARAMETER Experiment Name: At_100mM_NaCl__P Parameter: Organism Value: A. thaliana
  misc_feature: MA Experiment 20000268 PARAMETER Experiment Name: At_100mM_NaCl__P Parameter: Plant Line Value: WS
  misc_feature: MA Experiment 20000268 PARAMETER Experiment Name: At_100mM_NaCl__P Parameter: Timepoint (hr) Value: 6
  misc_feature: MA Experiment 20000268 PARAMETER Experiment Name: At_100mM_NaCl__P Parameter: Tissue Value: Whole Plant
  misc_feature: MA Experiment 20000268 PARAMETER Experiment Name: At_100mM_NaCl__P Parameter: Treatment Value: 100mM NaCl vs. No Treatment
  misc_feature: MA Experiment ID: 20000437 Result: Down-regulated in Transcription
  misc_feature: MA Experiment 20000437 PARAMETER Experiment Name: At_Drought_P Parameter: Age (day) Value: 8
  misc_feature: MA Experiment 20000437 PARAMETER Experiment Name: At_Drought_P Parameter: Organism Value: A. thaliana
  misc_feature: MA Experiment 20000437 PARAMETER Experiment Name: At_Drought_P Parameter: Plant Line Value: WS
  misc_feature: MA Experiment 20000437 PARAMETER Experiment Name: At_Drought_P Parameter: Timepoint (hr) Value: 24
  misc_feature: MA Experiment 20000437 PARAMETER Experiment Name: At_Drought_P Parameter: Tissue Value: Whole Plant
  misc_feature: MA Experiment 20000437 PARAMETER Experiment Name: At_Drought_P Parameter: Treatment Value: Drought vs. No Drought
  misc_feature: MA Experiment ID: 20000439 Result: Down-regulated in Transcription
  misc_feature: MA Experiment 20000439 PARAMETER Experiment Name: At_Roots__P Parameter: Age (day) Value: 14 vs. 21
  misc_feature: MA Experiment 20000439 PARAMETER Experiment Name: At_Roots__P Parameter: Organism Value: A. thaliana
  misc_feature: MA Experiment 20000439 PARAMETER Experiment Name: At_Roots__P Parameter: Tissue Value: Roots vs. Whole Plant
  misc_feature: MA Experiment ID: 20000794 Result: Up-regulated in Transcription
  misc_feature: MA Experiment 20000794 PARAMETER Experiment Name: At_Petals_P Parameter: Age (day) Value: 23-25 days
  misc_feature: MA Experiment 20000794 PARAMETER Experiment Name: At_Petals_P Parameter: Plant Line Value: WS
  misc_feature: MA Experiment 20000794 PARAMETER Experiment Name: At_Petals_P Parameter: Tissue Value: Petals vs. Whole plant
  misc_feature: MA Experiment ID: 20001248 Result: Up-regulated in Transcription
  misc_feature: MA Experiment 20001248 PARAMETER Experiment Name: At_Far-red-induction_P Parameter: Age (day) Value: 7
  misc_feature: MA Experiment 20001248 PARAMETER Experiment Name: At_Far-red-induction_P Parameter: Light Value: Far-red vs. White
  misc_feature: MA Experiment 20001248 PARAMETER Experiment Name: At_Far-red-induction_P Parameter: Organism Value: A. thaliana
  misc_feature: MA Experiment 20001248 PARAMETER Experiment Name: At_Far-red-induction_P Parameter: Plant Line Value: Columbia
  misc_feature: MA Experiment 20001248 PARAMETER Experiment Name: At_Far-red-induction_P Parameter: Timepoint (hr) Value: 4
  misc_feature: MA Experiment 20001248 PARAMETER Experiment Name: At_Far-red-induction_P Parameter: Tissue Value: Whole Plant
  misc_feature: MA Experiment ID: 20001450 Result: Up-regulated in Transcription
  misc_feature: MA Experiment 20001450 PARAMETER Experiment Name: At_Far-red-induction_P Parameter: Age (day) Value: 7
  misc_feature: MA Experiment 20001450 PARAMETER Experiment Name: At_Far-red-induction_P Parameter: Light Value: Far-red vs. White
  misc_feature: MA Experiment 20001450 PARAMETER Experiment Name: At_Far-red-induction_P Parameter: Organism Value: A. thaliana
  misc_feature: MA Experiment 20001450 PARAMETER Experiment Name: At_Far-red-induction_P Parameter: Plant Line Value: Columbia
  misc_feature: MA Experiment 20001450 PARAMETER Experiment Name: At_Far-red-induction_P Parameter: Timepoint (hr) Value: 8
  misc_feature: MA Experiment 20001450 PARAMETER Experiment Name: At_Far-red-induction_P Parameter: Tissue Value: Whole Plant
  misc_feature: MA Experiment ID: 20001451 Result: Up-regulated in Transcription
  misc_feature: MA Experiment 20001451 PARAMETER Experiment Name: At_Far-red-induction_P Parameter: Age (day) Value: 7
  misc_feature: MA Experiment 20001451 PARAMETER Experiment Name: At_Far-red-induction_P Parameter: Light Value: Far-red vs. White
  misc_feature: MA Experiment 20001451 PARAMETER Experiment Name: At_Far-red-induction_P Parameter: Organism Value: A. thaliana
  misc_feature: MA Experiment 20001451 PARAMETER Experiment Name: At_Far-red-induction_P Parameter: Plant Line Value: Columbia
  misc_feature: MA Experiment 20001451 PARAMETER Experiment Name: At_Far-red-induction_P Parameter: Timepoint (hr) Value: 24
  misc_feature: MA Experiment 20001451 PARAMETER Experiment Name: At_Far-red-induction_P Parameter: Tissue Value: Whole Plant
  misc_feature: MA Experiment ID: 20001457 Result: Up-regulated in Transcription
  misc_feature: MA Experiment 20001457 PARAMETER Experiment Name: At_50mM_NH4NO3_L-to-H_P Parameter: Age (day) Value: Undefined
  misc_feature: MA Experiment 20001457 PARAMETER Experiment Name: At_50mM_NH4NO3_L-to-H_P Parameter: Organism Value: Undefined
  misc_feature: MA Experiment 20001457 PARAMETER Experiment Name: At_50mM_NH4NO3_L-to-H_P Parameter: Plant Line Value: Undefined
  misc_feature: MA Experiment 20001457 PARAMETER Experiment Name: At_50mM_NH4NO3_L-to-H_P Parameter: Timepoint (hr) Value: 0.5
  misc_feature: MA Experiment 20001457 PARAMETER Experiment Name: At_50mM_NH4NO3_L-to-H_P Parameter: Tissue Value: Siliques
  misc_feature: MA Experiment 20001457 PARAMETER Experiment Name: At_50mM_NH4NO3_L-to-H_P Parameter: Treatment Value: 50mM NH4NO3 vs. 100mM Manitol
  misc_feature: MA Experiment ID: 20001554 Result: Down-regulated in Transcription
  misc_feature: MA Experiment 20001554 PARAMETER Experiment Name: At_Drought_Soil_Dry_P Parameter: Age (day) Value: 21
  misc_feature: MA Experiment 20001554 PARAMETER Experiment Name: At_Drought_Soil_Dry_P Parameter: Organism Value: A. thaliana
  misc_feature: MA Experiment 20001554 PARAMETER Experiment Name: At_Drought_Soil_Dry_P Parameter: Plant Line Value: WS
  misc_feature: MA Experiment 20001554 PARAMETER Experiment Name: At_Drought_Soil_Dry_P Parameter: Post Timepoint (hr) Value: None
  misc_feature: MA Experiment 20001554 PARAMETER Experiment Name: At_Drought_Soil_Dry_P Parameter: Post-Treatment Value: None
  misc_feature: MA Experiment 20001554 PARAMETER Experiment Name: At_Drought_Soil_Dry_P Parameter: Timepoint (day) Value: 7
  misc_feature: MA Experiment 20001554 PARAMETER Experiment Name: At_Drought_Soil_Dry_P Parameter: Treatment Value: Drought vs. No Drought
  misc_feature: MA Experiment ID: 20001556 Result: Down-regulated in Transcription
  misc_feature: MA Experiment 20001556 PARAMETER Experiment Name: At_Drought_Soil_Dry_P Parameter: Age (day) Value: 26
  misc_feature: MA Experiment 20001556 PARAMETER Experiment Name: At_Drought_Soil_Dry_P Parameter: Organism Value: A. thaliana
  misc_feature: MA Experiment 20001556 PARAMETER Experiment Name: At_Drought_Soil_Dry_P Parameter: Plant Line Value: WS
  misc_feature: MA Experiment 20001556 PARAMETER Experiment Name: At_Drought_Soil_Dry_P Parameter: Post Timepoint (hr) Value: None
  misc_feature: MA Experiment 20001556 PARAMETER Experiment Name: At_Drought_Soil_Dry_P Parameter: Post-Treatment Value: None
  misc_feature: MA Experiment 20001556 PARAMETER Experiment Name: At_Drought_Soil_Dry_P Parameter: Timepoint (day) Value: 12
  misc_feature: MA Experiment 20001556 PARAMETER Experiment Name: At_Drought_Soil_Dry_P Parameter: Treatment Value: Drought vs. No Drought
  misc_feature: MA Experiment ID: 20001558 Result: Up-regulated in Transcription
  misc_feature: MA Experiment 20001558 PARAMETER Experiment Name: At_Drought_Soil_Dry_P Parameter: Age (day) Value: 27
  misc_feature: MA Experiment 20001558 PARAMETER Experiment Name: At_Drought_Soil_Dry_P Parameter: Organism Value: A. thaliana
  misc_feature: MA Experiment 20001558 PARAMETER Experiment Name: At_Drought_Soil_Dry_P Parameter: Plant Line Value: WS
  misc_feature: MA Experiment 20001558 PARAMETER Experiment Name: At_Drought_Soil_Dry_P Parameter: Post Timepoint (hr) Value: 6
  misc_feature: MA Experiment 20001558 PARAMETER Experiment Name: At_Drought_Soil_Dry_P Parameter: Post-Treatment Value: Re-Water vs. No Drought
  misc_feature: MA Experiment 20001558 PARAMETER Experiment Name: At_Drought_Soil_Dry_P Parameter: Timepoint (day) Value: 13
  misc_feature: MA Experiment 20001558 PARAMETER Experiment Name: At_Drought_Soil_Dry_P Parameter: Treatment Value: Drought vs. No Drought
  misc_feature: MA Experiment ID: 20001560 Result: Up-regulated in Transcription
  misc_feature: MA Experiment 20001560 PARAMETER Experiment Name: At_Drought_Soil_Dry_P Parameter: Age (day) Value: 28
  misc_feature: MA Experiment 20001560 PARAMETER Experiment Name: At_Drought_Soil_Dry_P Parameter: Organism Value: A. thaliana
  misc_feature: MA Experiment 20001560 PARAMETER Experiment Name: At_Drought_Soil_Dry_P Parameter: Plant Line Value: WS
  misc_feature: MA Experiment 20001560 PARAMETER Experiment Name: At_Drought_Soil_Dry_P Parameter: Post Timepoint (hr) Value: None
  misc_feature: MA Experiment 20001560 PARAMETER Experiment Name: At_Drought_Soil_Dry_P Parameter: Post-Treatment Value: None
  misc_feature: MA Experiment 20001560 PARAMETER Experiment Name: At_Drought_Soil_Dry_P Parameter: Timepoint (day) Value: 14
  misc_feature: MA Experiment 20001560 PARAMETER Experiment Name: At_Drought_Soil_Dry_P Parameter: Treatment Value: Drought vs. No Drought
  misc_feature: MA Experiment ID: 20001761 Result: Up-regulated in Transcription
  misc_feature: MA Experiment 20001761 PARAMETER Experiment Name: At_50mM_NH4NO3_L-to-H_P Parameter: Timepoint (hr) Value: 4
  misc_feature: MA Experiment 20001761 PARAMETER Experiment Name: At_50mM_NH4NO3_L-to-H_P Parameter: Tissue Value: Siliques
  misc_feature: MA Experiment 20001761 PARAMETER Experiment Name: At_50mM_NH4NO3_L-to-H_P Parameter: Treatment Value: 50mM NH4NO3 vs 100mM Mannitol
  misc_feature: MA Experiment ID: 20001904 Result: Down-regulated in Transcription
  misc_feature: MA Experiment 20001904 PARAMETER Experiment Name: At_Drought_Reproduction_P Parameter: Age (day) Value: 37
  misc_feature: MA Experiment 20001904 PARAMETER Experiment Name: At_Drought_Reproduction_P Parameter: Organism Value: A. thaliana
  misc_feature: MA Experiment 20001904 PARAMETER Experiment Name: At_Drought_Reproduction_P Parameter: Plant Line Value: WS
  misc_feature: MA Experiment 20001904 PARAMETER Experiment Name: At_Drought_Reproduction_P Parameter: Timepoint (day) Value: 7
  misc_feature: MA Experiment 20001904 PARAMETER Experiment Name: At_Drought_Reproduction_P Parameter: Tissue Value: Rosettes
  misc_feature: MA Experiment 20001904 PARAMETER Experiment Name: At_Drought_Reproduction_P Parameter: Treatment Value: Drought vs. No Drought
  misc_feature: MA Experiment ID: 20001905 Result: Down-regulated in Transcription
  misc_feature: MA Experiment 20001905 PARAMETER Experiment Name: At_Drought_Reproduction_P Parameter: Age (day) Value: 40
  misc_feature: MA Experiment 20001905 PARAMETER Experiment Name: At_Drought_Reproduction_P Parameter: Organism Value: A. thaliana
  misc_feature: MA Experiment 20001905 PARAMETER Experiment Name: At_Drought_Reproduction_P Parameter: Plant Line Value: WS
  misc_feature: MA Experiment 20001905 PARAMETER Experiment Name: At_Drought_Reproduction_P Parameter: Timepoint (day) Value: 10
  misc_feature: MA Experiment 20001905 PARAMETER Experiment Name: At_Drought_Reproduction_P Parameter: Tissue Value: Rosettes
  misc_feature: MA Experiment 20001905 PARAMETER Experiment Name: At_Drought_Reproduction_P Parameter: Treatment Value: Drought vs. No Drought
  misc_feature: MA Experiment ID: 20001906 Result: Down-regulated in Transcription
  misc_feature: MA Experiment 20001906 PARAMETER Experiment Name: At_Drought_Reproduction_P Parameter: Age (day) Value: 35
  misc_feature: MA Experiment 20001906 PARAMETER Experiment Name: At_Drought_Reproduction_P Parameter: Organism Value: A. thaliana
  misc_feature: MA Experiment 20001906 PARAMETER Experiment Name: At_Drought_Reproduction_P Parameter: Plant Line Value: WS
  misc_feature: MA Experiment 20001906 PARAMETER Experiment Name: At_Drought_Reproduction_P Parameter: Timepoint (day) Value: 5
  misc_feature: MA Experiment 20001906 PARAMETER Experiment Name: At_Drought_Reproduction_P Parameter: Tissue Value: Siliques
  misc_feature: MA Experiment 20001906 PARAMETER Experiment Name: At_Drought_Reproduction_P Parameter: Treatment Value: Drought vs. No Drought
  misc_feature: MA Experiment ID: 20001907 Result: Down-regulated in Transcription
  misc_feature: MA Experiment 20001907 PARAMETER Experiment Name: At_Drought_Reproduction_P Parameter: Age (day) Value: 37
  misc_feature: MA Experiment 20001907 PARAMETER Experiment Name: At_Drought_Reproduction_P Parameter: Organism Value: A. thaliana
  misc_feature: MA Experiment 20001907 PARAMETER Experiment Name: At_Drought_Reproduction_P Parameter: Plant Line Value: WS
  misc_feature: MA Experiment 20001907 PARAMETER Experiment Name: At_Drought_Reproduction_P Parameter: Timepoint (day) Value: 7
  misc_feature: MA Experiment 20001907 PARAMETER Experiment Name: At_Drought_Reproduction_P Parameter: Tissue Value: Siliques
  misc_feature: MA Experiment 20001907 PARAMETER Experiment Name: At_Drought_Reproduction_P Parameter: Treatment Value: Drought vs. No Drought
  misc_feature: MA Experiment ID: 20001908 Result: Down-regulated in Transcription
  misc_feature: MA Experiment 20001908 PARAMETER Experiment Name: At_Drought_Reproduction_P Parameter: Age (day) Value: 40
  misc_feature: MA Experiment 20001908 PARAMETER Experiment Name: At_Drought_Reproduction_P Parameter: Organism Value: A. thaliana
  misc_feature: MA Experiment 20001908 PARAMETER Experiment Name: At_Drought_Reproduction_P Parameter: Plant Line Value: WS
  misc_feature: MA Experiment 20001908 PARAMETER Experiment Name: At_Drought_Reproduction_P Parameter: Timepoint (day) Value: 10
  misc_feature: MA Experiment 20001908 PARAMETER Experiment Name: At_Drought_Reproduction_P Parameter: Tissue Value: Siliques
  misc_feature: MA Experiment 20001908 PARAMETER Experiment Name: At_Drought_Reproduction_P Parameter: Treatment Value: Drought vs. No Drought
  misc_feature: MA Experiment ID: 20001911 Result: Down-regulated in Transcription
  misc_feature: MA Experiment 20001911 PARAMETER Experiment Name: At_Drought_Reproduction_P Parameter: Age (day) Value: 40
  misc_feature: MA Experiment 20001911 PARAMETER Experiment Name: At_Drought_Reproduction_P Parameter: Organism Value: A. thaliana
  misc_feature: MA Experiment 20001911 PARAMETER Experiment Name: At_Drought_Reproduction_P Parameter: Plant Line Value: WS
  misc_feature: MA Experiment 20001911 PARAMETER Experiment Name: At_Drought_Reproduction_P Parameter: Timepoint (day) Value: 10
  misc_feature: MA Experiment 20001911 PARAMETER Experiment Name: At_Drought_Reproduction_P Parameter: Tissue Value: Flowers
  misc_feature: MA Experiment 20001911 PARAMETER Experiment Name: At_Drought_Reproduction_P Parameter: Treatment Value: Drought vs. No Drought
atgaccacttcatcgactgcgttcaagaaaccgcttccttgtagcctctgcgctctaaaccatcctttgcgagtttcagggacatcttcagcgacatgctttaacaaaccatccctaaaaggagtctttaagccagtaactgggactttgttccttagcatctctctctctgctggagtccagtcagctgtcagatccaggatagcttggagactatcatcatcatataataaacccacccatgactgtttcttcatctccatgggctctcatggctctctttctaatggtttcttcaacaatggtaatggctattcctccacgcaaggccattgatgtaccatttggtcgtaactacgtcccaacttgggcttttgaccaccagaaacagttcaatggcggttccgaacttcagcttatcctcgacaaatacactggcacaggatttcaatcaaaggggtcatatttgtttggacattttagtatgcacataaagcttccagctggtgacacagccggagttgtcacagctttctatctatcatctaccaacaatgagcatgacgagatagactttgagttccttggaaacagaacaggacaaccagctatattacagacaaatgtattcacaggaggaaagggaaacagagaacaacgaatctatctctggtttgatccttctaaggcttatcacacttactcaatcctttggaacatgtaccagatcgtattctttgttgacaacataccaatccgaacgttcaagaatgctaaggatctaggagtacgtttcccattcaaccaaccaatgaagctttactcaagcctttggaacgcggatgattgggccacgagaggcggtttagagaagaccaattgggccaatgcacctttcgttgcatcttacaaaggattccacatagatggttgccaagcttctgtggaagccaagtactgtgccacacaaggccgcatgtggtgggatcagaaagagttccgtgaccttgacgctgaacaatggcgtcgtctcaaatgggttcgtatgaagtggaccatctacaactactgtaccgaccggactaggttcccggttatgccagctgaatgtaaaagggacagagacgcataagttactactcttgagggttttaatgaatttatgctatcattattatttgaattatgcttgttcaagagattgatatatgtattgtttgttggcccatgatgtttatgctatatttgggcctaaaattacatgttataattcatatatgtattgattagctatgtattttc

SEQ ID NO: 76546 - protein, 296 aa, Arabidopsis thaliana; identical to SEQ ID NO: 29752
  peptide (1)..(296): Ceres Seq. ID no. 7108366
  misc_feature (35)..(216): Pfam Name: Glycosyl hydrolases family 16 Pfam Description: Glycosyl hydrolases family 16
  misc_feature (1)..(296): Homolog of NCBI NO: 15225605 NR Description: xyloglucan endotransglycosylase (ext/EXGT-A1); id: At2g06850.1, supported by cDNA: 15276., supported by cDNA:
  misc_feature (4)..(295): Homolog of NCBI NO: 22947847 NR Description: xyloglucan endotransglycosylase [Malus x
  misc_feature (11)..(295): Homolog of NCBI NO: 15240733 NR Description: xyloglucan endotransglycosylase (EXGT-A4); id: At5g13870.1 [Arabidopsis thaliana] endoxyloglucan transferase [Arabidopsis thaliana]
  misc_feature (3)..(295): Homolog of NCBI NO: 950299 NR Description: xyloglucan endotransglycosylase precursor
  misc_feature (3)..(295): Homolog of NCBI NO: 7447416 NR Description: xyloglucan endo-1,4-beta-D-glucanase (EC 3.2.1.-) - common nasturtium >gi|1008904|gb|AAB39950.1| xyloglucan
  misc_feature (7)..(295): Homolog of NCBI NO: 27228078 NR Description: xyloglucan endotransglycosylase precursor
  misc_feature (1)..(295): Homolog of NCBI NO: 3043422 NR Description: endoxyloglucan transferase [Cicer arietinum]
  misc_feature (5)..(295): Homolog of NCBI NO: 38605591 NR Description: Probable xyloglucan protein B precursor (VaXTH2) >gi|21734666|dbj|BAC03238.1|
  misc_feature (6)..(295): Homolog of NCBI NO: 541939 NR Description: xyloglucan endo-1,4-beta-D-glucanase (EC 3.2.1.-)
  misc_feature (1)..(292): Homolog of NCBI NO: 543905 NR Description: Brassinosteroid-regulated protein BRU1 precursor

SEQ ID NO: 76547 - protein, 286 aa, Arabidopsis thaliana; identical to SEQ ID NO: 29753
  peptide (1)..(286): Ceres Seq. ID no. 7108367
  misc_feature (25)..(206): Pfam Name: Glycosyl hydrolases family 16 Pfam Description: Glycosyl hydrolases family 16
  misc_feature (1)..(286): Homolog of NCBI NO: 15225605 NR Description: xyloglucan endotransglycosylase (ext/EXGT-A1); id: At2g06850.1, supported by cDNA: 15276., supported by cDNA:
  misc_feature (1)..(285): Homolog of NCBI NO: 22947847 NR Description: xyloglucan endotransglycosylase [Malus x
  misc_feature (1)..(285): Homolog of NCBI NO: 15240733 NR Description: xyloglucan endotransglycosylase (EXGT-A4); id: At5g13870.1 [Arabidopsis thaliana] endoxyloglucan transferase [Arabidopsis thaliana]
  misc_feature (1)..(285): Homolog of NCBI NO: 950299 NR Description: xyloglucan endotransglycosylase precursor
  misc_feature (1)..(285): Homolog of NCBI NO: 7447416 NR Description: xyloglucan endo-1,4-beta-D-glucanase (EC 3.2.1.-) - common nasturtium >gi|1008904|gb|AAB39950.1| xyloglucan
  misc_feature (1)..(285): Homolog of NCBI NO: 27228078 NR Description: xyloglucan endotransglycosylase precursor
  misc_feature (1)..(285): Homolog of NCBI NO: 3043422 NR Description: endoxyloglucan transferase [Cicer arietinum]
  misc_feature (1)..(285): Homolog of NCBI NO: 38605591 NR Description: Probable xyloglucan protein B precursor (VaXTH2) >gi|21734666|dbj|BAC03238.1|
  misc_feature (1)..(285): Homolog of NCBI NO: 541939 NR Description: xyloglucan endo-1,4-beta-D-glucanase (EC 3.2.1.-)
  misc_feature (1)..(282): Homolog of NCBI NO: 543905 NR Description: Brassinosteroid-regulated protein BRU1 precursor

SEQ ID NO: 76548 - protein, 281 aa, Arabidopsis thaliana; identical to SEQ ID NO: 29754
  peptide (1)..(281): Ceres Seq. ID no. 7108368
  misc_feature (20)..(201): Pfam Name: Glycosyl hydrolases family 16 Pfam Description: Glycosyl hydrolases family 16
  misc_feature (1)..(281): Homolog of NCBI NO: 15225605 NR Description: xyloglucan endotransglycosylase (ext/EXGT-A1); id: At2g06850.1, supported by cDNA: 15276., supported by cDNA:
  misc_feature (1)..(280): Homolog of NCBI NO: 22947847 NR Description: xyloglucan endotransglycosylase [Malus x
  misc_feature (1)..(280): Homolog of NCBI NO: 15240733 NR Description: xyloglucan endotransglycosylase (EXGT-A4); id: At5g13870.1 [Arabidopsis thaliana] endoxyloglucan transferase [Arabidopsis thaliana]
  misc_feature (1)..(280): Homolog of NCBI NO: 950299 NR Description: xyloglucan endotransglycosylase precursor
  misc_feature (1)..(280): Homolog of NCBI NO: 7447416 NR Description: xyloglucan endo-1,4-beta-D-glucanase (EC 3.2.1.-) - common nasturtium >gi|1008904|gb|AAB39950.1| xyloglucan
  misc_feature (1)..(280): Homolog of NCBI NO: 27228078 NR Description: xyloglucan endotransglycosylase precursor
  misc_feature (1)..(280): Homolog of NCBI NO: 3043422 NR Description: endoxyloglucan transferase [Cicer arietinum]
  misc_feature (1)..(280): Homolog of NCBI NO: 38605591 NR Description: Probable xyloglucan protein B precursor (VaXTH2) >gi|21734666|dbj|BAC03238.1|
  misc_feature (1)..(280): Homolog of NCBI NO: 541939 NR Description: xyloglucan endo-1,4-beta-D-glucanase (EC 3.2.1.-)
  misc_feature (1)..(277): Homolog of NCBI NO: 543905 NR Description: Brassinosteroid-regulated protein BRU1 precursor

SEQ ID NO: 76549 - DNA, 850 bp, Arabidopsis thaliana
  misc_feature (1)..(850): Ceres Seq. ID no. 7108373
  misc_feature: MA Experiment ID: 108434 Result: Up-regulated in Transcription
  misc_feature: MA Experiment 108434 PARAMETER Experiment Name: At_Root_Tips_cDNA_P Parameter: Tissue Value: Root Tips
  misc_feature: MA Experiment ID: 108461 Result: Up-regulated in Transcription
  misc_feature: MA Experiment 108461 PARAMETER Experiment Name: At_Germinating_Seeds_cDNA_P Parameter: Age (day) Value: 1 vs. 0
  misc_feature: MA Experiment 108461 PARAMETER Experiment Name: At_Germinating_Seeds_cDNA_P Parameter: Tissue Value: Germinating Seeds
  misc_feature: MA Experiment ID: 108488 Result: Up-regulated in Transcription
  misc_feature: MA Experiment ID: 108595 Result: Down-regulated in Transcription
  misc_feature: MA Experiment 108595 PARAMETER Experiment Name: At_Ler-pi_Ovule_cDNA_P Parameter: Plant Line Value: null
  misc_feature: MA Experiment ID: 20000069 Result: Down-regulated in Transcription
  misc_feature: MA Experiment 20000069 PARAMETER Experiment Name: At_100uM_ABA_Mutants_cDNA_P Parameter: Plant Line Value: CS23
  misc_feature: MA Experiment 20000069 PARAMETER Experiment Name: At_100uM_ABA_Mutants_cDNA_P Parameter: Timepoint (hr) Value: 6
  misc_feature: MA Experiment 20000069 PARAMETER Experiment Name: At_100uM_ABA_Mutants_cDNA_P Parameter: Tissue Value: Aerial
  misc_feature: MA Experiment 20000069 PARAMETER Experiment Name: At_100uM_ABA_Mutants_cDNA_P Parameter: Treatment Value: 100uM ABA vs. No Treatment
  misc_feature: MA Experiment ID: 20000070 Result: Down-regulated in Transcription
  misc_feature: MA Experiment 20000070 PARAMETER Experiment Name: At_100uM_ABA_Mutants_cDNA_P Parameter: Plant Line Value: CS24
  misc_feature: MA Experiment 20000070 PARAMETER Experiment Name: At_100uM_ABA_Mutants_cDNA_P Parameter: Timepoint (hr) Value: 6
  misc_feature: MA Experiment 20000070 PARAMETER Experiment Name: At_100uM_ABA_Mutants_cDNA_P Parameter: Tissue Value: Aerial
  misc_feature: MA Experiment 20000070 PARAMETER Experiment Name: At_100uM_ABA_Mutants_cDNA_P Parameter: Treatment Value: 100uM ABA vs. No Treatment
  misc_feature: MA Experiment ID: 20000071 Result: Down-regulated in Transcription
  misc_feature: MA Experiment 20000071 PARAMETER Experiment Name: At_100uM_ABA_Mutants_cDNA_P Parameter: Plant Line Value: CS8104
  misc_feature: MA Experiment 20000071 PARAMETER Experiment Name: At_100uM_ABA_Mutants_cDNA_P Parameter: Timepoint (hr) Value: 6
  misc_feature: MA Experiment 20000071 PARAMETER Experiment Name: At_100uM_ABA_Mutants_cDNA_P Parameter: Tissue Value: Aerial
  misc_feature: MA Experiment 20000071 PARAMETER Experiment Name: At_100uM_ABA_Mutants_cDNA_P Parameter: Treatment Value: 100uM ABA vs. No Treatment
  misc_feature: MA Experiment ID: 20000072 Result: Down-regulated in Transcription
  misc_feature: MA Experiment 20000072 PARAMETER Experiment Name: At_100uM_ABA_Mutants_cDNA_P Parameter: Plant Line Value: CS8105
  misc_feature: MA Experiment 20000072 PARAMETER Experiment Name: At_100uM_ABA_Mutants_cDNA_P Parameter: Timepoint (hr) Value: 6
  misc_feature: MA Experiment 20000072 PARAMETER Experiment Name: At_100uM_ABA_Mutants_cDNA_P Parameter: Tissue Value: Aerial
  misc_feature: MA Experiment 20000072 PARAMETER Experiment Name: At_100uM_ABA_Mutants_cDNA_P Parameter: Treatment Value: 100uM ABA vs. No Treatment
  misc_feature: MA Experiment ID: 20000086 Result: Down-regulated in Transcription
  misc_feature: MA Experiment 20000086 PARAMETER Experiment Name: At_100uM_ABA_Mutants_cDNA_P Parameter: Plant Line Value: CS22
  misc_feature: MA Experiment 20000086 PARAMETER Experiment Name: At_100uM_ABA_Mutants_cDNA_P Parameter: Timepoint (hr) Value: 6
  misc_feature: MA Experiment 20000086 PARAMETER Experiment Name: At_100uM_ABA_Mutants_cDNA_P Parameter: Tissue Value: Aerial
  misc_feature: MA Experiment 20000086 PARAMETER Experiment Name: At_100uM_ABA_Mutants_cDNA_P Parameter: Treatment Value: 100uM ABA vs. No Treatment
  misc_feature: MA Experiment ID: 20000087 Result: Down-regulated in Transcription
  misc_feature: MA Experiment 20000087 PARAMETER Experiment Name: At_100uM_ABA_Mutants_cDNA_P Parameter: Plant Line Value: WS
  misc_feature: MA Experiment 20000087 PARAMETER Experiment Name: At_100uM_ABA_Mutants_cDNA_P Parameter: Timepoint (hr) Value: 6
  misc_feature: MA Experiment 20000087 PARAMETER Experiment Name: At_100uM_ABA_Mutants_cDNA_P Parameter: Tissue Value: Aerial
  misc_feature: MA Experiment 20000087 PARAMETER Experiment Name: At_100uM_ABA_Mutants_cDNA_P Parameter: Treatment Value: 100uM ABA vs. No Treatment
  misc_feature: MA Experiment ID: 20000117 Result: Down-regulated in Transcription
  misc_feature: MA Experiment 20000117 PARAMETER Experiment Name: At_100uM_ABA_Mutants_cDNA_P Parameter: Plant Line Value: Columbia
  misc_feature: MA Experiment 20000117 PARAMETER Experiment Name: At_100uM_ABA_Mutants_cDNA_P Parameter: Timepoint (hr) Value: 6
  misc_feature: MA Experiment 20000117 PARAMETER Experiment Name: At_100uM_ABA_Mutants_cDNA_P Parameter: Tissue Value: Aerial
  misc_feature: MA Experiment 20000117 PARAMETER Experiment Name: At_100uM_ABA_Mutants_cDNA_P Parameter: Treatment Value: 100uM ABA vs. No Treatment
  misc_feature: MA Experiment ID: 20000185 Result: Down-regulated in Transcription
  misc_feature: MA Experiment 20000185 PARAMETER Experiment Name: At_Roots__P Parameter: Age (day) Value: 7 vs. 21
  misc_feature: MA Experiment 20000185 PARAMETER Experiment Name: At_Roots__P Parameter: Organism Value: A. thaliana
  misc_feature: MA Experiment 20000185 PARAMETER Experiment Name: At_Roots__P Parameter: Tissue Value: Roots vs. Whole Plant
  misc_feature: MA Experiment ID: 20000437 Result: Down-regulated in Transcription
  misc_feature: MA Experiment 20000437 PARAMETER Experiment Name: At_Drought_P Parameter: Age (day) Value: 8
  misc_feature: MA Experiment 20000437 PARAMETER Experiment Name: At_Drought_P Parameter: Organism Value: A. thaliana
  misc_feature: MA Experiment 20000437 PARAMETER Experiment Name: At_Drought_P Parameter: Plant Line Value: WS
  misc_feature: MA Experiment 20000437 PARAMETER Experiment Name: At_Drought_P Parameter: Timepoint (hr) Value: 24
  misc_feature: MA Experiment 20000437 PARAMETER Experiment Name: At_Drought_P Parameter: Tissue Value: Whole Plant
  misc_feature: MA Experiment 20000437 PARAMETER Experiment Name: At_Drought_P Parameter: Treatment Value: Drought vs. No Drought
  misc_feature: MA Experiment ID: 20000439 Result: Down-regulated in Transcription
  misc_feature: MA Experiment 20000439 PARAMETER Experiment Name: At_Roots__P Parameter: Age (day) Value: 14 vs. 21
  misc_feature: MA Experiment 20000439 PARAMETER Experiment Name: At_Roots__P Parameter: Organism Value: A. thaliana
  misc_feature: MA Experiment 20000439 PARAMETER Experiment Name: At_Roots__P Parameter: Tissue Value: Roots vs. Whole Plant
  misc_feature: MA Experiment ID: 20000794 Result: Down-regulated in Transcription
  misc_feature: MA Experiment 20000794 PARAMETER Experiment Name: At_Petals_P Parameter: Age (day) Value: 23-25 days
  misc_feature: MA Experiment 20000794 PARAMETER Experiment Name: At_Petals_P Parameter: Plant Line Value: WS
  misc_feature: MA Experiment 20000794 PARAMETER Experiment Name: At_Petals_P Parameter: Tissue Value: Petals vs. Whole plant
  misc_feature: MA Experiment ID: 20001450 Result: Down-regulated in Transcription
  misc_feature: MA Experiment 20001450 PARAMETER Experiment Name: At_Far-red-induction_P Parameter: Age (day) Value: 7
  misc_feature: MA Experiment 20001450 PARAMETER Experiment Name: At_Far-red-induction_P Parameter: Light Value: Far-red vs. White
  misc_feature: MA Experiment 20001450 PARAMETER Experiment Name: At_Far-red-induction_P Parameter: Organism Value: A. thaliana
  misc_feature: MA Experiment 20001450 PARAMETER Experiment Name: At_Far-red-induction_P Parameter: Plant Line Value: Columbia
  misc_feature: MA Experiment 20001450 PARAMETER Experiment Name: At_Far-red-induction_P Parameter: Timepoint (hr) Value: 8
  misc_feature: MA Experiment 20001450 PARAMETER Experiment Name: At_Far-red-induction_P Parameter: Tissue Value: Whole Plant
  misc_feature: MA Experiment ID: 20001757 Result: Up-regulated in Transcription
  misc_feature: MA Experiment 20001757 PARAMETER Experiment Name: At_50mM_NH4NO3_L-to-H_P Parameter: Timepoint (hr) Value: 6
  misc_feature: MA Experiment 20001757 PARAMETER Experiment Name: At_50mM_NH4NO3_L-to-H_P Parameter: Tissue Value: Leaf
  misc_feature: MA Experiment 20001757 PARAMETER Experiment Name: At_50mM_NH4NO3_L-to-H_P Parameter: Treatment Value: 50mM NH4NO3 vs 100mM Mannitol
  misc_feature: MA Experiment ID: 20001905 Result: Down-regulated in Transcription
  misc_feature: MA Experiment 20001905 PARAMETER Experiment Name: At_Drought_Reproduction_P Parameter: Age (day) Value: 40
  misc_feature: MA Experiment 20001905 PARAMETER Experiment Name: At_Drought_Reproduction_P Parameter: Organism Value: A. thaliana
  misc_feature: MA Experiment 20001905 PARAMETER Experiment Name: At_Drought_Reproduction_P Parameter: Plant Line Value: WS
  misc_feature: MA Experiment 20001905 PARAMETER Experiment Name: At_Drought_Reproduction_P Parameter: Timepoint (day) Value: 10
  misc_feature: MA Experiment 20001905 PARAMETER Experiment Name: At_Drought_Reproduction_P Parameter: Tissue Value: Rosettes
  misc_feature: MA Experiment 20001905 PARAMETER Experiment Name: At_Drought_Reproduction_P Parameter: Treatment Value: Drought vs. No Drought
  misc_feature: MA Experiment ID: 20001911 Result: Down-regulated in Transcription
  misc_feature: MA Experiment 20001911 PARAMETER Experiment Name: At_Drought_Reproduction_P Parameter: Age (day) Value: 40
  misc_feature: MA Experiment 20001911 PARAMETER Experiment Name: At_Drought_Reproduction_P Parameter: Organism Value: A. thaliana
  misc_feature: MA Experiment 20001911 PARAMETER Experiment Name: At_Drought_Reproduction_P Parameter: Plant Line Value: WS
  misc_feature: MA Experiment 20001911 PARAMETER Experiment Name: At_Drought_Reproduction_P Parameter: Timepoint (day) Value: 10
  misc_feature: MA Experiment 20001911 PARAMETER Experiment Name: At_Drought_Reproduction_P Parameter: Tissue Value: Flowers
  misc_feature: MA Experiment 20001911 PARAMETER Experiment Name: At_Drought_Reproduction_P Parameter: Treatment Value: Drought vs. No Drought
gaattcctcgagctacgtcagggatggcgtcttcttcagcgacgctctctctctgctctactttctctgctcattgcaatgtcaattctcgccgttctagcactatcctctgttctctctctaaaccttcgcttaatttggctaaacctctgactggatttctttctccttccactgcgtcgacgtctcgaaccgcattcaccgtcgctccgaaattcgcggaatcagtcgtcgaagctgaaccggagactaccgatatcgaagctgtggtggtttccgatgtttcggaggttactgaggaaaaagctaaacgagaagagattttcgctgttattatggttggtggacgccaatacatagtgtttccagggagatatctctacactcagaggctaaaagatgcaaatgttgatgaccagattgttctcaacaaagtgttgcttgttggaacaaagacacacacttacattggcaagccggttgtgaccaatgccactgtacatgctgttgtggaaagtcaaggtttgaatgataaagtggtagtcttcaagtacaagcctaagaagaagtaccgtagaaatatcggtcacagacagccgaatacgaggattaggattaccggaatcacagggtatgaagagtatccagcctcgcccaatgttgcagttggagaagtaaatctttgacacaaaatgtttcttgaatgttaaaatttttctgatcttctctatgtaattttgtaaggaccctggtcatttcatttctgctgagattccttttattaatatgtaccttttgccattctttgaaaaaaagctacgtcagggccctgacgtagctcgaggaattc

SEQ ID NO: 76550 - protein, 227 aa, Arabidopsis thaliana
  peptide (1)..(227): Ceres Seq. ID no. 7108374
  misc_feature (107)..(203): Pfam Name: Ribosomal prokaryotic L21 protein Pfam Description: Ribosomal prokaryotic L21 protein
  misc_feature (8)..(227): Homolog of NCBI NO: 15219695 NR Description: 50S ribosomal protein L21 chloroplast precursor protein id: At1g35680.1, supported by cDNA: gi_16226898, by cDNA: gi_16648684 [Arabidopsis thaliana]
  misc_feature (104)..(217): Homolog of NCBI NO: 132776 NR Description: 50S RIBOSOMAL PROTEIN L21, CHLOROPLAST PRECURSOR
  misc_feature (73)..(213): Homolog of NCBI NO: 18417696 NR Description: WRKY family transcription factor; protein id: supported by cDNA: 7876. [Arabidopsis thaliana] putative ribosomal protein L21 [Arabidopsis thaliana]
  misc_feature (73)..(213): Homolog of NCBI NO: 25407696 NR Description: hypothetical protein AT4g30930 [imported] - thaliana >gi|2980773|emb|CAA18200.1| putative protein thaliana] >gi|7269995|emb|CAB79811.1| putative protein
  misc_feature (107)..(208): Homolog of NCBI NO: 28211680 NR Description: LSU ribosomal protein L21P [Clostridium tetani >gi|28204122|gb|AAO36561.1| LSU ribosomal protein L21P
  misc_feature (107)..(208): Homolog of NCBI NO: 15894539 NR Description: Ribosomal protein L21 [Clostridium acetobutylicum]
  misc_feature (107)..(208): Homolog of NCBI NO: 28868025 NR Description: ribosomal protein L21 [Pseudomonas syringae pv. str. DC3000] >gi|28851261|gb|AAO54339.1| ribosomal protein L21
  misc_feature (92)..(208): Homolog of NCBI NO: 5712722 NR Description: unknown [Pseudomonas sp. BG33R]
  misc_feature (108)..(208): Homolog of NCBI NO: 15674860 NR Description: 50S ribosomal protein L21 [Streptococcus >gi|19745900|ref|NP_607036.1| 50S ribosomal protein L21 pyogenes MGAS8232] >gi|21910088|ref|NP_664356.1| 50S ribosomal
  misc_feature (108)..(208): Homolog of NCBI NO: 22537517 NR Description: ribosomal protein L21 [Streptococcus agalactiae >gi|25011482|ref|NP_735877.1| 50S ribosomal protein L21 agalactiae NEM316] >gi|22534397|gb|AAN00241.1|AE014254_21
IPRATSGMASSSATLSLCSTFSAHCNVNSRRSSTILCSLSKPSLNLAKPLTGFLSPSTASTSRTAFTVAPKFAESVVEAEPETTDIEAVVVSDVSEVTEEKAKREEIFAVIMVGGRQYIVFPGRYLYTQRLKDANVDDQIVLNKVLLVGTKTHTYIGKPVVTNATVHAVVESQGLNDKVVVFKYKPKKKYRRNIGHRQPNTRIRITGITGYEEYPASPNVAVGEVNL

SEQ ID NO: 76551 - protein, 220 aa, Arabidopsis thaliana; identical to SEQ ID NO: 26779
  peptide (1)..(220): Ceres Seq. ID no. 7108375
  misc_feature (100)..(196): Pfam Name: Ribosomal prokaryotic L21 protein Pfam Description: Ribosomal prokaryotic L21 protein
  misc_feature (1)..(220): Homolog of NCBI NO: 15219695 NR Description: 50S ribosomal protein L21 chloroplast precursor protein id: At1g35680.1, supported by cDNA: gi_16226898, by cDNA: gi_16648684 [Arabidopsis thaliana]
  misc_feature (97)..(210): Homolog of NCBI NO: 132776 NR Description: 50S RIBOSOMAL PROTEIN L21, CHLOROPLAST PRECURSOR
  misc_feature (66)..(206): Homolog of NCBI NO: 18417696 NR Description: WRKY family transcription factor; protein id: supported by cDNA: 7876. [Arabidopsis thaliana] putative ribosomal protein L21 [Arabidopsis thaliana]
  misc_feature (66)..(206): Homolog of NCBI NO: 25407696 NR Description: hypothetical protein AT4g30930 [imported] - thaliana >gi|2980773|emb|CAA18200.1| putative protein thaliana] >gi|7269995|emb|CAB79811.1| putative protein
  misc_feature (100)..(201): Homolog of NCBI NO: 28211680 NR Description: LSU ribosomal protein L21P [Clostridium tetani >gi|28204122|gb|AAO36561.1| LSU ribosomal protein L21P
  misc_feature (100)..(201): Homolog of NCBI NO: 15894539 NR Description: Ribosomal protein L21 [Clostridium acetobutylicum]
  misc_feature (100)..(201): Homolog of NCBI NO: 28868025 NR Description: ribosomal protein L21 [Pseudomonas syringae pv. str. DC3000] >gi|28851261|gb|AAO54339.1| ribosomal protein L21
  misc_feature (85)..(201): Homolog of NCBI NO: 5712722 NR Description: unknown [Pseudomonas sp. BG33R]
  misc_feature (101)..(201): Homolog of NCBI NO: 15674860 NR Description: 50S ribosomal protein L21 [Streptococcus >gi|19745900|ref|NP_607036.1| 50S ribosomal protein L21 pyogenes MGAS8232] >gi|21910088|ref|NP_664356.1| 50S ribosomal
  misc_feature (101)..(201): Homolog of NCBI NO: 22537517 NR Description: ribosomal protein L21 [Streptococcus agalactiae >gi|25011482|ref|NP_735877.1| 50S ribosomal protein L21 agalactiae NEM316] >gi|22534397|gb|AAN00241.1|AE014254_21

SEQ ID NO: 76552 - protein, 116 aa, Arabidopsis thaliana; identical to SEQ ID NO: 26780
  peptide (1)..(116): Ceres Seq. ID no. 7108376
  misc_feature (1)..(92): Pfam Name: Ribosomal prokaryotic L21 protein Pfam Description: Ribosomal prokaryotic L21 protein
  misc_feature (1)..(116): Homolog of NCBI NO: 15219695 NR Description: 50S ribosomal protein L21 chloroplast precursor protein id: At1g35680.1, supported by cDNA: gi_16226898, by cDNA: gi_16648684 [Arabidopsis thaliana]
  misc_feature (1)..(106): Homolog of NCBI NO: 132776 NR Description: 50S RIBOSOMAL PROTEIN L21, CHLOROPLAST PRECURSOR
  misc_feature (1)..(102): Homolog of NCBI NO: 18417696 NR Description: WRKY family transcription factor; protein id: supported by cDNA: 7876. [Arabidopsis thaliana] putative ribosomal protein L21 [Arabidopsis thaliana]
  misc_feature (1)..(102): Homolog of NCBI NO: 25407696 NR Description: hypothetical protein AT4g30930 [imported] - thaliana >gi|2980773|emb|CAA18200.1| putative protein thaliana] >gi|7269995|emb|CAB79811.1| putative protein
  misc_feature (1)..(97): Homolog of NCBI NO: 28211680 NR Description: LSU ribosomal protein L21P [Clostridium tetani >gi|28204122|gb|AAO36561.1| LSU ribosomal protein L21P
  misc_feature (1)..(97): Homolog of NCBI NO: 15894539 NR Description: Ribosomal protein L21 [Clostridium acetobutylicum]
  misc_feature (1)..(97): Homolog of NCBI NO: 28868025 NR Description: ribosomal protein L21 [Pseudomonas syringae pv. str. DC3000] >gi|28851261|gb|AAO54339.1| ribosomal protein L21
  misc_feature (1)..(97): Homolog of NCBI NO: 5712722 NR Description: unknown [Pseudomonas sp. BG33R]
  misc_feature (1)..(97): Homolog of NCBI NO: 15674860 NR Description: 50S ribosomal protein L21 [Streptococcus >gi|19745900|ref|NP_607036.1| 50S ribosomal protein L21 pyogenes MGAS8232] >gi|21910088|ref|NP_664356.1| 50S ribosomal
  misc_feature (1)..(97): Homolog of NCBI NO: 22537517 NR Description: ribosomal protein L21 [Streptococcus agalactiae >gi|25011482|ref|NP_735877.1| 50S ribosomal protein L21 agalactiae NEM316] >gi|22534397|gb|AAN00241.1|AE014254_21

SEQ ID NO: 76553 - DNA, 925 bp, Arabidopsis thaliana
  misc_feature (1)..(925): Ceres Seq. ID no. 7108377
  misc_feature: MA Experiment ID: 108434 Result: Up-regulated in Transcription
  misc_feature: MA Experiment 108434 PARAMETER Experiment Name: At_Root_Tips_cDNA_P Parameter: Tissue Value: Root Tips
  misc_feature: MA Experiment ID: 108464 Result: Down-regulated in Transcription
  misc_feature: MA Experiment 108464 PARAMETER Experiment Name: At_Germinating_Seeds_cDNA_P Parameter: Age (day) Value: 4 vs. 0
  misc_feature: MA Experiment 108464 PARAMETER Experiment Name: At_Germinating_Seeds_cDNA_P Parameter: Tissue Value: Germinating Seeds
  misc_feature: MA Experiment ID: 20000090 Result: Up-regulated in Transcription
gagagagagagagagagagagagagggtttcttcgaggactttggcatactgcaggttgttggagctgtagtgcttaaaaaccctacctttatactgtttagagcagcagtccctccatgtcaggtctttgtggcgttatgcagagctcgagcttctgcttcgtcttctttattcaacagcgttattcgtcagcattcgcattctctacacctttccgctgatacacagaacaaatcattggtagcacaaatgaaagaagagatgctccacatggacatcaactcaatgataggaagttccatgccactaggtatgatgcgtatcggaacaatcatccacaacatcgagatgaacccagggcaaggcgcaaagatggtccgagctgcaggaaccaacgccaagatcctaaaggagcctgctaaagggaaatgcttgataaagcttccgtcaggggacaccaagtggatcaatgccaaatgtcgtgctacgattggcacagtgtcgaacccgtctcatggaacgaagaagctatataaagcaggacagagtaggtggttagggataaggcccaaagttagaggagtggcgatgaatccgtgtgatcatccacacggtggaggtgaaggaaaaagcaaaagtagtggaagcagaggaaggacatcggttagtccgtggggaaaaccgtgtaaaggcggttacaaatcagctagtgtcaagaagaagaagaagcgtttggcagaagcagcagccaaaatgtgatatgggtgaacaagtttcgattttcttcaacgtttctttcttttaaaaagcctccaatgttatttggttacgttattgaatctgttttttgagagttttttaggcttcatgaaactagaagatctttgatcagttgagaataaatatggttacgtgtttactttt

SEQ ID NO: 76554 - protein, 252 aa, Arabidopsis thaliana
  peptide (1)..(252): Ceres Seq. ID no. 7108378
  misc_feature (95)..(228): Pfam Name: Ribosomal Proteins L2, C-terminal domain Pfam Description: Ribosomal Proteins L2, C-terminal domain
  misc_feature (44)..(252): Homolog of NCBI NO: 18406440 NR Description: Expressed protein; protein id: At2g44065.1, by cDNA: 24003., supported by cDNA: gi_17380713, supported by gi_20259008 [Arabidopsis thaliana] >gi|17380714|gb|AAL36187.1|
  misc_feature (44)..(252): Homolog of NCBI NO: 21592449 NR Description: unknown [Arabidopsis thaliana]
  misc_feature (84)..(252): Homolog of NCBI NO: 1076398 NR Description: ribosomal protein L2 - Arabidopsis thaliana
  misc_feature (57)..(241): Homolog of NCBI NO: 17644114 NR Description: ribosomal protein L2 [Gossypium arboreum]
  misc_feature (44)..(242): Homolog of NCBI NO: 17644112 NR Description: ribosomal protein L2 [Lycopersicon esculentum]
  misc_feature (91)..(242): Homolog of NCBI NO: 17644110 NR Description: ribosomal protein L2 [Zea mays]
  misc_feature (91)..(245): Homolog of NCBI NO: 6094106 NR Description: MITOCHONDRIAL 60S RIBOSOMAL PROTEIN L2
  misc_feature (91)..(245): Homolog of NCBI NO: 7440638 NR Description: probable ribosomal protein L2 [imported] - rice
  misc_feature (91)..(235): Homolog of NCBI NO: 17933116 NR Description: ribosomal protein L2 [Dicentra sp. Qiu 95026]
  misc_feature (91)..(230): Homolog of NCBI NO: 17933118 NR Description: ribosomal protein L2 [Platanus occidentalis]
REREREREGFFEDFGILQVVGAVVLKNPTFILFRAAVPPCQVFVALCRARASASSSLFNSVIRQHSHSLHLSADTQNKSLVAQMKEEMLHMDINSMIGSSMPLGMMRIGTIIHNIEMNPGQGAKMVRAAGTNAKILKEPAKGKCLIKLPSGDTKWINAKCRATIGTVSNPSHGTKKLYKAGQSRWLGIRPKVRGVAMNPCDHPHGGGEGKSKSSGSRGRTSVSPWGKPCKGGYKSASVKKKKKRLAEAAAKM

SEQ ID NO: 76555 - protein, 169 aa, Arabidopsis thaliana; identical to SEQ ID NO: 35520
  peptide (1)..(169): Ceres Seq. ID no. 7108379
  misc_feature (12)..(145): Pfam Name: Ribosomal Proteins L2, C-terminal domain Pfam Description: Ribosomal Proteins L2, C-terminal domain
  misc_feature (1)..(169): Homolog of NCBI NO: 18406440 NR Description: Expressed protein; protein id: At2g44065.1, by cDNA: 24003., supported by cDNA: gi_17380713, supported by gi_20259008 [Arabidopsis thaliana] >gi|17380714|gb|AAL36187.1|
  misc_feature (1)..(169): Homolog of NCBI NO: 21592449 NR Description: unknown [Arabidopsis thaliana]
  misc_feature (1)..(169): Homolog of NCBI NO: 1076398 NR Description: ribosomal protein L2 - Arabidopsis thaliana
  misc_feature (1)..(158): Homolog of NCBI NO: 17644114 NR Description: ribosomal protein L2 [Gossypium arboreum]
  misc_feature (1)..(159): Homolog of NCBI NO: 17644112 NR Description: ribosomal protein L2 [Lycopersicon esculentum]
  misc_feature (8)..(159): Homolog of NCBI NO: 17644110 NR Description: ribosomal protein L2 [Zea mays]
  misc_feature (8)..(162): Homolog of NCBI NO: 6094106 NR Description: MITOCHONDRIAL 60S RIBOSOMAL PROTEIN L2
  misc_feature (8)..(162): Homolog of NCBI NO: 7440638 NR Description: probable ribosomal protein L2 [imported] - rice
  misc_feature (8)..(152): Homolog of NCBI NO: 17933116 NR Description: ribosomal protein L2 [Dicentra sp. Qiu 95026]
  misc_feature (8)..(147): Homolog of NCBI NO: 17933118 NR Description: ribosomal protein L2 [Platanus occidentalis]

SEQ ID NO: 76556 - protein, 165 aa, Arabidopsis thaliana; identical to SEQ ID NO: 35521
  peptide (1)..(165): Ceres Seq. ID no. 7108380
  misc_feature (8)..(141): Pfam Name: Ribosomal Proteins L2, C-terminal domain Pfam Description: Ribosomal Proteins L2, C-terminal domain
  misc_feature (1)..(165): Homolog of NCBI NO: 18406440 NR Description: Expressed protein; protein id: At2g44065.1, by cDNA: 24003., supported by cDNA: gi_17380713, supported by gi_20259008 [Arabidopsis thaliana] >gi|17380714|gb|AAL36187.1|
  misc_feature (1)..(165): Homolog of NCBI NO: 21592449 NR Description: unknown [Arabidopsis thaliana]
  misc_feature (1)..(165): Homolog of NCBI NO: 1076398 NR Description: ribosomal protein L2 - Arabidopsis thaliana
  misc_feature (1)..(154): Homolog of NCBI NO: 17644114 NR Description: ribosomal protein L2 [Gossypium arboreum]
  misc_feature (1)..(155): Homolog of NCBI NO: 17644112 NR Description: ribosomal protein L2 [Lycopersicon esculentum]
  misc_feature (4)..(155): Homolog of NCBI NO: 17644110 NR Description: ribosomal protein L2 [Zea mays]
  misc_feature (4)..(158): Homolog of NCBI NO: 6094106 NR Description: MITOCHONDRIAL 60S RIBOSOMAL PROTEIN L2
  misc_feature (4)..(158): Homolog of NCBI NO: 7440638 NR Description: probable ribosomal protein L2 [imported] - rice
  misc_feature (4)..(148): Homolog of NCBI NO: 17933116 NR Description: ribosomal protein L2 [Dicentra sp. Qiu 95026]
  misc_feature (4)..(143): Homolog of NCBI NO: 17933118 NR Description: ribosomal protein L2 [Platanus occidentalis]

SEQ ID NO: 76557 - DNA, 1078 bp, Arabidopsis thaliana
  misc_feature (1)..(1078): Ceres Seq. ID no. 7108389
  misc_feature: MA Experiment ID: 20000185 Result: Down-regulated in Transcription
  misc_feature: MA Experiment 20000185 PARAMETER Experiment Name: At_Roots__P Parameter: Age (day) Value: 7 vs. 21
  misc_feature: MA Experiment 20000185 PARAMETER Experiment Name: At_Roots__P Parameter: Organism Value: A. thaliana
  misc_feature: MA Experiment 20000185 PARAMETER Experiment Name: At_Roots__P Parameter: Tissue Value: Roots vs. Whole Plant
  misc_feature: MA Experiment ID: 20000439 Result: Down-regulated in Transcription
  misc_feature: MA Experiment 20000439 PARAMETER Experiment Name: At_Roots__P Parameter: Age (day) Value: 14 vs. 21
  misc_feature: MA Experiment 20000439 PARAMETER Experiment Name: At_Roots__P Parameter: Organism Value: A. thaliana
  misc_feature: MA Experiment 20000439 PARAMETER Experiment Name: At_Roots__P Parameter: Tissue Value: Roots vs. Whole Plant
  misc_feature: MA Experiment ID: 20000794 Result: Down-regulated in Transcription
  misc_feature: MA Experiment 20000794 PARAMETER Experiment Name: At_Petals_P Parameter: Age (day) Value: 23-25 days
  misc_feature: MA Experiment 20000794 PARAMETER Experiment Name: At_Petals_P Parameter: Plant Line Value: WS
  misc_feature: MA Experiment 20000794 PARAMETER Experiment Name: At_Petals_P Parameter: Tissue Value: Petals vs. Whole plant
  misc_feature: MA Experiment ID: 20001757 Result: Up-regulated in Transcription
  misc_feature: MA Experiment 20001757 PARAMETER Experiment Name: At_50mM_NH4NO3_L-to-H_P Parameter: Timepoint (hr) Value: 6
  misc_feature: MA Experiment 20001757 PARAMETER Experiment Name: At_50mM_NH4NO3_L-to-H_P Parameter: Tissue Value: Leaf
  misc_feature: MA Experiment 20001757 PARAMETER Experiment Name: At_50mM_NH4NO3_L-to-H_P Parameter: Treatment Value: 50mM NH4NO3 vs 100mM Mannitol
  misc_feature: MA Experiment ID: 20001906 Result: Down-regulated in Transcription
  misc_feature: MA Experiment 20001906 PARAMETER Experiment Name: At_Drought_Reproduction_P Parameter: Age (day) Value: 35
  misc_feature: MA Experiment 20001906 PARAMETER Experiment Name: At_Drought_Reproduction_P Parameter: Organism Value: A. thaliana
  misc_feature: MA Experiment 20001906 PARAMETER Experiment Name: At_Drought_Reproduction_P Parameter: Plant Line Value: WS
  misc_feature: MA Experiment 20001906 PARAMETER Experiment Name: At_Drought_Reproduction_P Parameter: Timepoint (day) Value: 5
  misc_feature: MA Experiment 20001906 PARAMETER Experiment Name: At_Drought_Reproduction_P Parameter: Tissue Value: Siliques
  misc_feature: MA Experiment 20001906 PARAMETER Experiment Name: At_Drought_Reproduction_P Parameter: Treatment Value: Drought vs. No Drought
cccagcaacgccaaacaccccggccaccccagccaccccaaacaccccagccacgccaaacaccccgaccacgccaacgaccccgaccacgccatcgaccccggccactccagccaccccagcaacgccaaacaccccaaaacccaccttaaaaaatccccctttgtctccttcgttgcccagactttggattgggctgaagaaggtggagaaggaagcgtcgctgttgaggagaccgagaacagtttagagtcacaagatgtgagcgaaggagatgagagcgaaggagatgcgagcgaaggagatgtgagcgaaggagatgagagcgaaggagatgtgagcgaaggagctgtgagcgaaagagctgagttcccggagccatcggaagaagccaagcttttcgtcggaaatttggcttatgatgttaatagccaagctttggctatgctctttgagcaagccggtactgttgaaatcgccgaggttatatacaatagggaaactgaccagagtcgtgggtttggatttgtgacaatgagttctgtggacgaagctgagacagctgtggagaagttcaaccgttatgatcttaacggacgtctactaactgtaaacaaggcagctccaagaggatcacgtccagaacgtgcgcctcgggtatatgaacctgcattcagagtatatgtagggaatctaccatgggatgtggacaatggccgtctagaacagcttttcagtgagcatggtaaagttgtggaagctagggtggtttacgaccgtgagacaggtcgttcacgtggattcgggtttgtcacaatgtctgacgtggatgaactcaacgaagccatctctgccctcgatggacagaacttggagggtagagcaatcagagtgaatgtagcggaagagcgtcctccaaggcgtggatattaaagctgagatctagctgtgccctctctctctccctatcttgcattttgtttagacgagattcttacactcttcaacgattgtttttggctgaactctgaatgtgaaagttaagctgcttctaaagtaatttgtatcgcttgttttt

SEQ ID NO: 76558 - protein, 310 aa, Arabidopsis thaliana
  peptide (1)..(310): Ceres Seq. ID no. 7108390
  misc_feature (227)..(298): Pfam Name: RNA recognition motif. (a.k.a. RRM, RBD, or RNP domain) Pfam Description: RNA recognition motif. (a.k.a. RRM, RBD, or RNP
  misc_feature (1)..(310): Homolog of NCBI NO: 629557 NR Description: RNA-binding protein RNP-D precursor - Arabidopsis (fragment) >gi|510240|emb|CAA43420.1| RNA binding protein
  misc_feature (47)..(310): Homolog of NCBI NO: 475719 NR Description: RNA-binding protein 2
  misc_feature (47)..(310): Homolog of NCBI NO: 15233980 NR Description: 31 kDa ribonucleoprotein, chloroplast precursor protein cp31); protein id: At4g24770.1, supported by cDNA: supported by cDNA: gi_387568 [Arabidopsis thaliana]
  misc_feature (47)..(310): Homolog of NCBI NO: 15294254 NR Description: AT4g24770/F22K18_30 [Arabidopsis thaliana]
  misc_feature (47)..(310): Homolog of NCBI NO: 681908 NR Description: cp31 [Arabidopsis thaliana]
  misc_feature (47)..(310): Homolog of NCBI NO: 1076305 NR Description: RNA-binding protein cp31 precursor - Arabidopsis
  misc_feature (67)..(310): Homolog of NCBI NO: 99684 NR Description: DNA-binding protein - Arabidopsis thaliana
  misc_feature (39)..(310): Homolog of NCBI NO: 19032260 NR Description: RNA-binding protein precursor [Persea americana]
  misc_feature (149)..(310): Homolog of NCBI NO: 475720 NR Description: RNA-binding protein 3
  misc_feature (85)..(307): Homolog of NCBI NO: 15240641 NR Description: chloroplast RNA-binding protein cp31, putative; id: At5g50250.1, supported by cDNA: gi_14532487, supported by
PSNAKHPGHPSHPKHPSHAKHPDHANDPDHAIDPGHSSHPSNAKHPKTHLKKSPFVSFVAQTLDWAEEGGEGSVAVEETENSLESQDVSEGDESEGDASEGDVSEGDESEGDVSEGAVSERAEFPEPSEEAKLFVGNLAYDVNSQALAMLFEQAGTVEIAEVIYNRETDQSRGFGFVTMSSVDEAETAVEKFNRYDLNGRLLTVNKAAPRGSRPERAPRVYEPAFRVYVGNLPWDVDNGRLEQLFSEHGKVVEARVVYDRETGRSRGFGFVTMSDVDELNEAISALDGQNLEGRAIRVNVAEERPPRRGY

SEQ ID NO: 76559 - protein, 162 aa, Arabidopsis thaliana
  peptide (1)..(162): Ceres Seq. ID no. 7108391
  misc_feature (79)..(150): Pfam Name: RNA recognition motif. (a.k.a. RRM, RBD, or RNP domain) Pfam Description: RNA recognition motif. (a.k.a. RRM, RBD, or RNP
  misc_feature (1)..(162): Homolog of NCBI NO: 629557 NR Description: RNA-binding protein RNP-D precursor - Arabidopsis (fragment) >gi|510240|emb|CAA43420.1| RNA binding protein
  misc_feature (1)..(162): Homolog of NCBI NO: 475719 NR Description: RNA-binding protein 2
  misc_feature (1)..(162): Homolog of NCBI NO: 15233980 NR Description: 31 kDa ribonucleoprotein, chloroplast precursor protein cp31); protein id: At4g24770.1, supported by cDNA: supported by cDNA: gi_387568 [Arabidopsis thaliana]
  misc_feature (1)..(162): Homolog of NCBI NO: 15294254 NR Description: AT4g24770/F22K18_30 [Arabidopsis thaliana]
  misc_feature (1)..(162): Homolog of NCBI NO: 681908 NR Description: cp31 [Arabidopsis thaliana]
  misc_feature (1)..(162): Homolog of NCBI NO: 1076305 NR Description: RNA-binding protein cp31 precursor - Arabidopsis
  misc_feature (1)..(162): Homolog of NCBI NO: 99684 NR Description: DNA-binding protein - Arabidopsis thaliana
  misc_feature (1)..(162): Homolog of NCBI NO: 19032260 NR Description: RNA-binding protein precursor [Persea americana]
  misc_feature (1)..(162): Homolog of NCBI NO: 475720 NR Description: RNA-binding protein 3
  misc_feature (1)..(159): Homolog of NCBI NO: 15240641 NR Description: chloroplast RNA-binding protein cp31, putative; id: At5g50250.1, supported by cDNA: gi_14532487, supported by
MLFEQAGTVEIAEVIYNRETDQSRGFGFVTMSSVDEAETAVEKFNRYDLNGRLLTVNKAAPRGSRPERAPRVYEPAFRVYVGNLPWDVDNGRLEQLFSEHGKVVEARVVYDRETGRSRGFGFVTMSDVDELNEAISALDGQNLEGRAIRVNVAEERPPRRGY

SEQ ID NO: 76560 - DNA, 1767 bp, Arabidopsis thaliana
  misc_feature (1)..(1767): Ceres Seq. ID no. 7108392
  misc_feature: MA Experiment ID: 20000180 Result: Down-regulated in Transcription
  misc_feature: MA Experiment 20000180 PARAMETER Experiment Name: At_Germinating_Seeds_P Parameter: Age (hr) Value: 24 vs. 0
  misc_feature: MA Experiment 20000180 PARAMETER Experiment Name: At_Germinating_Seeds_P Parameter: Tissue Value: Germinating Seeds
  misc_feature: MA Experiment ID: 20000184 Result: Up-regulated in Transcription
  misc_feature: MA Experiment 20000184 PARAMETER Experiment Name: At_Shoots__P Parameter: Age (day) Value: 7
  misc_feature: MA Experiment 20000184 PARAMETER Experiment Name: At_Shoots__P Parameter: Tissue Value: Shoots vs. Whole Plant
  misc_feature: MA Experiment ID: 20000439 Result: Down-regulated in Transcription
  misc_feature: MA Experiment 20000439 PARAMETER Experiment Name: At_Roots__P Parameter: Age (day) Value: 14 vs. 21
  misc_feature: MA Experiment 20000439 PARAMETER Experiment Name: At_Roots__P Parameter: Organism Value: A. thaliana
  misc_feature: MA Experiment 20000439 PARAMETER Experiment Name: At_Roots__P Parameter: Tissue Value: Roots vs. Whole Plant
  misc_feature: MA Experiment ID: 20000452 Result: Up-regulated in Transcription
  misc_feature: MA Experiment 20000452 PARAMETER Experiment Name: At_CS6879_Shoots-Roots_P Parameter: Age (day) Value: 14
  misc_feature: MA Experiment 20000452 PARAMETER Experiment Name: At_CS6879_Shoots-Roots_P Parameter: Organism Value: A. thaliana
  misc_feature: MA Experiment 20000452 PARAMETER Experiment Name: At_CS6879_Shoots-Roots_P Parameter: Plant Line Value: CS6879 vs. WS
  misc_feature: MA Experiment 20000452 PARAMETER Experiment Name: At_CS6879_Shoots-Roots_P Parameter: Tissue Value: Shoots
  misc_feature: MA Experiment ID: 20001248 Result: Down-regulated in Transcription
  misc_feature: MA Experiment 20001248 PARAMETER Experiment Name: At_Far-red-induction_P Parameter: Age (day) Value: 7
  misc_feature: MA Experiment 20001248 PARAMETER Experiment Name: At_Far-red-induction_P Parameter: Light Value: Far-red vs. White
  misc_feature: MA Experiment 20001248 PARAMETER Experiment Name: At_Far-red-induction_P Parameter: Organism Value: A. thaliana
  misc_feature: MA Experiment 20001248 PARAMETER Experiment Name: At_Far-red-induction_P Parameter: Plant Line Value: Columbia
  misc_feature: MA Experiment 20001248 PARAMETER Experiment Name: At_Far-red-induction_P Parameter: Timepoint (hr) Value: 4
  misc_feature: MA Experiment 20001248 PARAMETER Experiment Name: At_Far-red-induction_P Parameter: Tissue Value: Whole Plant
  misc_feature: MA Experiment ID: 20001904 Result: Down-regulated in Transcription
  misc_feature: MA Experiment 20001904 PARAMETER Experiment Name: At_Drought_Reproduction_P Parameter: Age (day) Value: 37
  misc_feature: MA Experiment 20001904 PARAMETER Experiment Name: At_Drought_Reproduction_P Parameter: Organism Value: A. thaliana
  misc_feature: MA Experiment 20001904 PARAMETER Experiment Name: At_Drought_Reproduction_P Parameter: Plant Line Value: WS
  misc_feature: MA Experiment 20001904 PARAMETER Experiment Name: At_Drought_Reproduction_P Parameter: Timepoint (day) Value: 7
  misc_feature: MA Experiment 20001904 PARAMETER Experiment Name: At_Drought_Reproduction_P Parameter: Tissue Value: Rosettes
  misc_feature: MA Experiment 20001904 PARAMETER Experiment Name: At_Drought_Reproduction_P Parameter: Treatment Value: Drought vs. No Drought
  misc_feature: MA Experiment ID: 20001911 Result: Up-regulated in Transcription
  misc_feature: MA Experiment 20001911 PARAMETER Experiment Name: At_Drought_Reproduction_P Parameter: Age (day) Value: 40
  misc_feature: MA Experiment 20001911 PARAMETER Experiment Name: At_Drought_Reproduction_P Parameter: Organism Value: A. thaliana
  misc_feature: MA Experiment 20001911 PARAMETER Experiment Name: At_Drought_Reproduction_P Parameter: Plant Line Value: WS
  misc_feature: MA Experiment 20001911 PARAMETER Experiment Name: At_Drought_Reproduction_P Parameter: Timepoint (day) Value: 10
  misc_feature: MA Experiment 20001911 PARAMETER Experiment Name: At_Drought_Reproduction_P Parameter: Tissue Value: Flowers
  misc_feature: MA Experiment 20001911 PARAMETER Experiment Name: At_Drought_Reproduction_P Parameter: Treatment Value: Drought vs. No Drought
cacccacgcgtccggaaatgtacgaatagagagtgaagtgaacgacacataataaaaccaaagaatggagatatggttactcatattggcctctctctccggatctctccttttccatctcctcctccgccgccgtaactcctcctcccctccgttacctcctgaccctaacttcttacctttcctcggaaccctccagtggctccgggaaggcttaggtggcctcgaatcctatctccgctctgtccaccaccgtctaggccccatcgtcaccctccgcatcacttcccgccccgccatattcgttgccgatcgttccctaactcacgaggctctcgtcctgaacggcgggccgtctatgcggaccgtccaccacctgcctgtaattagcaagatagttgacgaacacaacatcagctccgggtcatacggagccacgtggcggcttctccgtcgaaacatcacctctgagattcttcacccctcgcgcgtgagatcttactcccacgctcgtcattgggttcttgagatcctctttgaacggttccgtaaccacggaggcgatgaaccgatcgtcctcatccaccatctccactatgcaatgtttgcgcttcttgtccttatgtgttttggagataagcttgatgagaagcaaatcaaacaagtggagttcattcagaggctccaactcctaagcttgtccagattcaacatcttcaacatctggcctaagttcaccaaactgattctacgaaagaggtggcaagaatttctccagattcggagacagcagcgggacattttgcttcccctgattcgtgcccggagaagatcattgaagagagaaaagagatcggaggaagaagacaagaaagactatgtgcaatcatatgttgatactctactcgatctagagcttccagaggaaaataggaagttgaacgaggaagatattatgaacttgtgctcggagtttctcacggccgggactgacacgacggccacggcgctgcaatggatcatggccaacctagtgaaatatccagaaatccaggagagattacacgaggagatcaagagcgtggttggaagaagcaaaggaggtggggaagaagatgtggagaagatgccgtatctaaaggcactggtgttagagggactccggagacaccctccaggacactttttactcccacacagtgtcacggaggacactgtgttaggaggatacaaagtaccgaagaacgggacgatcaacttcatggtggcggagatagggagggatccagtggagtgggaagaaccaatggcgtttaagccagagaggtttatgggagaagaagaagcggtggacctaaccggaagtagagggataaagatgatgccgttcggagcaggaagaaggatatgtccgggcataggtctagcaatgttgcatctggagtactacgtcgccaacatggtcagagagttccaatggaaagaggtggaaggtcatgaagttgacttgacggagaagcttgaattcactgtcgtcatgaagcatccgcttaaggctcttgctgttcctaggagatgtcactagtctacttcttcctcttttcttgggctttaatattcaaaatgtgtgaacttagtttggtggaattctcaataaactatgggataagtcataaaaaagagttattatgctgaccgtttgtactttgtattcaagtgtatgttggacaccttaaaataaaacagatatttatatagttcagattt

SEQ ID NO: 76561 - protein, 506 aa, Arabidopsis thaliana
  peptide (1)..(506): Ceres Seq. ID no. 7108393
  misc_feature (32)..(502): Pfam Name: Cytochrome P450 Pfam Description: Cytochrome P450
  misc_feature (1)..(506): Homolog of NCBI NO: 1432145 NR Description: cytochrome P450 [Arabidopsis thaliana]
  misc_feature (1)..(506): Homolog of NCBI NO: 15217771 NR Description: cytochrome p450, putative; protein id:
  misc_feature (1)..(506): Homolog of NCBI NO: 15224379 NR Description: cytochrome p450, putative; protein id: [Arabidopsis thaliana] >gi|25282595|pir||E84501 probable
  misc_feature (1)..(506): Homolog of NCBI NO: 15217801 NR Description: cytochrome p450, putative; protein id: supported by cDNA: gi_14334809, supported by cDNA: gi_15293196, by cDNA: gi_15450600 [Arabidopsis thaliana]
  misc_feature (1)..(506): Homolog of NCBI NO: 15450601 NR Description: At1g64950/F13O11_25 [Arabidopsis thaliana]
  misc_feature (1)..(506): Homolog of NCBI NO: 15217800 NR Description: cytochrome p450, putative; protein id: [Arabidopsis thaliana] >gi|25282572|pir||H96672 probable
  misc_feature (1)..(506): Homolog of NCBI NO: 15217798 NR Description: cytochrome p450, putative; protein id: [Arabidopsis thaliana] >gi|25282571|pir||G96672 hypothetical
  misc_feature (1)..(297): Homolog of NCBI NO: 9757853 NR Description: cytochrome P450-like protein [Arabidopsis
  misc_feature (328)..(504): Homolog of NCBI NO: 9757853 NR Description: cytochrome P450-like protein [Arabidopsis
  misc_feature (31)..(504): Homolog of NCBI NO: 37536044 NR Description: putative cytochrome P450 [Oryza sativa (japonica group)] >gi|10140669|gb|AAG13504.1| putative cytochrome P450
MEIWLLILASLSGSLLFHLLLRRRNSSSPPLPPDPNFLPFLGTLQWLREGLGGLESYLRSVHHRLGPIVTLRITSRPAIFVADRSLTHEALVLNGGPSMRTVHHLPVISKIVDEHNISSGSYGATWRLLRRNITSEILHPSRVRSYSHARHWVLEILFERFRNHGGDEPIVLIHHLHYAMFALLVLMCFGDKLDEKQIKQVEFIQRLQLLSLSRFNIFNIWPKFTKLILRKRWQEFLQIRRQQRDILLPLIRARRRSLKREKRSEEEDKKDYVQSYVDTLLDLELPEENRKLNEEDIMNLCSEFLTAGTDTTATALQWIMANLVKYPEIQERLHEEIKSVVGRSKGGGEEDVEKMPYLKALVLEGLRRHPPGHFLLPHSVTEDTVLGGYKVPKNGTINFMVAEIGRDPVEWEEPMAFKPERFMGEEEAVDLTGSRGIKMMPFGAGRRICPGIGLAMLHLEYYVANMVREFQWKEVEGHEVDLTEKLEFTVVMKHPLKALAVPRRCH

SEQ ID NO: 76562 - protein, 408 aa, Arabidopsis thaliana
  peptide (1)..(408): Ceres Seq. ID no. 7108394
  misc_feature (1)..(404): Pfam Name: Cytochrome P450 Pfam Description: Cytochrome P450
  misc_feature (1)..(408): Homolog of NCBI NO: 1432145 NR Description: cytochrome P450 [Arabidopsis thaliana]
  misc_feature (1)..(408): Homolog of NCBI NO: 15217771 NR Description: cytochrome p450, putative; protein id:
  misc_feature (1)..(408): Homolog of NCBI NO: 15224379 NR Description: cytochrome p450, putative; protein id: [Arabidopsis thaliana] >gi|25282595|pir||E84501 probable
  misc_feature (1)..(408): Homolog of NCBI NO: 15217801 NR Description: cytochrome p450, putative; protein id: supported by cDNA: gi_14334809, supported by cDNA: gi_15293196, by cDNA: gi_15450600 [Arabidopsis thaliana]
  misc_feature (1)..(408): Homolog of NCBI NO: 15450601 NR Description: At1g64950/F13O11_25 [Arabidopsis thaliana]
  misc_feature (1)..(408): Homolog of NCBI NO: 15217800 NR Description: cytochrome p450, putative; protein id: [Arabidopsis thaliana] >gi|25282572|pir||H96672 probable
  misc_feature (1)..(408): Homolog of NCBI NO: 15217798 NR Description: cytochrome p450, putative; protein id: [Arabidopsis thaliana] >gi|25282571|pir||G96672 hypothetical
  misc_feature (1)..(199): Homolog of NCBI NO: 9757853 NR Description: cytochrome P450-like protein [Arabidopsis
  misc_feature (230)..(406): Homolog of NCBI NO: 9757853 NR Description: cytochrome P450-like protein [Arabidopsis
  misc_feature (1)..(406): Homolog of NCBI NO: 37536044 NR Description: putative cytochrome P450 [Oryza sativa (japonica group)] >gi|10140669|gb|AAG13504.1| putative cytochrome P450
MRTVHHLPVISKIVDEHNISSGSYGATWRLLRRNITSEILHPSRVRSYSHARHWVLEILFERFRNHGGDEPIVLIHHLHYAMFALLVLMCFGDKLDEKQIKQVEFIQRLQLLSLSRFNIFNIWPKFTKLILRKRWQEFLQIRRQQRDILLPLIRARRRSLKREKRSEEEDKKDYVQSYVDTLLDLELPEENRKLNEEDIMNLCSEFLTAGTDTTATALQWIMANLVKYPEIQERLHEEIKSVVGRSKGGGEEDVEKMPYLKALVLEGLRRHPPGHFLLPHSVTEDTVLGGYKVPKNGTINFMVAEIGRDPVEWEEPMAFKPERFMGEEEAVDLTGSRGIKMMPFGAGRRICPGIGLAMLHLEYYVANMVREFQWKEVEGHEVDLTEKLEFTVVMKHPLKALAVPRRCH

SEQ ID NO: 76563 - protein, 327 aa, Arabidopsis thaliana
  peptide (1)..(327): Ceres Seq. ID no. 7108395
  misc_feature (1)..(323): Pfam Name: Cytochrome P450 Pfam Description: Cytochrome P450
  misc_feature (1)..(327): Homolog of NCBI NO: 1432145 NR Description: cytochrome P450 [Arabidopsis thaliana]
  misc_feature (1)..(327): Homolog of NCBI NO: 15217771 NR Description: cytochrome p450, putative; protein id:
  misc_feature (1)..(327): Homolog of NCBI NO: 15224379 NR Description: cytochrome p450, putative; protein id: [Arabidopsis thaliana] >gi|25282595|pir||E84501 probable
  misc_feature (1)..(327): Homolog of NCBI NO: 15217801 NR Description: cytochrome p450, putative; protein id: supported by cDNA: gi_14334809, supported by cDNA: gi_15293196, by cDNA: gi_15450600 [Arabidopsis thaliana]
  misc_feature (1)..(327): Homolog of NCBI NO: 15450601 NR Description: At1g64950/F13O11_25 [Arabidopsis thaliana]
  misc_feature (1)..(327): Homolog of NCBI NO: 15217800 NR Description: cytochrome p450, putative; protein id: [Arabidopsis thaliana] >gi|25282572|pir||H96672 probable
  misc_feature (1)..(327): Homolog of NCBI NO: 15217798 NR Description: cytochrome p450, putative; protein id: [Arabidopsis thaliana] >gi|25282571|pir||G96672 hypothetical
  misc_feature (1)..(118): Homolog of NCBI NO: 9757853 NR Description: cytochrome P450-like protein [Arabidopsis
  misc_feature (149)..(325): Homolog of NCBI NO: 9757853 NR Description: cytochrome P450-like protein [Arabidopsis
  misc_feature (1)..(325): Homolog of NCBI NO: 37536044 NR Description: putative cytochrome P450 [Oryza sativa (japonica group)] >gi|10140669|gb|AAG13504.1| putative cytochrome P450
MFALLVLMCFGDKLDEKQIKQVEFIQRLQLLSLSRFNIFNIWPKFTKLILRKRWQEFLQIRRQQRDILLPLIRARRRSLKREKRSEEEDKKDYVQSYVDTLLDLELPEENRKLNEEDIMNLCSEFLTAGTDTTATALQWIMANLVKYPEIQERLHEEIKSVVGRSKGGGEEDVEKMPYLKALVLEGLRRHPPGHFLLPHSVTEDTVLGGYKVPKNGTINFMVAEIGRDPVEWEEPMAFKPERFMGEEEAVDLTGSRGIKMMPFGAGRRICPGIGLAMLHLEYYVANMVREFQWKEVEGHEVDLTEKLEFTVVMKHPLKALAVPRRCH

SEQ ID NO: 76564 - DNA, 950 bp, Arabidopsis thaliana
  misc_feature (1)..(950): Ceres Seq. ID no. 7108399
  misc_feature: MA Experiment ID: 108434 Result: Up-regulated in Transcription
  misc_feature: MA Experiment 108434 PARAMETER Experiment Name: At_Root_Tips_cDNA_P Parameter: Tissue Value: Root Tips
  misc_feature: MA Experiment ID: 108595 Result: Up-regulated in Transcription
  misc_feature: MA Experiment 108595 PARAMETER Experiment Name: At_Ler-pi_Ovule_cDNA_P Parameter: Plant Line Value: null
  misc_feature: MA Experiment ID: 20000184 Result: Down-regulated in Transcription
  misc_feature: MA Experiment 20000184 PARAMETER Experiment Name: At_Shoots__P Parameter: Age (day) Value: 7
  misc_feature: MA Experiment 20000184 PARAMETER Experiment Name: At_Shoots__P Parameter: Tissue Value: Shoots vs. Whole Plant
  misc_feature: MA Experiment ID: 20001451 Result: Up-regulated in Transcription
  misc_feature: MA Experiment 20001451 PARAMETER Experiment Name: At_Far-red-induction_P Parameter: Age (day) Value: 7
  misc_feature: MA Experiment 20001451 PARAMETER Experiment Name: At_Far-red-induction_P Parameter: Light Value: Far-red vs. White
  misc_feature: MA Experiment 20001451 PARAMETER Experiment Name: At_Far-red-induction_P Parameter: Organism Value: A. thaliana
  misc_feature: MA Experiment 20001451 PARAMETER Experiment Name: At_Far-red-induction_P Parameter: Plant Line Value: Columbia
  misc_feature: MA Experiment 20001451 PARAMETER Experiment Name: At_Far-red-induction_P Parameter: Timepoint (hr) Value: 24
  misc_feature: MA Experiment 20001451 PARAMETER Experiment Name: At_Far-red-induction_P Parameter: Tissue Value: Whole Plant
gtcgacccacgcgtccggagagactttcagcagctatttctttgtcttctttctctataaagaacctcactctctctctctttagtcaaaaatccccaattcgtgaacaaattagggtttttgaagtttgaagaaggagagaaagatgagtgcttcaaggtttatcaagtgtgtcactgtcggcgacggtgctgttggaaagacttgtcttctcatctcctacactagcaacactttccccacggattatgtgccaactgtgttcgataatttcagtgccaatgtgattgttgatggcaacactatcaacttgggattgtgggatactgcagggcaagaggactacaatagactaagacctttgagctatcgcggtgcagatgtcttcttacttgcattctcacttgtcagcaaagctagctatgaaaatgtttctaaaaagtgggttcctgaactgagacattatgctcctggtgttcccatcatcctcgttggaacaaagcttgatcttcgacatgataagcaattctttgccgagcaccctggtgctgtgcctatctctaccgctcagggtgaagaactaaagaagctgattggggcgcctgcttatatcgaatgcagtgcaaaaactcaacagaatgtgaaagcagtgtttgatgcggctatcaaggtcgttctccagccaccaaaaaacaagaagaagaagaagagaaaatctcagaaaggttgttctatactctgattcaacaagaagaaaggaatcaacaggagaattagagctataagtatttgttttctcctttttcataacttgtttacccaaggaatcaaaaatctgttgtttgtagtctgaaaatgacaaaagttgaagaactagtaacaagtatttgtattcttgtttgcattttgatctgtaaatataccacgaatccttgatttctctgtttcct

SEQ ID NO: 76565 - protein, 198 aa, Arabidopsis thaliana
  peptide (1)..(198): Ceres Seq. ID no. 7108400
  misc_feature (8)..(179): Pfam Name: Ras family Pfam Description: Ras family
  misc_feature (1)..(198): Homolog of NCBI NO: 1732519 NR Description: Rho1Ps homolog [Arabidopsis thaliana]
  misc_feature (1)..(198): Homolog of NCBI NO: 15236247 NR Description: Rho1Ps homolog Rac-like protein; protein id: supported by cDNA: gi_1732518, supported by cDNA: gi_2645642
  misc_feature (1)..(198): Homolog of NCBI NO: 28393687 NR Description: putative Rho1Ps homolog Rac protein [Arabidopsis
  misc_feature (1)..(198): Homolog of NCBI NO: 7438393 NR Description: small GTP binding protein, rac-type - turnip
  misc_feature (1)..(198): Homolog of NCBI NO: 34421680 NR Description: RAC-like G-protein Rac1 [Gossypium hirsutum]
  misc_feature (1)..(198): Homolog of NCBI NO: 4097583 NR Description: NTGP3 [Nicotiana tabacum]
  misc_feature (1)..(198): Homolog of NCBI NO: 38524283 NR Description: putative RACD protein [Hordeum vulgare subsp.
  misc_feature (1)..(198): Homolog of NCBI NO: 6822324 NR Description: small GTP binding protein RACDP [Oryza sativa japonica] >gi|13487163|gb|AAK27450.1|AF329814_1 small GTP binding
  misc_feature (1)..(198): Homolog of NCBI NO: 4097565 NR Description: ATGP3 [Arabidopsis thaliana]
  misc_feature (1)..(198): Homolog of NCBI NO: 2117168 NR Description: RAC1 [Lotus japonicus]
MSASRFIKCVTVGDGAVGKTCLLISYTSNTFPTDYVPTVFDNFSANVIVDGNTINLGLWDTAGQEDYNRLRPLSYRGADVFLLAFSLVSKASYENVSKKWVPELRHYAPGVPIILVGTKLDLRHDKQFFAEHPGAVPISTAQGEELKKLIGAPAYIECSAKTQQNVKAVFDAAIKVVLQPPKNKKKKKRKSQKGCSIL

SEQ ID NO: 76566 - DNA, 1920 bp, Arabidopsis thaliana
  misc_feature (1)..(1920): Ceres Seq. ID no. 7108417
  misc_feature: MA Experiment ID: 20000184 Result: Down-regulated in Transcription
  misc_feature: MA Experiment 20000184 PARAMETER Experiment Name: At_Shoots__P Parameter: Age (day) Value: 7
  misc_feature: MA Experiment 20000184 PARAMETER Experiment Name: At_Shoots__P Parameter: Tissue Value: Shoots vs. Whole Plant
  misc_feature: MA Experiment ID: 20000437 Result: Up-regulated in Transcription
  misc_feature: MA Experiment 20000437 PARAMETER Experiment Name: At_Drought_P Parameter: Age (day) Value: 8
  misc_feature: MA Experiment 20000437 PARAMETER Experiment Name: At_Drought_P Parameter: Organism Value: A. thaliana
  misc_feature: MA Experiment 20000437 PARAMETER Experiment Name: At_Drought_P Parameter: Plant Line Value: WS
  misc_feature: MA Experiment 20000437 PARAMETER Experiment Name: At_Drought_P Parameter: Timepoint (hr) Value: 24
  misc_feature: MA Experiment 20000437 PARAMETER Experiment Name: At_Drought_P Parameter: Tissue Value: Whole Plant
  misc_feature: MA Experiment 20000437 PARAMETER Experiment Name: At_Drought_P Parameter: Treatment Value: Drought vs. No Drought
  misc_feature: MA Experiment ID: 20001248 Result: Up-regulated in Transcription
  misc_feature: MA Experiment 20001248 PARAMETER Experiment Name: At_Far-red-induction_P Parameter: Age (day) Value: 7
  misc_feature: MA Experiment 20001248 PARAMETER Experiment Name: At_Far-red-induction_P Parameter: Light Value: Far-red vs. White
  misc_feature: MA Experiment 20001248 PARAMETER Experiment Name: At_Far-red-induction_P Parameter: Organism Value: A. thaliana
  misc_feature: MA Experiment 20001248 PARAMETER Experiment Name: At_Far-red-induction_P Parameter: Plant Line Value: Columbia
  misc_feature: MA Experiment 20001248 PARAMETER Experiment Name: At_Far-red-induction_P Parameter: Timepoint (hr) Value: 4
  misc_feature: MA Experiment 20001248 PARAMETER Experiment Name: At_Far-red-induction_P Parameter: Tissue Value: Whole Plant
  misc_feature: MA Experiment ID: 20001451 Result: Up-regulated in Transcription
  misc_feature: MA Experiment 20001451 PARAMETER Experiment Name: At_Far-red-induction_P Parameter: Age (day) Value: 7
  misc_feature: MA Experiment 20001451 PARAMETER Experiment Name: At_Far-red-induction_P Parameter: Light Value: Far-red vs. White
  misc_feature: MA Experiment 20001451 PARAMETER Experiment Name: At_Far-red-induction_P Parameter: Organism Value: A. thaliana
  misc_feature: MA Experiment 20001451 PARAMETER Experiment Name: At_Far-red-induction_P Parameter: Plant Line Value: Columbia
  misc_feature: MA Experiment 20001451 PARAMETER Experiment Name: At_Far-red-induction_P Parameter: Timepoint (hr) Value: 24
  misc_feature: MA Experiment 20001451 PARAMETER Experiment Name: At_Far-red-induction_P Parameter: Tissue Value: Whole Plant
  misc_feature: MA Experiment ID: 20001558 Result: Down-regulated in Transcription
  misc_feature: MA Experiment 20001558 PARAMETER Experiment Name: At_Drought_Soil_Dry_P Parameter: Age (day) Value: 27
  misc_feature: MA Experiment 20001558 PARAMETER Experiment Name: At_Drought_Soil_Dry_P Parameter: Organism Value: A. thaliana
  misc_feature: MA Experiment 20001558 PARAMETER Experiment Name: At_Drought_Soil_Dry_P Parameter: Plant Line Value: WS
  misc_feature: MA Experiment 20001558 PARAMETER Experiment Name: At_Drought_Soil_Dry_P Parameter: Post Timepoint (hr) Value: 6
  misc_feature: MA Experiment 20001558 PARAMETER Experiment Name: At_Drought_Soil_Dry_P Parameter: Post-Treatment Value: Re-Water vs. No Drought
  misc_feature: MA Experiment 20001558 PARAMETER Experiment Name: At_Drought_Soil_Dry_P Parameter: Timepoint (day) Value: 13
  misc_feature: MA Experiment 20001558 PARAMETER Experiment Name: At_Drought_Soil_Dry_P Parameter: Treatment Value: Drought vs. No Drought
  misc_feature: MA Experiment ID: 20001560 Result: Down-regulated in Transcription
  misc_feature: MA Experiment 20001560 PARAMETER Experiment Name: At_Drought_Soil_Dry_P Parameter: Age (day) Value: 28
  misc_feature: MA Experiment 20001560 PARAMETER Experiment Name: At_Drought_Soil_Dry_P Parameter: Organism Value: A. thaliana
  misc_feature: MA Experiment 20001560 PARAMETER Experiment Name: At_Drought_Soil_Dry_P Parameter: Plant Line Value: WS
  misc_feature: MA Experiment 20001560 PARAMETER Experiment Name: At_Drought_Soil_Dry_P Parameter: Post Timepoint (hr) Value: None
  misc_feature: MA Experiment 20001560 PARAMETER Experiment Name: At_Drought_Soil_Dry_P Parameter: Post-Treatment Value: None
  misc_feature: MA Experiment 20001560 PARAMETER Experiment Name: At_Drought_Soil_Dry_P Parameter: Timepoint (day) Value: 14
  misc_feature: MA Experiment 20001560 PARAMETER Experiment Name: At_Drought_Soil_Dry_P Parameter: Treatment Value: Drought vs. No Drought
gaattcgcggccgcgaaaaatcgctgtccaaatctccggtcatttctccgaggatctcttctatcaatccaacggttttgttttcatcttctcagatctcacagaacaatagtcaaagactgatgcagaagaagcgttagtacaaggtttttgttggaaagcaattgaatctgaattcatctttcattttcacgctttgatccaatttgagttctctcttccactgaatccctcatacgtaaaacctagggtttctaaattagggttctcctgaggtctgtttatagtgcgtaaagccatgtttaagaagatcatgaaaggggcaaatcgaaaagcctctaaagctgaggcgaatgattcgtctatgtatgggtttgatccaccaggtaggtcaggtcctggatccaatatgattgtaaatcacgcatctcgtggttcgcttgttccttcttctccaaattcaatggcggcggccaccacacaaccgcctcctatgtattcagtcgagcctcttcccttgttcagagacgtctctgtctccgagcgtcaatccttgttcttgaggaaactccagatttgttgttttcaatttgattttacggatacgttgaagaatgcgagagagaaggagattaagaggcaaacgttattggagctagttgattttatacagtctggagcagggaagctcactgaagtttgtcaagaagaaatggtaaagatgatttcggttaatatattccggtgtcttcctccggcttcacacgagaatacaggtcaagagcctgctgatcttgaggaagaggagccttatttggaaccatcttggcctcatttacagctaatttatgagttgctgctgagatacattgttccttctgacacagatacaaaagttgcaaaacggtatattgatcattcttttgtgttgaggttgcttgaattgtttgaaactgaagatcctagagaaagggagtacttgaaaacgattcttcataggatttatggcaagtttatggttcacaggccctttattaggaaagcaatgaaccatattttctataggtttatttatgagacagagagacatagtgggattggggagcttttggagattctcggtagtattattaatgggtttgccttgccaatgaaggaggagcacaagctctttttgattagggcgttgataccgctgcataagccaaaaccaatcgctatgtatcaccaacaattgtcttactgcatcgttcagtttgtggagaaagattataagcttgcggatacggtgatcaggggcttgttaaagttttggcctgtgacaaattgtacaaaagaggttctctttcttggtgaacttgaagaggttcttgaggcaacacaaactgttgagttccaacgctgtatggtccctctgttccaacagattgctcgatgcctcagtagctctaattttcaggttgcagaacgagctctgttcttgtggaacaacgagcatgtggtgggtctaatagctcagaaccgaggagtgatccttcccatcatatttgcatccctggagaaaaacatagagtctcattggaaccaagcggtacacggtctaagtgcgaatataaagagaatgttcatggagatggaccctgagctctttgaagaatgtcagcaacagtacgaagaaaaacaagccaaatctaaacaagtggaagagcaacgccaaaataggtggaggagattagatgaagcagtggaggaacgagaaagagaagatcctatgatcacttcttagaaaaaaatatatcaaatcatcaaagtaataatattctctctcacttcttctcattttctctaatcgttgcaaattattatattttatttatttattttgaggtctggaaaaaaaaaagtcgcggccgcgaattc

SEQ ID NO: 76567 - protein, 495 aa, Arabidopsis thaliana; identical to SEQ ID NO: 48486
  peptide (1)..(495): Ceres Seq. ID no. 7108418
  misc_feature (71)..(484): Pfam Name: Protein phosphatase 2A regulatory B subunit (B56 Pfam Description: Protein phosphatase 2A regulatory B subunit
  misc_feature (1)..(495): Homolog of NCBI NO: 15242766 NR Description: putative protein; protein id: At5g03470.1, by cDNA: gi_2160689 [Arabidopsis thaliana]
  misc_feature (1)..(495): Homolog of NCBI NO: 15232782 NR Description: B' regulatory subunit of PP2A (AtB'beta); protein At3g09880.1, supported by cDNA: gi_18176454, supported by cDNA: supported by cDNA: gi_2160691 [Arabidopsis thaliana]
  misc_feature (13)..(495): Homolog of NCBI NO: 31712071 NR Description: putative protein phosphatase 2A regulatory
  misc_feature (1)..(482): Homolog of NCBI NO: 15233133 NR Description: protein phosphatase 2A regulatory subunit B-like protein id: At3g54930.1 [Arabidopsis thaliana]
  misc_feature (1)..(481): Homolog of NCBI NO: 7485149 NR Description: hypothetical protein - Arabidopsis thaliana phosphatase like protein [Arabidopsis thaliana]
  misc_feature (1)..(495): Homolog of NCBI NO: 38345343 NR Description: OSJNBa0081L15.16 [Oryza sativa (japonica
  misc_feature (32)..(486): Homolog of NCBI NO: 21530786 NR Description: putative protein phosphatase 2A B'teta subunit
  misc_feature (1)..(481): Homolog of NCBI NO: 18414444 NR Description: Expressed protein; protein id: At4g15415.1, by cDNA: gi_20147342, supported by cDNA: gi_2160693 [Arabidopsis >gi|2160694|gb|AAB58902.1| B' regulatory subunit of PP2A
  misc_feature (1)..(481): Homolog of NCBI NO: 20147343 NR Description: AT4g15410/dl3750w [Arabidopsis thaliana]
  misc_feature (1)..(481): Homolog of NCBI NO: 11994401 NR Description: protein phosphatase 2A B' regulatory subunit

SEQ ID NO: 76568 - protein, 490 aa, Arabidopsis thaliana; identical to SEQ ID NO: 48487
  peptide (1)..(490): Ceres Seq. ID no. 7108419
  misc_feature (66)..(479): Pfam Name: Protein phosphatase 2A regulatory B subunit (B56 Pfam Description: Protein phosphatase 2A regulatory B subunit
  misc_feature (1)..(490): Homolog of NCBI NO: 15242766 NR Description: putative protein; protein id: At5g03470.1, by cDNA: gi_2160689 [Arabidopsis thaliana]
  misc_feature (1)..(490): Homolog of NCBI NO: 15232782 NR Description: B' regulatory subunit of PP2A (AtB'beta); protein At3g09880.1, supported by cDNA: gi_18176454, supported by cDNA: supported by cDNA: gi_2160691 [Arabidopsis thaliana]
  misc_feature (8)..(490): Homolog of NCBI NO: 31712071 NR Description: putative protein phosphatase 2A regulatory
  misc_feature (1)..(477): Homolog of NCBI NO: 15233133 NR Description: protein phosphatase 2A regulatory subunit B-like protein id: At3g54930.1 [Arabidopsis thaliana]
  misc_feature (1)..(476): Homolog of NCBI NO: 7485149 NR Description: hypothetical protein - Arabidopsis thaliana phosphatase like protein [Arabidopsis thaliana]
  misc_feature (1)..(490): Homolog of NCBI NO: 38345343 NR Description: OSJNBa0081L15.16 [Oryza sativa (japonica
  misc_feature (27)..(481): Homolog of NCBI NO: 21530786 NR Description: putative protein phosphatase 2A B'teta subunit
  misc_feature (1)..(476): Homolog of NCBI NO: 18414444 NR Description: Expressed protein; protein id: At4g15415.1, by cDNA: gi_20147342, supported by cDNA: gi_2160693 [Arabidopsis >gi|2160694|gb|AAB58902.1| B' regulatory subunit of PP2A
  misc_feature (1)..(476): Homolog of NCBI NO: 20147343 NR Description: AT4g15410/dl3750w [Arabidopsis thaliana]
  misc_feature (1)..(476): Homolog of NCBI NO: 11994401 NR Description: protein phosphatase 2A B' regulatory subunit

SEQ ID NO: 76569 - protein, 473 aa, Arabidopsis thaliana; identical to SEQ ID NO: 48488
  peptide (1)..(473): Ceres Seq. ID no. 7108420
  misc_feature (49)..(462): Pfam Name: Protein phosphatase 2A regulatory B subunit (B56 Pfam Description: Protein phosphatase 2A regulatory B subunit
  misc_feature (1)..(473): Homolog of NCBI NO: 15242766 NR Description: putative protein; protein id: At5g03470.1, by cDNA: gi_2160689 [Arabidopsis thaliana]
  misc_feature (1)..(473): Homolog of NCBI NO: 15232782 NR Description: B' regulatory subunit of PP2A (AtB'beta); protein At3g09880.1, supported by cDNA: gi_18176454, supported by cDNA: supported by cDNA: gi_2160691 [Arabidopsis thaliana]
  misc_feature (1)..(473): Homolog of NCBI NO: 31712071 NR Description: putative protein phosphatase 2A regulatory
  misc_feature (1)..(460): Homolog of NCBI NO: 15233133 NR Description: protein phosphatase 2A regulatory subunit B-like protein id: At3g54930.1 [Arabidopsis thaliana]
  misc_feature (1)..(459): Homolog of NCBI NO: 7485149 NR Description: hypothetical protein - Arabidopsis thaliana phosphatase like protein [Arabidopsis thaliana]
  misc_feature (1)..(473): Homolog of NCBI NO: 38345343 NR Description: OSJNBa0081L15.16 [Oryza sativa (japonica
  misc_feature (10)..(464): Homolog of NCBI NO: 21530786 NR Description: putative protein phosphatase 2A B'teta subunit
  misc_feature (1)..(459): Homolog of NCBI NO: 18414444 NR Description: Expressed protein; protein id: At4g15415.1, by cDNA: gi_20147342, supported by cDNA: gi_2160693 [Arabidopsis >gi|2160694|gb|AAB58902.1| B' regulatory subunit of PP2A
  misc_feature (1)..(459): Homolog of NCBI NO: 20147343 NR Description: AT4g15410/dl3750w [Arabidopsis thaliana]
  misc_feature (1)..(459): Homolog of NCBI NO: 11994401 NR Description: protein phosphatase 2A B' regulatory subunit

SEQ ID NO: 76570 - DNA, 805 bp, Arabidopsis thaliana
  misc_feature (1)..(805): Ceres Seq. ID no. 7108449
  misc_feature: MA Experiment ID: 108434 Result: Up-regulated in Transcription
  misc_feature: MA Experiment 108434 PARAMETER Experiment Name: At_Root_Tips_cDNA_P Parameter: Tissue Value: Root Tips
  misc_feature: MA Experiment ID: 108462 Result: Down-regulated in Transcription
  misc_feature: MA Experiment 108462 PARAMETER Experiment Name: At_Germinating_Seeds_cDNA_P Parameter: Age (day) Value: 2 vs. 0
  misc_feature: MA Experiment 108462 PARAMETER Experiment Name: At_Germinating_Seeds_cDNA_P Parameter: Tissue Value: Germinating Seeds
  misc_feature: MA Experiment ID: 108463 Result: Down-regulated in Transcription
  misc_feature: MA Experiment 108463 PARAMETER Experiment Name: At_Germinating_Seeds_cDNA_P Parameter: Age (day) Value: 3 vs. 0
  misc_feature: MA Experiment 108463 PARAMETER Experiment Name: At_Germinating_Seeds_cDNA_P Parameter: Tissue Value: Germinating Seeds
  misc_feature: MA Experiment ID: 108464 Result: Down-regulated in Transcription
  misc_feature: MA Experiment 108464 PARAMETER Experiment Name: At_Germinating_Seeds_cDNA_P Parameter: Age (day) Value: 4 vs. 0
  misc_feature: MA Experiment 108464 PARAMETER Experiment Name: At_Germinating_Seeds_cDNA_P Parameter: Tissue Value: Germinating Seeds
  misc_feature: MA Experiment ID: 108569 Result: Down-regulated in Transcription
  misc_feature: MA Experiment 108569 PARAMETER Experiment Name: At_0.001%_MeJA__cDNA_P Parameter: Timepoint (hr) Value: 6
  misc_feature: MA Experiment 108569 PARAMETER Experiment Name: At_0.001%_MeJA__cDNA_P Parameter: Tissue Value: Aerial
  misc_feature: MA Experiment 108569 PARAMETER Experiment Name: At_0.001%_MeJA__cDNA_P Parameter: Treatment Value: 0.001% MeJA vs. No Treatment
  misc_feature: MA Experiment ID: 108595 Result: Down-regulated in Transcription
  misc_feature: MA Experiment 108595 PARAMETER Experiment Name: At_Ler-pi_Ovule_cDNA_P Parameter: Plant Line Value: null
  misc_feature: MA Experiment ID: 20000227 Result: Up-regulated in Transcription
  misc_feature: MA Experiment 20000227 PARAMETER Experiment Name: At_Root-Tips-vs-Tops_P Parameter: Tissue Value: Root Tips vs. Root Tops
  misc_feature: MA Experiment ID: 20000496 Result: Up-regulated in Transcription
  misc_feature: MA Experiment 20000496 PARAMETER Experiment Name: At_Guard_Cells_P Parameter: Harvest Date Value: 7/19/2002
  misc_feature: MA Experiment 20000496 PARAMETER Experiment Name: At_Guard_Cells_P Parameter: Organism Value: Canola
  misc_feature: MA Experiment 20000496 PARAMETER Experiment Name: At_Guard_Cells_P Parameter: Tissue Value: Guard Cells vs. Leaves
  misc_feature: MA Experiment ID: 20001557 Result: Up-regulated in Transcription
  misc_feature: MA Experiment 20001557 PARAMETER Experiment Name: At_Drought_Soil_Dry_P Parameter: Age (day) Value: 27
  misc_feature: MA Experiment 20001557 PARAMETER Experiment Name: At_Drought_Soil_Dry_P Parameter: Organism Value: A. thaliana
  misc_feature: MA Experiment 20001557 PARAMETER Experiment Name: At_Drought_Soil_Dry_P Parameter: Plant Line Value: WS
  misc_feature: MA Experiment 20001557 PARAMETER Experiment Name: At_Drought_Soil_Dry_P Parameter: Post Timepoint (hr) Value: 3
  misc_feature: MA Experiment 20001557 PARAMETER Experiment Name: At_Drought_Soil_Dry_P Parameter: Post-Treatment Value: Re-Water vs. No Drought
  misc_feature: MA Experiment 20001557 PARAMETER Experiment Name: At_Drought_Soil_Dry_P Parameter: Timepoint (day) Value: 13
  misc_feature: MA Experiment 20001557 PARAMETER Experiment Name: At_Drought_Soil_Dry_P Parameter: Treatment Value: Drought vs. No Drought
  misc_feature: MA Experiment ID: 20001558 Result: Up-regulated in Transcription
  misc_feature: MA Experiment 20001558 PARAMETER Experiment Name: At_Drought_Soil_Dry_P Parameter: Age (day) Value: 27
  misc_feature: MA Experiment 20001558 PARAMETER Experiment Name: At_Drought_Soil_Dry_P Parameter: Organism Value: A. thaliana
  misc_feature: MA Experiment 20001558 PARAMETER Experiment Name: At_Drought_Soil_Dry_P Parameter: Plant Line Value: WS
  misc_feature: MA Experiment 20001558 PARAMETER Experiment Name: At_Drought_Soil_Dry_P Parameter: Post Timepoint (hr) Value: 6
  misc_feature: MA Experiment 20001558 PARAMETER Experiment Name: At_Drought_Soil_Dry_P Parameter: Post-Treatment Value: Re-Water vs. No Drought
  misc_feature: MA Experiment 20001558 PARAMETER Experiment Name: At_Drought_Soil_Dry_P Parameter: Timepoint (day) Value: 13
  misc_feature: MA Experiment 20001558 PARAMETER Experiment Name: At_Drought_Soil_Dry_P Parameter: Treatment Value: Drought vs. No Drought
  misc_feature: MA Experiment ID: 20001560 Result: Up-regulated in Transcription
  misc_feature: MA Experiment 20001560 PARAMETER Experiment Name: At_Drought_Soil_Dry_P Parameter: Age (day) Value: 28
  misc_feature: MA Experiment 20001560 PARAMETER Experiment Name: At_Drought_Soil_Dry_P Parameter: Organism Value: A. thaliana
  misc_feature: MA Experiment 20001560 PARAMETER Experiment Name: At_Drought_Soil_Dry_P Parameter: Plant Line Value: WS
  misc_feature: MA Experiment 20001560 PARAMETER Experiment Name: At_Drought_Soil_Dry_P Parameter: Post Timepoint (hr) Value: None
  misc_feature: MA Experiment 20001560 PARAMETER Experiment Name: At_Drought_Soil_Dry_P Parameter: Post-Treatment Value: None
  misc_feature: MA Experiment 20001560 PARAMETER Experiment Name: At_Drought_Soil_Dry_P Parameter: Timepoint (day) Value: 14
  misc_feature: MA Experiment 20001560 PARAMETER Experiment Name: At_Drought_Soil_Dry_P Parameter: Treatment Value: Drought vs. No Drought
gaattcggcacgagaccaaaagccgtctcagaagaaaacacaactgcgaagaatatggcgaccgatgatgtgaacgagcctctcccggcggcggcggaattaccggcgacagaggcggagaaacaaccacacaagctcgaaagaaagtggagtttctggttcgataaccaatcaaagaaaggcgccgcctggggagcttctcttcgtaaagcctatactttcgacaccgtcgaagatttttggggattgcacgagactatatttcagactagcaaattgacagcgaatgctgaaattcacttgttcaaagctggtgttgagccaaagtgggaagatccagagtgtgctaatggaggaaagtggacttgggttgttactgctaataggaaggaagctttagacaaaggctggcttgaaactttgatggctttgattggagagcaatttgatgaagcagatgagatttgtggtgtggttgctagtgtccgtccacagtcgaagcaagacaagctctccttgtggactaggacgaagtctaatgaagctgttctgatgggtattgggaagaagtggaaggagatacttgatgtcaccgacaagataactttcaataaccatgatgattcgagaagaagccgattcactgtttgaagaaacgagtgtgaaaccagaggaagatgcaatatggctttttttttgtgatactgtttggtcggtttactcaaatagctgagacatttagggacattcactttgaggtgtaaactctacaaagttttctgtttcattaaaatgattttttgtt

SEQ ID NO: 76571 - protein, 216 aa, Arabidopsis thaliana
  peptide (1)..(216): Ceres Seq. ID no. 7108450
  misc_feature (19)..(216): Pfam Name: Eukaryotic initiation factor 4E Pfam Description: Eukaryotic initiation factor 4E
  misc_feature (1)..(216): Homolog of NCBI NO: 2209274 NR Description: eukaryotic initiation factor (iso)-4F p28 subunit
  misc_feature (19)..(216): Homolog of NCBI NO: 15238558 NR Description: eIF4Eiso protein (emb|CAA71579.1); protein id: supported by cDNA: 23770., supported by cDNA: gi_15451099, by cDNA: gi_20148370 [Arabidopsis thaliana]
  misc_feature (30)..(210): Homolog of NCBI NO: 32698526 NR Description: eukaryotic translation initiation factor iso4E
  misc_feature (27)..(213): Homolog of NCBI NO: 37535224 NR Description: cap-binding protein p28 [Oryza sativa (japonica
  misc_feature (27)..(213): Homolog of NCBI NO: 1352442 NR Description: EUKARYOTIC TRANSLATION INITIATION FACTOR 4E
  misc_feature (6)..(213): Homolog of NCBI NO: 6016335 NR Description: EUKARYOTIC TRANSLATION INITIATION FACTOR 4E
  misc_feature (31)..(213): Homolog of NCBI NO: 170753 NR Description: initiation factor (iso)4F p28 subunit
  misc_feature (31)..(213): Homolog of NCBI NO: 547713 NR Description: EUKARYOTIC TRANSLATION INITIATION FACTOR 4E
  misc_feature (3)..(211): Homolog of NCBI NO: 6016334 NR Description: EUKARYOTIC TRANSLATION INITIATION FACTOR 4E
  misc_feature (1)..(211): Homolog of NCBI NO: 34905982 NR Description: eukaryotic translation initiation factor 4E
EFGTRPKAVSEENTTAKNMATDDVNEPLPAAAELPATEAEKQPHKLERKWSFWFDNQSKKGAAWGASLRKAYTFDTVEDFWGLHETIFQTSKLTANAEIHLFKAGVEPKWEDPECANGGKWTWVVTANRKEALDKGWLETLMALIGEQFDEADEICGVVASVRPQSKQDKLSLWTRTKSNEAVLMGIGKKWKEILDVTDKITFNNHDDSRRSRFTV

SEQ ID NO: 76572 - protein, 198 aa, Arabidopsis thaliana; identical to SEQ ID NO: 35560
  peptide (1)..(198): Ceres Seq. ID no. 7108451
  misc_feature (1)..(198): Pfam Name: Eukaryotic initiation factor 4E Pfam Description: Eukaryotic initiation factor 4E
  misc_feature (1)..(198): Homolog of NCBI NO: 2209274 NR Description: eukaryotic initiation factor (iso)-4F p28 subunit
  misc_feature (1)..(198): Homolog of NCBI NO: 15238558 NR Description: eIF4Eiso protein (emb|CAA71579.1); protein id: supported by cDNA: 23770., supported by cDNA: gi_15451099, by cDNA: gi_20148370 [Arabidopsis thaliana]
  misc_feature (12)..(192): Homolog of NCBI NO: 32698526 NR Description: eukaryotic translation initiation factor iso4E
  misc_feature (9)..(195): Homolog of NCBI NO: 37535224 NR Description: cap-binding protein p28 [Oryza sativa (japonica
  misc_feature (9)..(195): Homolog of NCBI NO: 1352442 NR Description: EUKARYOTIC TRANSLATION INITIATION FACTOR 4E
  misc_feature (1)..(195): Homolog of NCBI NO: 6016335 NR Description: EUKARYOTIC TRANSLATION INITIATION FACTOR 4E
  misc_feature (13)..(195): Homolog of NCBI NO: 170753 NR Description: initiation factor (iso)4F p28 subunit
  misc_feature (13)..(195): Homolog of NCBI NO: 547713 NR Description: EUKARYOTIC TRANSLATION INITIATION FACTOR 4E
  misc_feature (1)..(193): Homolog of NCBI NO: 6016334 NR Description: EUKARYOTIC TRANSLATION INITIATION FACTOR 4E
  misc_feature (1)..(193): Homolog of NCBI NO: 34905982 NR Description: eukaryotic translation initiation factor 4E

SEQ ID NO: 76573 - DNA, 1337 bp, Arabidopsis thaliana
  misc_feature (1)..(1337): Ceres Seq. ID no. 7108467
  misc_feature: MA Experiment ID: 108463 Result: Up-regulated in Transcription
  misc_feature: MA Experiment 108463 PARAMETER Experiment Name: At_Germinating_Seeds_cDNA_P Parameter: Age (day) Value: 3 vs. 0
  misc_feature: MA Experiment 108463 PARAMETER Experiment Name: At_Germinating_Seeds_cDNA_P Parameter: Tissue Value: Germinating Seeds
  misc_feature: MA Experiment ID: 108473 Result: Up-regulated in Transcription
  misc_feature: MA Experiment 108473 PARAMETER Experiment Name: At_Drought_Flowers_cDNA_P Parameter: Timepoint (hr) Value: 7 d
  misc_feature: MA Experiment 108473 PARAMETER Experiment Name: At_Drought_Flowers_cDNA_P Parameter: Tissue Value: Flower
  misc_feature: MA Experiment 108473 PARAMETER Experiment Name: At_Drought_Flowers_cDNA_P Parameter: Treatment Value: Drought vs. No Drought
  misc_feature: MA Experiment ID: 108489 Result: Up-regulated in Transcription
  misc_feature: MA Experiment ID: 20000030 Result: Up-regulated in Transcription
  misc_feature: MA Experiment 20000030 PARAMETER Experiment Name: At_CS6630_Roots_cDNA_P Parameter: Plant Line Value: CS6630 vs. WS
  misc_feature: MA Experiment 20000030 PARAMETER Experiment Name: At_CS6630_Roots_cDNA_P Parameter: Tissue Value: Roots
  misc_feature: MA Experiment ID: 20000069 Result: Up-regulated in Transcription
  misc_feature: MA Experiment 20000069 PARAMETER Experiment Name: At_100uM_ABA_Mutants_cDNA_P Parameter: Plant Line Value: CS23
  misc_feature: MA Experiment 20000069 PARAMETER Experiment Name: At_100uM_ABA_Mutants_cDNA_P Parameter: Timepoint (hr) Value: 6
  misc_feature: MA Experiment 20000069 PARAMETER Experiment Name: At_100uM_ABA_Mutants_cDNA_P Parameter: Tissue Value: Aerial
  misc_feature: MA Experiment 20000069 PARAMETER Experiment Name: At_100uM_ABA_Mutants_cDNA_P Parameter: Treatment Value: 100uM ABA vs. No Treatment
  misc_feature: MA Experiment ID: 20000070 Result: Up-regulated in Transcription
  misc_feature: MA Experiment 20000070 PARAMETER Experiment Name: At_100uM_ABA_Mutants_cDNA_P Parameter: Plant Line Value: CS24
  misc_feature: MA Experiment 20000070 PARAMETER Experiment Name: At_100uM_ABA_Mutants_cDNA_P Parameter: Timepoint (hr) Value: 6
  misc_feature: MA Experiment 20000070 PARAMETER Experiment Name: At_100uM_ABA_Mutants_cDNA_P Parameter: Tissue Value: Aerial
  misc_feature: MA Experiment 20000070 PARAMETER Experiment Name: At_100uM_ABA_Mutants_cDNA_P Parameter: Treatment Value: 100uM ABA vs. No Treatment
  misc_feature: MA Experiment ID: 20000071 Result: Up-regulated in Transcription
  misc_feature: MA Experiment 20000071 PARAMETER Experiment Name: At_100uM_ABA_Mutants_cDNA_P Parameter: Plant Line Value: CS8104
  misc_feature: MA Experiment 20000071 PARAMETER Experiment Name: At_100uM_ABA_Mutants_cDNA_P Parameter: Timepoint (hr) Value: 6
  misc_feature: MA Experiment 20000071 PARAMETER Experiment Name: At_100uM_ABA_Mutants_cDNA_P Parameter: Tissue Value: Aerial
  misc_feature: MA Experiment 20000071 PARAMETER Experiment Name: At_100uM_ABA_Mutants_cDNA_P Parameter: Treatment Value: 100uM ABA vs. No Treatment
  misc_feature: MA Experiment ID: 20000072 Result: Up-regulated in Transcription
  misc_feature: MA Experiment 20000072 PARAMETER Experiment Name: At_100uM_ABA_Mutants_cDNA_P Parameter: Plant Line Value: CS8105
  misc_feature: MA Experiment 20000072 PARAMETER Experiment Name: At_100uM_ABA_Mutants_cDNA_P Parameter: Timepoint (hr) Value: 6
  misc_feature: MA Experiment 20000072 PARAMETER Experiment Name: At_100uM_ABA_Mutants_cDNA_P Parameter: Tissue Value: Aerial
  misc_feature: MA Experiment 20000072 PARAMETER Experiment Name: At_100uM_ABA_Mutants_cDNA_P Parameter: Treatment Value: 100uM ABA vs. No Treatment
  misc_feature: MA Experiment ID: 20000087 Result: Up-regulated in Transcription
  misc_feature: MA Experiment 20000087 PARAMETER Experiment Name: At_100uM_ABA_Mutants_cDNA_P Parameter: Plant Line Value: WS
  misc_feature: MA Experiment 20000087 PARAMETER Experiment Name: At_100uM_ABA_Mutants_cDNA_P Parameter: Timepoint (hr) Value: 6
  misc_feature: MA Experiment 20000087 PARAMETER Experiment Name: At_100uM_ABA_Mutants_cDNA_P Parameter: Tissue Value: Aerial
  misc_feature: MA Experiment 20000087 PARAMETER Experiment Name: At_100uM_ABA_Mutants_cDNA_P Parameter: Treatment Value: 100uM ABA vs. No Treatment
  misc_feature: MA Experiment ID: 20000088 Result: Up-regulated in Transcription
  misc_feature: MA Experiment 20000088 PARAMETER Experiment Name: At_100uM_ABA_Mutants_cDNA_P Parameter: Plant Line Value: Landsberg
  misc_feature: MA Experiment 20000088 PARAMETER Experiment Name: At_100uM_ABA_Mutants_cDNA_P Parameter: Timepoint (hr) Value: 6
  misc_feature: MA Experiment 20000088 PARAMETER Experiment Name: At_100uM_ABA_Mutants_cDNA_P Parameter: Tissue Value: Aerial
  misc_feature: MA Experiment 20000088 PARAMETER Experiment Name: At_100uM_ABA_Mutants_cDNA_P Parameter: Treatment Value: 100uM ABA vs. No Treatment
  misc_feature: MA Experiment ID: 20000089 Result: Up-regulated in Transcription
  misc_feature: MA Experiment ID: 20000111 Result: Up-regulated in Transcription
  misc_feature: MA Experiment 20000111 PARAMETER Experiment Name: At_42deg_Heat_cDNA_P Parameter: Temperature (deg C) Value: 42 vs. 22
  misc_feature: MA Experiment 20000111 PARAMETER Experiment Name: At_42deg_Heat_cDNA_P Parameter: Timepoint (hr) Value: 6
  misc_feature: MA Experiment 20000111 PARAMETER Experiment Name: At_42deg_Heat_cDNA_P Parameter: Tissue Value: Aerial
  misc_feature: MA Experiment ID: 20000117 Result: Up-regulated in Transcription
  misc_feature: MA Experiment 20000117 PARAMETER Experiment Name: At_100uM_ABA_Mutants_cDNA_P Parameter: Plant Line Value: Columbia
  misc_feature: MA Experiment 20000117 PARAMETER Experiment Name: At_100uM_ABA_Mutants_cDNA_P Parameter: Timepoint (hr) Value: 6
  misc_feature: MA Experiment 20000117 PARAMETER Experiment Name: At_100uM_ABA_Mutants_cDNA_P Parameter: Tissue Value: Aerial
  misc_feature: MA Experiment 20000117 PARAMETER Experiment Name: At_100uM_ABA_Mutants_cDNA_P Parameter: Treatment Value: 100uM ABA vs. No Treatment
  misc_feature: MA Experiment ID: 20000269 Result: Down-regulated in Transcription
  misc_feature: MA Experiment 20000269 PARAMETER Experiment Name: At_1mM_KNO3_L-vs-H_Roots_P Parameter: Age (day) Value: 7,10,12
  misc_feature: MA Experiment 20000269 PARAMETER Experiment Name: At_1mM_KNO3_L-vs-H_Roots_P Parameter: Organism Value: A. thaliana
  misc_feature: MA Experiment 20000269 PARAMETER Experiment Name: At_1mM_KNO3_L-vs-H_Roots_P Parameter: Plant Line Value: WS
  misc_feature: MA Experiment 20000269 PARAMETER Experiment Name: At_1mM_KNO3_L-vs-H_Roots_P Parameter: Timepoint (day) Value: 7,10,12
  misc_feature: MA Experiment 20000269 PARAMETER Experiment Name: At_1mM_KNO3_L-vs-H_Roots_P Parameter: Tissue Value: Roots
  misc_feature: MA Experiment 20000269 PARAMETER Experiment Name: At_1mM_KNO3_L-vs-H_Roots_P Parameter: Treatment Value: 1mM KNO3 vs. 50mM KNO3
  misc_feature: MA Experiment ID: 20000437 Result: Up-regulated in Transcription
  misc_feature: MA Experiment 20000437 PARAMETER Experiment Name: At_Drought_P Parameter: Age (day) Value: 8
  misc_feature: MA Experiment 20000437 PARAMETER Experiment Name: At_Drought_P Parameter: Organism Value: A. thaliana
  misc_feature: MA Experiment 20000437 PARAMETER Experiment Name: At_Drought_P Parameter: Plant Line Value: WS
  misc_feature: MA Experiment 20000437 PARAMETER Experiment Name: At_Drought_P Parameter: Timepoint (hr) Value: 24
  misc_feature: MA Experiment 20000437 PARAMETER Experiment Name: At_Drought_P Parameter: Tissue Value: Whole Plant
  misc_feature: MA Experiment 20000437 PARAMETER Experiment Name: At_Drought_P Parameter: Treatment Value: Drought vs. No Drought
  misc_feature: MA Experiment ID: 20001451 Result: Up-regulated in Transcription
  misc_feature: MA Experiment 20001451 PARAMETER Experiment Name: At_Far-red-induction_P Parameter: Age (day) Value: 7
  misc_feature: MA Experiment 20001451 PARAMETER Experiment Name: At_Far-red-induction_P Parameter: Light Value: Far-red vs. White
  misc_feature: MA Experiment 20001451 PARAMETER Experiment Name: At_Far-red-induction_P Parameter: Organism Value: A. thaliana
  misc_feature: MA Experiment 20001451 PARAMETER Experiment Name: At_Far-red-induction_P Parameter: Plant Line Value: Columbia
  misc_feature: MA Experiment 20001451 PARAMETER Experiment Name: At_Far-red-induction_P Parameter: Timepoint (hr) Value: 24
  misc_feature: MA Experiment 20001451 PARAMETER Experiment Name: At_Far-red-induction_P Parameter: Tissue Value: Whole Plant
  misc_feature: MA Experiment ID: 20001458 Result: Up-regulated in Transcription
  misc_feature: MA Experiment 20001458 PARAMETER Experiment Name: At_50mM_NH4NO3_L-to-H_P Parameter: Age (day) Value: Undefined
  misc_feature: MA Experiment 20001458 PARAMETER Experiment Name: At_50mM_NH4NO3_L-to-H_P Parameter: Organism Value: Undefined
  misc_feature: MA Experiment 20001458 PARAMETER Experiment Name: At_50mM_NH4NO3_L-to-H_P Parameter: Plant Line Value: Undefined
  misc_feature: MA Experiment 20001458 PARAMETER Experiment Name: At_50mM_NH4NO3_L-to-H_P Parameter: Timepoint (hr) Value: 2
  misc_feature: MA Experiment 20001458 PARAMETER Experiment Name: At_50mM_NH4NO3_L-to-H_P Parameter: Tissue Value: Siliques
  misc_feature: MA Experiment 20001458 PARAMETER Experiment Name: At_50mM_NH4NO3_L-to-H_P Parameter: Treatment Value: 50mM NH4NO3 vs. 100mM Manitol
  misc_feature: MA Experiment ID: 20001910 Result: Up-regulated in Transcription
  misc_feature: MA Experiment 20001910 PARAMETER Experiment Name: At_Drought_Reproduction_P Parameter: Age (day) Value: 37
  misc_feature: MA Experiment 20001910 PARAMETER Experiment Name: At_Drought_Reproduction_P Parameter: Organism Value: A. thaliana
  misc_feature: MA Experiment 20001910 PARAMETER Experiment Name: At_Drought_Reproduction_P Parameter: Plant Line Value: WS
  misc_feature: MA Experiment 20001910 PARAMETER Experiment Name: At_Drought_Reproduction_P Parameter: Timepoint (day) Value: 7
  misc_feature: MA Experiment 20001910 PARAMETER Experiment Name: At_Drought_Reproduction_P Parameter: Tissue Value: Flowers
  misc_feature: MA Experiment 20001910 PARAMETER Experiment Name: At_Drought_Reproduction_P Parameter: Treatment Value: Drought vs. No Drought
gtcgacccacgcgtccgaaacagaaaccgatcaaaggatgggtcttaatctgaatttgtctatctactctttaccaaaacccttatctcaatttctcgatgaagtgtcgaggatcaaagacaatcattccaaactgtctgaaatcgatggttatgtcggaaaattagaggaagaaaggaacaaaatcgatgtttttaaacgagaactccctttatgcatgctcttattgaacgaagcgattggggcgttgaaggatgaggctagaaaagggttatcactgatggcatctaatgggaaattcgatgatgttgaaagggcaaaaccggaaactgataagaagagctggatgagctctgcccagttatggatctcgaaccctaattcccaattccgatcgacaaatgaagaagaagaagatcggtgtgtgagtcagaacccatttcagacatgtaattaccctaatcaaggaggggtatttatgccgatttaaccgtcccccacctcctccaccaccagctcctctgtctctcatgactccaacatcagagatgatgatggattatagcagaattgagcagagtcatcatcatcatcaattcaataaaccttcttcacagagtcatcacattcagaagaaagagcagagaaggagatggtcacaggaacttcaccgtaaatttgttgatgctcttcataggcttggagggccacaagttgctacaccaaagcagattagagatttgatgaaagttgatggtttaaccaatgatgaagtcaagagccatttacaaaaatatagaatgcatatccgtaagcatccgctgcatccgacaaagactttgtcatcgtcggatcagccaggtgtgttagagagagaatcgcagagcttaataagtttgtcgaggtcggattcgccacaaatcccacttgttgcaagagggttgttcagtagtaatgttggtcatagctcagaggaagatgaggaggaggaggatgaagaggaggagaagtctgatggacgtagtagctgtagaaatgatgaaacaaagaagaagagacaagtgttggatcttgagctttgaaagtctgcatagtgaatgatataatctttaccaacttatgttatatatgctcaaaactttgagtttgttcgggagtttttgtagatgtaaacatgagagttgaaataaggaagaggattttgagcaaaaagtagggtttgtttttgcaagaggaaatagatagagaagagtggttcgaaatcctctgtgttttttttttttttttttttacttcataagtaagataaactcatatatcaaagattttgtttttat

SEQ ID NO: 76574 - protein, 183 aa, Arabidopsis thaliana
  peptide (1)..(183): Ceres Seq. ID no. 7108468
  misc_feature (39)..(90): Pfam Name: Myb-like DNA-binding domain Pfam Description: Myb-like DNA-binding domain
  misc_feature (1)..(183): Homolog of NCBI NO: 18419989 NR Description: putative cytoskeletal protein; protein id:
  misc_feature (1)..(183): Homolog of NCBI NO: 30690890 NR Description: cytoskeletal protein -related [Arabidopsis
  misc_feature (1)..(170): Homolog of NCBI NO: 14532434 NR Description: AT4g37180/C7A10_180 [Arabidopsis thaliana]
  misc_feature (1)..(183): Homolog of NCBI NO: 1732509 NR Description: putative cytoskeletal protein [Arabidopsis
  misc_feature (1)..(183): Homolog of NCBI NO: 25407794 NR Description: probable cytoskeletal protein [imported] - thaliana >gi|4006862|emb|CAB16780.1| putative cytoskeletal [Arabidopsis thaliana] >gi|7270667|emb|CAB80384.1| putative
  misc_feature (28)..(163): Homolog of NCBI NO: 31415946 NR Description: putative Myb-like DNA-binding protein [Oryza
  misc_feature (25)..(163): Homolog of NCBI NO: 33146555 NR Description: putative cytoskeletal protein-like protein [Oryza
  misc_feature (25)..(163): Homolog of NCBI NO: 34915398 NR Description: contains ESTs
  misc_feature (35)..(170): Homolog of NCBI NO: 21553699 NR Description: unknown [Arabidopsis thaliana]
  misc_feature (1)..(100): Homolog of NCBI NO: 18395724 NR Description: expressed protein; protein id: At1g25550.1, by cDNA: 1959., supported by cDNA: gi_11908085, supported by gi_12642893, supported by cDNA: gi_13926311 [Arabidopsis
MTPTSEMMMDYSRIEQSHHHHQFNKPSSQSHHIQKKEQRRRWSQELHRKFVDALHRLGGPQVATPKQIRDLMKVDGLTNDEVKSHLQKYRMHIRKHPLHPTKTLSSSDQPGVLERESQSLISLSRSDSPQIPLVARGLFSSNVGHSSEEDEEEEDEEEEKSDGRSSCRNDETKKKRQVLDLEL

SEQ ID NO: 76575 - protein, 177 aa, Arabidopsis thaliana
  peptide (1)..(177): Ceres Seq. ID no. 7108469
  misc_feature (33)..(84): Pfam Name: Myb-like DNA-binding domain Pfam Description: Myb-like DNA-binding domain
  misc_feature (1)..(177): Homolog of NCBI NO: 18419989 NR Description: putative cytoskeletal protein; protein id:
  misc_feature (1)..(177): Homolog of NCBI NO: 30690890 NR Description: cytoskeletal protein -related [Arabidopsis
  misc_feature (1)..(164): Homolog of NCBI NO: 14532434 NR Description: AT4g37180/C7A10_180 [Arabidopsis thaliana]
  misc_feature (1)..(177): Homolog of NCBI NO: 1732509 NR Description: putative cytoskeletal protein [Arabidopsis
  misc_feature (1)..(177): Homolog of NCBI NO: 25407794 NR Description: probable cytoskeletal protein [imported] - thaliana >gi|4006862|emb|CAB16780.1| putative cytoskeletal [Arabidopsis thaliana] >gi|7270667|emb|CAB80384.1| putative
  misc_feature (22)..(157): Homolog of NCBI NO: 31415946 NR Description: putative Myb-like DNA-binding protein [Oryza
  misc_feature (19)..(157): Homolog of NCBI NO: 33146555 NR Description: putative cytoskeletal protein-like protein [Oryza
  misc_feature (19)..(157): Homolog of NCBI NO: 34915398 NR Description: contains ESTs
  misc_feature (29)..(164): Homolog of NCBI NO: 21553699 NR Description: unknown [Arabidopsis thaliana]
  misc_feature (1)..(94): Homolog of NCBI NO: 18395724 NR Description: expressed protein; protein id: At1g25550.1, by cDNA: 1959., supported by cDNA: gi_11908085, supported by gi_12642893, supported by cDNA: gi_13926311 [Arabidopsis
MMMDYSRIEQSHHHHQFNKPSSQSHHIQKKEQRRRWSQELHRKFVDALHRLGGPQVATPKQIRDLMKVDGLTNDEVKSHLQKYRMHIRKHPLHPTKTLSSSDQPGVLERESQSLISLSRSDSPQIPLVARGLFSSNVGHSSEEDEEEEDEEEEKSDGRSSCRNDETKKKRQVLDLEL

SEQ ID NO: 76576 - protein, 176 aa, Arabidopsis thaliana
  peptide (1)..(176): Ceres Seq. ID no. 7108470
  misc_feature (32)..(83): Pfam Name: Myb-like DNA-binding domain Pfam Description: Myb-like DNA-binding domain
  misc_feature (1)..(176): Homolog of NCBI NO: 18419989 NR Description: putative cytoskeletal protein; protein id:
  misc_feature (1)..(176): Homolog of NCBI NO: 30690890 NR Description: cytoskeletal protein -related [Arabidopsis
  misc_feature (1)..(163): Homolog of NCBI NO: 14532434 NR Description: AT4g37180/C7A10_180 [Arabidopsis thaliana]
  misc_feature (1)..(176): Homolog of NCBI NO: 1732509 NR Description: putative cytoskeletal protein [Arabidopsis
  misc_feature (1)..(176): Homolog of NCBI NO: 25407794 NR Description: probable cytoskeletal protein [imported] - thaliana >gi|4006862|emb|CAB16780.1| putative cytoskeletal [Arabidopsis thaliana] >gi|7270667|emb|CAB80384.1| putative
  misc_feature (21)..(156): Homolog of NCBI NO: 31415946 NR Description: putative Myb-like DNA-binding protein [Oryza
  misc_feature (18)..(156): Homolog of NCBI NO: 33146555 NR Description: putative cytoskeletal protein-like protein [Oryza
  misc_feature (18)..(156): Homolog of NCBI NO: 34915398 NR Description: contains ESTs
  misc_feature (28)..(163): Homolog of NCBI NO: 21553699 NR Description: unknown [Arabidopsis thaliana]
  misc_feature (1)..(93): Homolog of NCBI NO: 18395724 NR Description: expressed protein; protein id: At1g25550.1, by cDNA: 1959., supported by cDNA: gi_11908085, supported by gi_12642893, supported by cDNA: gi_13926311 [Arabidopsis
MMDYSRIEQSHHHHQFNKPSSQSHHIQKKEQRRRWSQELHRKFVDALHRLGGPQVATPKQIRDLMKVDGLTNDEVKSHLQKYRMHIRKHPLHPTKTLSSSDQPGVLERESQSLISLSRSDSPQIPLVARGLFSSNVGHSSEEDEEEEDEEEEKSDGRSSCRNDETKKKRQVLDLEL

SEQ ID NO: 76577 - DNA, 1694 bp, Arabidopsis thaliana
  misc_feature (1)..(1694): Ceres Seq. ID no. 7108475
  misc_feature: MA Experiment ID: 108434 Result: Up-regulated in Transcription
  misc_feature: MA Experiment 108434 PARAMETER Experiment Name: At_Root_Tips_cDNA_P Parameter: Tissue Value: Root Tips
  misc_feature: MA Experiment ID: 108461 Result: Down-regulated in Transcription
  misc_feature: MA Experiment 108461 PARAMETER Experiment Name: At_Germinating_Seeds_cDNA_P Parameter: Age (day) Value: 1 vs. 0
  misc_feature: MA Experiment 108461 PARAMETER Experiment Name: At_Germinating_Seeds_cDNA_P Parameter: Tissue Value: Germinating Seeds
  misc_feature: MA Experiment ID: 108462 Result: Down-regulated in Transcription
  misc_feature: MA Experiment 108462 PARAMETER Experiment Name: At_Germinating_Seeds_cDNA_P Parameter: Age (day) Value: 2 vs. 0
  misc_feature: MA Experiment 108462 PARAMETER Experiment Name: At_Germinating_Seeds_cDNA_P Parameter: Tissue Value: Germinating Seeds
  misc_feature: MA Experiment ID: 108463 Result: Down-regulated in Transcription
  misc_feature: MA Experiment 108463 PARAMETER Experiment Name: At_Germinating_Seeds_cDNA_P Parameter: Age (day) Value: 3 vs. 0
  misc_feature: MA Experiment 108463 PARAMETER Experiment Name: At_Germinating_Seeds_cDNA_P Parameter: Tissue Value: Germinating Seeds
  misc_feature: MA Experiment ID: 108464 Result: Down-regulated in Transcription
  misc_feature: MA Experiment 108464 PARAMETER Experiment Name: At_Germinating_Seeds_cDNA_P Parameter: Age (day) Value: 4 vs. 0
  misc_feature: MA Experiment 108464 PARAMETER Experiment Name: At_Germinating_Seeds_cDNA_P Parameter: Tissue Value: Germinating Seeds
  misc_feature: MA Experiment ID: 108573 Result: Up-regulated in Transcription
  misc_feature: MA Experiment 108573 PARAMETER Experiment Name: At_Drought_cDNA_P Parameter: Timepoint (hr) Value: 6
  misc_feature: MA Experiment 108573 PARAMETER Experiment Name: At_Drought_cDNA_P Parameter: Tissue Value: Aerial
  misc_feature: MA Experiment 108573 PARAMETER Experiment Name: At_Drought_cDNA_P Parameter: Treatment Value: Drought vs. No Drought
  misc_feature: MA Experiment ID: 108576 Result: Down-regulated in Transcription
  misc_feature: MA Experiment 108576 PARAMETER Experiment Name: At_42deg_Heat_cDNA_P Parameter: Temperature (deg C) Value: 42 vs. 22
  misc_feature: MA Experiment 108576 PARAMETER Experiment Name: At_42deg_Heat_cDNA_P Parameter: Timepoint (hr) Value: 1
  misc_feature: MA Experiment 108576 PARAMETER Experiment Name: At_42deg_Heat_cDNA_P Parameter: Tissue Value: Aerial
  misc_feature: MA Experiment ID: 108577 Result: Down-regulated in Transcription
  misc_feature: MA Experiment 108577 PARAMETER Experiment Name: At_42deg_Heat_cDNA_P Parameter: Temperature (deg C) Value: 42 vs. 22
  misc_feature: MA Experiment 108577 PARAMETER Experiment Name: At_42deg_Heat_cDNA_P Parameter: Timepoint (hr) Value: 6
  misc_feature: MA Experiment 108577 PARAMETER Experiment Name: At_42deg_Heat_cDNA_P Parameter: Tissue Value: Aerial
  misc_feature: MA Experiment ID: 108585 Result: Up-regulated in Transcription
  misc_feature: MA Experiment 108585 PARAMETER Experiment Name: At_5mM_NaNP_cDNA_P Parameter: Timepoint (hr) Value: 6
  misc_feature: MA Experiment 108585 PARAMETER Experiment Name: At_5mM_NaNP_cDNA_P Parameter: Tissue Value: Aerial
  misc_feature: MA Experiment 108585 PARAMETER Experiment Name: At_5mM_NaNP_cDNA_P Parameter: Treatment Value: null
gaattcctcgagctacgtcagggatttcgttcaatcttctctttatcgctccaccagatccaagttcgcgagatttcaagctctctaacaaagttcttcacttttactctcaaagctttcatctttcattcaactacttaagctccaagtatggcaggatccgcaccggaaggaacacaatttgatacgcgtcagtttgaccagaggctgaatgaagttctcgatggacaggatgagttcttcacctcatatgatgaggtccatgagagctttgatgccatgggtttgcaagagaatcttcttaggggtatctatgcttacggtttcgaaaagccttctgctattcagcaaagaggaattgtacctttttgcaagggtcttgatgtgatccagcaggcacagtctggtactggaaaaaccgccactttctgctctggtgtcttgcagcagcttgactatgcccttctccagtgccaggctctcgttttggctcccaccagagagcttgctcagcagattgagaaggtcatgcgtgcccttggtgactaccaaggtgtcaaggttcatgcctgtgttggtggaaccagtgtccgtgaggatcagcgcattctccaggctggtgttcatgttgtcgttggaactcccggtcgtgtttttgacatgcttagaagacaatctctccgccctgactgcatcaagatgtttgtccttgatgaagctgatgaaatgctctcccgtggtttcaaggatcagatctatgacatattccagcttctcccaccaaagattcaggttggagtgttctctgcgacaatgcctccggaagctttggagatcacaagaaaattcatgagcaaaccagtgagaatcttggtgaaacgtgatgagctcacacttgaaggtatcaagcaattctacgtgaacgtggagaaagaagactggaagcttgagactctctgcgatctctacgagactctagccatcactcagagtgtcatctttgtcaacactcgtcgcaaggtcgactggctcacagacaaaatgagaagccgtgaccacacagtctcagcaactcatggagacatggaccaaaacaccagagacatcatcatgagagagttcaggtctggctcgtctcgtgttctaatcacaaccgatctcttggctcgtggtatcgatgtgcagcaagtctctctagtcataaactttgacctcccaactcagccagagaattaccttcaccgtatcggaagaagtggaaggttcgggagaaagggtgtcgcgattaactttgtgactcttgatgatcagagaatgctgtttgatattcagaaattctacaatgtggttgttgaggagcttccctcaaacgtggctgatttgctgtgaagaagaagaagaagaagaagaagaaaggttgcttgtttcgcaaatttcttatttgatttttgacccgtctctctctctctgaatcatcgatacatctttttcattctctagtatccttcatcaactctatcgaacatatatatgtctcttctgaccatatttcttttttatcaaatgcaatatttatttctaaaaaaaaaaaaaaaaaaaaaaaaaaaaaaaaaaaaaaaaaaaaaaaaaaaaaaaaaaaaaaaaaaaaaaaaaaaaaaagctagctcagggccctgacgtagctcgaggaattc

SEQ ID NO: 76578 - protein, 412 aa, Arabidopsis thaliana; identical to SEQ ID NO: 26827
  peptide (1)..(412): Ceres Seq. ID no. 7108476
  misc_feature (52)..(255): Pfam Name: DEAD/DEAH box helicase Pfam Description: DEAD/DEAH box helicase
  misc_feature (1)..(412): Homolog of NCBI NO: 15221761 NR Description: eukaryotic translation initiation factor 4A-2 protein id: At1g54270.1, supported by cDNA: 3997., supported by
  misc_feature (1)..(412): Homolog of NCBI NO: 18400210 NR Description: eukaryotic translation initiation factor 4A-1 protein id: At3g13920.1, supported by cDNA: 29310., supported by gi_15293046, supported by cDNA: gi_15450485, supported by cDNA:
  misc_feature (1)..(412): Homolog of NCBI NO: 19698881 NR Description: eukaryotic translation initiation factor
  misc_feature (1)..(412): Homolog of NCBI NO: 21555870 NR Description: Eukaryotic initiation factor 4A, putative
  misc_feature (1)..(412): Homolog of NCBI NO: 1170506 NR Description: Eukaryotic initiation factor 4A-2 (eIF-4A-2)
  misc_feature (1)..(412): Homolog of NCBI NO: 2119938 NR Description: translation initiation factor eIF-4A.14 - common
  misc_feature (1)..(412): Homolog of NCBI NO: 2500520 NR Description: Eukaryotic initiation factor 4A-14 (eIF-4A-14)
  misc_feature (1)..(412): Homolog of NCBI NO: 2500518 NR Description: Eukaryotic initiation factor 4A-11 (eIF-4A-11)
  misc_feature (1)..(412): Homolog of NCBI NO: 1170511 NR Description: Eukaryotic initiation factor 4A-10 (eIF-4A-10)
  misc_feature (1)..(412): Homolog of NCBI NO: 2119933 NR Description: translation initiation factor eIF-4A.11 - common

SEQ ID NO: 76579 - protein, 369 aa, Arabidopsis thaliana; identical to SEQ ID NO: 26828
  peptide (1)..(369): Ceres Seq. ID no. 7108477
  misc_feature (9)..(212): Pfam Name: DEAD/DEAH box helicase Pfam Description: DEAD/DEAH box helicase
  misc_feature (1)..(369): Homolog of NCBI NO: 15221761 NR Description: eukaryotic translation initiation factor 4A-2 protein id: At1g54270.1, supported by cDNA: 3997., supported by
  misc_feature (1)..(369): Homolog of NCBI NO: 18400210 NR Description: eukaryotic translation initiation factor 4A-1 protein id: At3g13920.1, supported by cDNA: 29310., supported by gi_15293046, supported by cDNA: gi_15450485, supported by cDNA:
  misc_feature (1)..(369): Homolog of NCBI NO: 19698881 NR Description: eukaryotic translation initiation factor
  misc_feature (1)..(369): Homolog of NCBI NO: 21555870 NR Description: Eukaryotic initiation factor 4A, putative
  misc_feature (1)..(369): Homolog of NCBI NO: 1170506 NR Description: Eukaryotic initiation factor 4A-2 (eIF-4A-2)
  misc_feature (1)..(369): Homolog of NCBI NO: 2119938 NR Description: translation initiation factor eIF-4A.14 - common
  misc_feature (1)..(369): Homolog of NCBI NO: 2500520 NR Description: Eukaryotic initiation factor 4A-14 (eIF-4A-14)
  misc_feature (1)..(369): Homolog of NCBI NO: 2500518 NR Description: Eukaryotic initiation factor 4A-11 (eIF-4A-11)
  misc_feature (1)..(369): Homolog of NCBI NO: 1170511 NR Description: Eukaryotic initiation factor 4A-10 (eIF-4A-10)
  misc_feature (1)..(369): Homolog of NCBI NO: 2119933 NR Description: translation initiation factor eIF-4A.11 - common

SEQ ID NO: 76580 - protein, 286 aa, Arabidopsis thaliana; identical to SEQ ID NO: 26829
  peptide (1)..(286): Ceres Seq. ID no. 7108478
  misc_feature (1)..(129): Pfam Name: DEAD/DEAH box helicase Pfam Description: DEAD/DEAH box helicase
  misc_feature (1)..(286): Homolog of NCBI NO: 15221761 NR Description: eukaryotic translation initiation factor 4A-2 protein id: At1g54270.1, supported by cDNA: 3997., supported by
  misc_feature (1)..(286): Homolog of NCBI NO: 18400210 NR Description: eukaryotic translation initiation factor 4A-1 protein id: At3g13920.1, supported by cDNA: 29310., supported by gi_15293046, supported by cDNA: gi_15450485, supported by cDNA:
  misc_feature (1)..(286): Homolog of NCBI NO: 19698881 NR Description: eukaryotic translation initiation factor
  misc_feature (1)..(286): Homolog of NCBI NO: 21555870 NR Description: Eukaryotic initiation factor 4A, putative
  misc_feature (1)..(286): Homolog of NCBI NO: 1170506 NR Description: Eukaryotic initiation factor 4A-2 (eIF-4A-2)
  misc_feature (1)..(286): Homolog of NCBI NO: 2119938 NR Description: translation initiation factor eIF-4A.14 - common
  misc_feature (1)..(286): Homolog of NCBI NO: 2500520 NR Description: Eukaryotic initiation factor 4A-14 (eIF-4A-14)
  misc_feature (1)..(286): Homolog of NCBI NO: 2500518 NR Description: Eukaryotic initiation factor 4A-11 (eIF-4A-11)
  misc_feature (1)..(286): Homolog of NCBI NO: 1170511 NR Description: Eukaryotic initiation factor 4A-10 (eIF-4A-10)
  misc_feature (1)..(286): Homolog of NCBI NO: 2119933 NR Description: translation initiation factor eIF-4A.11 - common

SEQ ID NO: 76581 - DNA, 1284 bp, Arabidopsis thaliana
  misc_feature (1)..(1284): Ceres Seq. ID no. 7108494
  misc_feature: MA Experiment ID: 20000184 Result: Down-regulated in Transcription
  misc_feature: MA Experiment 20000184 PARAMETER Experiment Name: At_Shoots__P Parameter: Age (day) Value: 7
  misc_feature: MA Experiment 20000184 PARAMETER Experiment Name: At_Shoots__P Parameter: Tissue Value: Shoots vs. Whole Plant
  misc_feature: MA Experiment ID: 20001248 Result: Up-regulated in Transcription
  misc_feature: MA Experiment 20001248 PARAMETER Experiment Name: At_Far-red-induction_P Parameter: Age (day) Value: 7
  misc_feature: MA Experiment 20001248 PARAMETER Experiment Name: At_Far-red-induction_P Parameter: Light Value: Far-red vs. White
  misc_feature: MA Experiment 20001248 PARAMETER Experiment Name: At_Far-red-induction_P Parameter: Organism Value: A. thaliana
  misc_feature: MA Experiment 20001248 PARAMETER Experiment Name: At_Far-red-induction_P Parameter: Plant Line Value: Columbia
  misc_feature: MA Experiment 20001248 PARAMETER Experiment Name: At_Far-red-induction_P Parameter: Timepoint (hr) Value: 4
  misc_feature: MA Experiment 20001248 PARAMETER Experiment Name: At_Far-red-induction_P Parameter: Tissue Value: Whole Plant
  misc_feature: MA Experiment ID: 20001451 Result: Up-regulated in Transcription
  misc_feature: MA Experiment 20001451 PARAMETER Experiment Name: At_Far-red-induction_P Parameter: Age (day) Value: 7
  misc_feature: MA Experiment 20001451 PARAMETER Experiment Name: At_Far-red-induction_P Parameter: Light Value: Far-red vs. White
  misc_feature: MA Experiment 20001451 PARAMETER Experiment Name: At_Far-red-induction_P Parameter: Organism Value: A. thaliana
  misc_feature: MA Experiment 20001451 PARAMETER Experiment Name: At_Far-red-induction_P Parameter: Plant Line Value: Columbia
  misc_feature: MA Experiment 20001451 PARAMETER Experiment Name: At_Far-red-induction_P Parameter: Timepoint (hr) Value: 24
  misc_feature: MA Experiment 20001451 PARAMETER Experiment Name: At_Far-red-induction_P Parameter: Tissue Value: Whole Plant
ccacgcgtccggaagaagcaaaaccctagagctcaaggtaatcgccgtcgatttctcaatctctcaccggcgattacatgccgatgaaagttgtacaatagctgctgtaagagagagatttatcaggtatttttagaatcatgtatagagacagaggaacggtgaattcgagacctgaagttgtggatcgtaaacggatcaacgacgctcttgaacgtccttctccttcaacctctcgtcaagttaacggcaaaggcaaaggaaccgttacggcggcgacgacgacggcgaacttgattgggaagcagcagtcgaataacatcaaccatagagattctcgttctgcttctctctcgaagaacaatacggtttctgatgatgaatcagacacagatagtgaagaatcagatgtgagtggttctgatggagaggacacttcatggatatcttggttttgtaatctaagaggaaacgagttcttttgtgaagttgatgatgattacattcaagatgacttcaacttgtgtggactcagcagtctagttccctactacgagtacgctcttgatttgattttggatgttgaatcttctcaaggagagatgtttacagaggaacagaatgaattgatcgagtcagcagctgagatgttgtatggactgattcatgctcgttacatattgactagcaaaggattggcagcaatgttagacaaatacaaaaactatgactttggaagatgtccaagagtttattgctgtggccaaccttgtcttccggttggtcaatcagacttaccgcgatctagcactgtgaagatatattgcccgaaatgcgaagacatttattacccacgatcaaagtatcaaggcaacattgatggagcttactttgggacaacgtttccacatctgttcctgatgacttatgggcatctcaagccagcgaaggcaacacaaaactatgttcaaagagtgtttgggttcaaattacacaaaccgtgaaggaagtttgacgacaaaacccaaggatcaagatcatggcgttggaatggaactgagaaagaagagacgtgtgtgaacagaaaccggaaaataaaacgtcactgtaatcacacgaatggtgaagagagcattcatgtctctatttgtcttcaggtacatacacattagaagaagcaaaagcatggttagaaagaaaaaaaacacgaaaatcttttaatgagtttgttaaacttgaacatgtatttttctaccttctgtaaacttttttattttgtttctc

SEQ ID NO: 76582 - protein, 287 aa, Arabidopsis thaliana
  peptide (1)..(287): Ceres Seq. ID no. 7108495
  misc_feature (97)..(275): Pfam Name: Casein kinase II regulatory subunit Pfam Description: Casein kinase II regulatory subunit
  misc_feature (1)..(287): Homolog of NCBI NO: 15238013 NR Description: casein kinase II beta chain; protein id: supported by cDNA: gi_468263 [Arabidopsis thaliana]
  misc_feature (1)..(287): Homolog of NCBI NO: 15236597 NR Description: casein kinase II beta chain CKB2; protein id: supported by cDNA: 19505., supported by cDNA: gi_467974
  misc_feature (1)..(286): Homolog of NCBI NO: 21261784 NR Description: protein kinase Ck2 regulatory subunit 2
  misc_feature (1)..(287): Homolog of NCBI NO: 11527004 NR Description: protein kinase CK2 regulatory subunit CK2B3 [Zea
  misc_feature (2)..(286): Homolog of NCBI NO: 37536920 NR Description: putative casein kinase II beta subunit [Oryza
  misc_feature (15)..(287): Homolog of NCBI NO: 34901776 NR Description: OJ1058_B11.17 [Oryza sativa (japonica >gi|29243371|dbj|BAC66224.1| putative protein kinase CK2
  misc_feature (68)..(287): Homolog of NCBI NO: 29367573 NR Description: possible protein kinase CK2 regulatory subunit
  misc_feature (1)..(287): Homolog of NCBI NO: 11527000 NR Description: protein kinase CK2 regulatory subunit CK2B1 [Zea
  misc_feature (1)..(285): Homolog of NCBI NO: 15224934 NR Description: putative casein kinase II beta subunit; protein
  misc_feature (15)..(287): Homolog of NCBI NO: 11527002 NR Description: protein kinase CK2 regulatory subunit CK2B2 [Zea
MYRDRGTVNSRPEVVDRKRINDALERPSPSTSRQVNGKGKGTVTAATTTANLIGKQQSNNINHRDSRSASLSKNNTVSDDESDTDSEESDVSGSDGEDTSWISWFCNLRGNEFFCEVDDDYIQDDFNLCGLSSLVPYYEYALDLILDVESSQGEMFTEEQNELIESAAEMLYGLIHARYILTSKGLAAMLDKYKNYDFGRCPRVYCCGQPCLPVGQSDLPRSSTVKIYCPKCEDIYYPRSKYQGNIDGAYFGTTFPHLFLMTYGHLKPAKATQNYVQRVFGFKLHKP

SEQ ID NO: 76583 - DNA, 1413 bp, Arabidopsis thaliana
  misc_feature (1)..(1413): Ceres Seq. ID no. 7108504
  misc_feature: MA Experiment ID: 108434 Result: Up-regulated in Transcription
  misc_feature: MA Experiment 108434 PARAMETER Experiment Name: At_Root_Tips_cDNA_P Parameter: Tissue Value: Root Tips
  misc_feature: MA Experiment ID: 108463 Result: Down-regulated in Transcription
  misc_feature: MA Experiment 108463 PARAMETER Experiment Name: At_Germinating_Seeds_cDNA_P Parameter: Age (day) Value: 3 vs. 0
  misc_feature: MA Experiment 108463 PARAMETER Experiment Name: At_Germinating_Seeds_cDNA_P Parameter: Tissue Value: Germinating Seeds
  misc_feature: MA Experiment ID: 108572 Result: Down-regulated in Transcription
  misc_feature: MA Experiment 108572 PARAMETER Experiment Name: At_Drought_cDNA_P Parameter: Timepoint (hr) Value: 1
  misc_feature: MA Experiment 108572 PARAMETER Experiment Name: At_Drought_cDNA_P Parameter: Tissue Value: Aerial
  misc_feature: MA Experiment 108572 PARAMETER Experiment Name: At_Drought_cDNA_P Parameter: Treatment Value: Drought vs. No Drought
  misc_feature: MA Experiment ID: 108573 Result: Down-regulated in Transcription
  misc_feature: MA Experiment 108573 PARAMETER Experiment Name: At_Drought_cDNA_P Parameter: Timepoint (hr) Value: 6
  misc_feature: MA Experiment 108573 PARAMETER Experiment Name: At_Drought_cDNA_P Parameter: Tissue Value: Aerial
  misc_feature: MA Experiment 108573 PARAMETER Experiment Name: At_Drought_cDNA_P Parameter: Treatment Value: Drought vs. No Drought
  misc_feature: MA Experiment ID: 20000090 Result: Up-regulated in Transcription
  misc_feature: MA Experiment ID: 20000093 Result: Up-regulated in Transcription
  misc_feature: MA Experiment 20000093 PARAMETER Experiment Name: At_42deg_Heat_cDNA_P Parameter: Temperature (deg C) Value: 42 vs. 22
  misc_feature: MA Experiment 20000093 PARAMETER Experiment Name: At_42deg_Heat_cDNA_P Parameter: Timepoint (hr) Value: 0.5
  misc_feature: MA Experiment 20000093 PARAMETER Experiment Name: At_42deg_Heat_cDNA_P Parameter: Tissue Value: Aerial
  misc_feature: MA Experiment ID: 20000144 Result: Up-regulated in Transcription
  misc_feature: MA Experiment 20000144 PARAMETER Experiment Name: At_42deg_Heat_cDNA_P Parameter: Temperature (deg C) Value: 42 vs. 22
  misc_feature: MA Experiment 20000144 PARAMETER Experiment Name: At_42deg_Heat_cDNA_P Parameter: Timepoint (hr) Value: 1
  misc_feature: MA Experiment 20000144 PARAMETER Experiment Name: At_42deg_Heat_cDNA_P Parameter: Tissue Value: Aerial
  misc_feature: MA Experiment ID: 20000179 Result: Up-regulated in Transcription
  misc_feature: MA Experiment 20000179 PARAMETER Experiment Name: At_Germinating_Seeds_P Parameter: Age (hr) Value: 6 vs. 0
  misc_feature: MA Experiment 20000179 PARAMETER Experiment Name: At_Germinating_Seeds_P Parameter: Tissue Value: Germinating Seeds
  misc_feature: MA Experiment ID: 20000185 Result: Up-regulated in Transcription
  misc_feature: MA Experiment 20000185 PARAMETER Experiment Name: At_Roots__P Parameter: Age (day) Value: 7 vs. 21
  misc_feature: MA Experiment 20000185 PARAMETER Experiment Name: At_Roots__P Parameter: Organism Value: A. thaliana
  misc_feature: MA Experiment 20000185 PARAMETER Experiment Name: At_Roots__P Parameter: Tissue Value: Roots vs. Whole Plant
  misc_feature: MA Experiment ID: 20000224 Result: Up-regulated in Transcription
  misc_feature: MA Experiment ID: 20000227 Result: Up-regulated in Transcription
  misc_feature: MA Experiment 20000227 PARAMETER Experiment Name: At_Root-Tips-vs-Tops_P Parameter: Tissue Value: Root Tips vs. Root Tops
  misc_feature: MA Experiment ID: 20000234 Result: Up-regulated in Transcription
  misc_feature: MA Experiment 20000234 PARAMETER Experiment Name: At_Siliques_P Parameter: Age (day) Value: 21
  misc_feature: MA Experiment 20000234 PARAMETER Experiment Name: At_Siliques_P Parameter: Organism Value: A. thaliana
  misc_feature: MA Experiment 20000234 PARAMETER Experiment Name: At_Siliques_P Parameter: Plant Line Value: WS
  misc_feature: MA Experiment 20000234 PARAMETER Experiment Name: At_Siliques_P Parameter: Tissue Value: Less Than 5mm Siliques vs. Whole Plant
  misc_feature: MA Experiment ID: 20000235 Result: Up-regulated in Transcription
  misc_feature: MA Experiment 20000235 PARAMETER Experiment Name: At_Siliques_P Parameter: Age (day) Value: 21
  misc_feature: MA Experiment 20000235 PARAMETER Experiment Name: At_Siliques_P Parameter: Organism Value: A. thaliana
  misc_feature: MA Experiment 20000235 PARAMETER Experiment Name: At_Siliques_P Parameter: Plant Line Value: WS
  misc_feature: MA Experiment 20000235 PARAMETER Experiment Name: At_Siliques_P Parameter: Tissue Value: 5-10mm Siliques vs. Whole Plant
  misc_feature: MA Experiment ID: 20000264 Result: Up-regulated in Transcription
  misc_feature: MA Experiment 20000264 PARAMETER Experiment Name: At_Open_Flower_P Parameter: Age (day) Value: 21
  misc_feature: MA Experiment 20000264 PARAMETER Experiment Name: At_Open_Flower_P Parameter: Plant Line Value: WS
  misc_feature: MA Experiment 20000264 PARAMETER Experiment Name: At_Open_Flower_P Parameter: Tissue Value: Open Flower vs. Whole Plant
  misc_feature: MA Experiment ID: 20000265 Result: Up-regulated in Transcription
  misc_feature: MA Experiment 20000265 PARAMETER Experiment Name: At_Open_Flower_P Parameter: Age (day) Value: 21
  misc_feature: MA Experiment 20000265 PARAMETER Experiment Name: At_Open_Flower_P Parameter: Plant Line Value: WS
  misc_feature: MA Experiment 20000265 PARAMETER Experiment Name: At_Open_Flower_P Parameter: Tissue Value: Closed Flower vs. Whole Plant
  misc_feature: MA Experiment ID: 20000437 Result: Down-regulated in Transcription
  misc_feature: MA Experiment 20000437 PARAMETER Experiment Name: At_Drought_P Parameter: Age (day) Value: 8
  misc_feature: MA Experiment 20000437 PARAMETER Experiment Name: At_Drought_P Parameter: Organism Value: A. thaliana
  misc_feature: MA Experiment 20000437 PARAMETER Experiment Name: At_Drought_P Parameter: Plant Line Value: WS
  misc_feature: MA Experiment 20000437 PARAMETER Experiment Name: At_Drought_P Parameter: Timepoint (hr) Value: 24
  misc_feature: MA Experiment 20000437 PARAMETER Experiment Name: At_Drought_P Parameter: Tissue Value: Whole Plant
  misc_feature: MA Experiment 20000437 PARAMETER Experiment Name: At_Drought_P Parameter: Treatment Value: Drought vs. No Drought
  misc_feature: MA Experiment ID: 20001560 Result: Up-regulated in Transcription
  misc_feature: MA Experiment 20001560 PARAMETER Experiment Name: At_Drought_Soil_Dry_P Parameter: Age (day) Value: 28
  misc_feature: MA Experiment 20001560 PARAMETER Experiment Name: At_Drought_Soil_Dry_P Parameter: Organism Value: A. thaliana
  misc_feature: MA Experiment 20001560 PARAMETER Experiment Name: At_Drought_Soil_Dry_P Parameter: Plant Line Value: WS
  misc_feature: MA Experiment 20001560 PARAMETER Experiment Name: At_Drought_Soil_Dry_P Parameter: Post Timepoint (hr) Value: None
  misc_feature: MA Experiment 20001560 PARAMETER Experiment Name: At_Drought_Soil_Dry_P Parameter: Post-Treatment Value: None
  misc_feature: MA Experiment 20001560 PARAMETER Experiment Name: At_Drought_Soil_Dry_P Parameter: Timepoint (day) Value: 14
  misc_feature: MA Experiment 20001560 PARAMETER Experiment Name: At_Drought_Soil_Dry_P Parameter: Treatment Value: Drought vs. No Drought
  misc_feature: MA Experiment ID: 20001905 Result: Down-regulated in Transcription
  misc_feature: MA Experiment 20001905 PARAMETER Experiment Name: At_Drought_Reproduction_P Parameter: Age (day) Value: 40
  misc_feature: MA Experiment 20001905 PARAMETER Experiment Name: At_Drought_Reproduction_P Parameter: Organism Value: A. thaliana
  misc_feature: MA Experiment 20001905 PARAMETER Experiment Name: At_Drought_Reproduction_P Parameter: Plant Line Value: WS
  misc_feature: MA Experiment 20001905 PARAMETER Experiment Name: At_Drought_Reproduction_P Parameter: Timepoint (day) Value: 10
  misc_feature: MA Experiment 20001905 PARAMETER Experiment Name: At_Drought_Reproduction_P Parameter: Tissue Value: Rosettes
  misc_feature: MA Experiment 20001905 PARAMETER Experiment Name: At_Drought_Reproduction_P Parameter: Treatment Value: Drought vs. No Drought
  misc_feature: MA Experiment ID: 20001911 Result: Down-regulated in Transcription
  misc_feature: MA Experiment 20001911 PARAMETER Experiment Name: At_Drought_Reproduction_P Parameter: Age (day) Value: 40
  misc_feature: MA Experiment 20001911 PARAMETER Experiment Name: At_Drought_Reproduction_P Parameter: Organism Value: A. thaliana
  misc_feature: MA Experiment 20001911 PARAMETER Experiment Name: At_Drought_Reproduction_P Parameter: Plant Line Value: WS
  misc_feature: MA Experiment 20001911 PARAMETER Experiment Name: At_Drought_Reproduction_P Parameter: Timepoint (day) Value: 10
  misc_feature: MA Experiment 20001911 PARAMETER Experiment Name: At_Drought_Reproduction_P Parameter: Tissue Value: Flowers
  misc_feature: MA Experiment 20001911 PARAMETER Experiment Name: At_Drought_Reproduction_P Parameter: Treatment Value: Drought vs. No Drought
aattcggcacgagcctccgccgcagttattttcgaggagcgctttgatgatggctgggagaacagatgggttaaatctgagtggaagaaggatgataacactgctggggagtggaagcacactgcgggaaattggtctggtgacgctaacgataaaggtatccagaccagtgaagactacagattctacgccatttcagctgagttccctgaattcagtaacaaggacaagaccttagtcttccaattctcagtcaagcacgagcaaaagcttgactgcggtggtggctacatgaagctactaagtggtgatgttgaccaaaagaaatttggtggagacacaccatacagtatcatgtttggtcctgatatctgtggctacagcacaaagaaagtgcatgctatccttacctataatggagccaaccacctgatcaagaaagatgttccatgtgaaactgaccagctcacccatgtgtacacatttatcctccgcccagatgctacttacagcattctcatcgacaatgttgagaaacaaactggtagcctttactctgactgggatcttctcccacccaagaagatcaaggaccccagcgccaagaagcctgaggactgggacgaacaagaatacatttctgaccctgaagacaagaaaactgacggttacgatgatatccctaaggagatcccagacaccgactcaaagaagcctgaggactgggatgatgaagaagatggtgagtggactgccccaacaatccccaaccctgagtacatgggtgaatggaagcctaagcaaatcaagaaccccaactacaagggcaagtgggaggctccattgattgacaaccctgacttcaaggatgacccagagctctacgtcttccccaagctgaaatatgttggactcgaattgtggcaggtgaaatcaggatcattgttcgacaatgtcttgatctgcgatgacccagactatgccaagaagttggcagatgaaacatggggaaagctcaaggatgcggagaaagcagctttcgatgaggctgagaagaagaatgaggaagaggaatccaaggacgcacctgcggaatctgatgctgaagacgaaccagaggatgatgaaggaggagatgattccgattctgaatctaaggccgaggagaccaaatcagaagatagcgaggaaacctctgagaaagacgccaccgctcatgatgagctataggtgaaaggttgaagatttgaagaccaaagttttcagtctctttattgttttatcgttttcttttgaagtattttagcatctagtttgtcggagatagaaacaagttttagcaaaactaaaagggggatacaatgtctgtcagatgctcattttagactttaaaaaaccatgaagaagttttgc

SEQ ID NO: 76584 - protein, 409 aa, Arabidopsis thaliana
  peptide (1)..(409): Ceres Seq. ID no. 7108505
  misc_feature (9)..(321): Pfam Name: Calreticulin family Pfam Description: Calreticulin family
  misc_feature (1)..(409): Homolog of NCBI NO: 1009712 NR Description: calreticulin
  misc_feature (3)..(409): Homolog of NCBI NO: 12643243 NR Description: CALRETICULIN 2 PRECURSOR
  misc_feature (3)..(409): Homolog of NCBI NO: 21555174 NR Description: putative calcium-binding protein, calreticulin
  misc_feature (3)..(409): Homolog of NCBI NO: 15217459 NR Description: putative calcium-binding protein, calreticulin; id: At1g09210.1, supported by cDNA: 27210., supported by cDNA: supported by cDNA: gi_16974340 [Arabidopsis thaliana] thaliana]
  misc_feature (3)..(406): Homolog of NCBI NO: 25295763 NR Description: hypothetical protein [imported] - Arabidopsis >gi|3249100|gb|AAC24083.1| Match to calreticulin (AtCRTL) mRNA
  misc_feature (6)..(409): Homolog of NCBI NO: 15223517 NR Description: calreticulin (crt1); protein id: At1g56340.1, by cDNA: gi_17065103, supported by cDNA: gi_2052378 [Arabidopsis >gi|11131540|sp|O04151|CRT1_ARATH Calreticulin 1 Arabidopsis
  misc_feature (6)..(400): Homolog of NCBI NO: 24417462 NR Description: unknown [Arabidopsis thaliana]
  misc_feature (73)..(409): Homolog of NCBI NO: 7441500 NR Description: probable calreticulin - rape
  misc_feature (3)..(409): Homolog of NCBI NO: 11131745 NR Description: Calreticulin precursor >gi|7441496|pir||T10172
  misc_feature (3)..(394): Homolog of NCBI NO: 11131769 NR Description: Calreticulin precursor >gi|7441495|pir||T16968
NSARASAAVIFEERFDDGWENRWVKSEWKKDDNTAGEWKHTAGNWSGDANDKGIQTSEDYRFYAISAEFPEFSNKDKTLVFQFSVKHEQKLDCGGGYMKLLSGDVDQKKFGGDTPYSIMFGPDICGYSTKKVHAILTYNGANHLIKKDVPCETDQLTHVYTFILRPDATYSILIDNVEKQTGSLYSDWDLLPPKKIKDPSAKKPEDWDEQEYISDPEDKKTDGYDDIPKEIPDTDSKKPEDWDDEEDGEWTAPTIPNPEYMGEWKPKQIKNPNYKGKWEAPLIDNPDFKDDPELYVFPKLKYVGLELWQVKSGSLFDNVLICDDPDYAKKLADETWGKLKDAEKAAFDEAEKKNEEEESKDAPAESDAEDEPEDDEGGDDSDSESKAEETKSEDSEETSEKDATAHDEL

SEQ ID NO: 76585 - protein, 312 aa, Arabidopsis thaliana
  peptide (1)..(312): Ceres Seq. ID no. 7108506
  misc_feature (1)..(224): Pfam Name: Calreticulin family Pfam Description: Calreticulin family
  misc_feature (1)..(312): Homolog of NCBI NO: 1009712 NR Description: calreticulin
  misc_feature (1)..(312): Homolog of NCBI NO: 12643243 NR Description: CALRETICULIN 2 PRECURSOR
  misc_feature (1)..(312): Homolog of NCBI NO: 21555174 NR Description: putative calcium-binding protein, calreticulin
  misc_feature (1)..(312): Homolog of NCBI NO: 15217459 NR Description: putative calcium-binding protein, calreticulin; id: At1g09210.1, supported by cDNA: 27210., supported by cDNA: supported by cDNA: gi_16974340 [Arabidopsis thaliana] thaliana]
  misc_feature (1)..(309): Homolog of NCBI NO: 25295763 NR Description: hypothetical protein [imported] - Arabidopsis >gi|3249100|gb|AAC24083.1| Match to calreticulin (AtCRTL) mRNA
  misc_feature (1)..(312): Homolog of NCBI NO: 15223517 NR Description: calreticulin (crt1); protein id: At1g56340.1, by cDNA: gi_17065103, supported by cDNA: gi_2052378 [Arabidopsis >gi|11131540|sp|O04151|CRT1_ARATH Calreticulin 1 Arabidopsis
  misc_feature (1)..(303): Homolog of NCBI NO: 24417462 NR Description: unknown [Arabidopsis thaliana]
  misc_feature (1)..(312): Homolog of NCBI NO: 7441500 NR Description: probable calreticulin - rape
  misc_feature (1)..(312): Homolog of NCBI NO: 11131745 NR Description: Calreticulin precursor >gi|7441496|pir||T10172
  misc_feature (1)..(297): Homolog of NCBI NO: 11131769 NR Description: Calreticulin precursor >gi|7441495|pir||T16968
MKLLSGDVDQKKFGGDTPYSIMFGPDICGYSTKKVHAILTYNGANHLIKKDVPCETDQLTHVYTFILRPDATYSILIDNVEKQTGSLYSDWDLLPPKKIKDPSAKKPEDWDEQEYISDPEDKKTDGYDDIPKEIPDTDSKKPEDWDDEEDGEWTAPTIPNPEYMGEWKPKQIKNPNYKGKWEAPLIDNPDFKDDPELYVFPKLKYVGLELWQVKSGSLFDNVLICDDPDYAKKLADETWGKLKDAEKAAFDEAEKKNEEEESKDAPAESDAEDEPEDDEGGDDSDSESKAEETKSEDSEETSEKDATAHDEL

SEQ ID NO: 76586 - protein, 291 aa, Arabidopsis thaliana
  peptide (1)..(291): Ceres Seq. ID no. 7108507
  misc_feature (1)..(203): Pfam Name: Calreticulin family Pfam Description: Calreticulin family
  misc_feature (1)..(291): Homolog of NCBI NO: 1009712 NR Description: calreticulin
  misc_feature (1)..(291): Homolog of NCBI NO: 12643243 NR Description: CALRETICULIN 2 PRECURSOR
  misc_feature (1)..(291): Homolog of NCBI NO: 21555174 NR Description: putative calcium-binding protein, calreticulin
  misc_feature (1)..(291): Homolog of NCBI NO: 15217459 NR Description: putative calcium-binding protein, calreticulin; id: At1g09210.1, supported by cDNA: 27210., supported by cDNA: supported by cDNA: gi_16974340 [Arabidopsis thaliana] thaliana]
  misc_feature (1)..(288): Homolog of NCBI NO: 25295763 NR Description: hypothetical protein [imported] - Arabidopsis >gi|3249100|gb|AAC24083.1| Match to calreticulin (AtCRTL) mRNA
  misc_feature (1)..(291): Homolog of NCBI NO: 15223517 NR Description: calreticulin (crt1); protein id: At1g56340.1, by cDNA: gi_17065103, supported by cDNA: gi_2052378 [Arabidopsis >gi|11131540|sp|O04151|CRT1_ARATH Calreticulin 1 Arabidopsis
  misc_feature (1)..(282): Homolog of NCBI NO: 24417462 NR Description: unknown [Arabidopsis thaliana]
  misc_feature (1)..(291): Homolog of NCBI NO: 7441500 NR Description: probable calreticulin - rape
  misc_feature (1)..(291): Homolog of NCBI NO: 11131745 NR Description: Calreticulin precursor >gi|7441496|pir||T10172
  misc_feature (1)..(276): Homolog of NCBI NO: 11131769 NR Description: Calreticulin precursor >gi|7441495|pir||T16968
MFGPDICGYSTKKVHAILTYNGANHLIKKDVPCETDQLTHVYTFILRPDATYSILIDNVEKQTGSLYSDWDLLPPKKIKDPSAKKPEDWDEQEYISDPEDKKTDGYDDIPKEIPDTDSKKPEDWDDEEDGEWTAPTIPNPEYMGEWKPKQIKNPNYKGKWEAPLIDNPDFKDDPELYVFPKLKYVGLELWQVKSGSLFDNVLICDDPDYAKKLADETWGKLKDAEKAAFDEAEKKNEEEESKDAPAESDAEDEPEDDEGGDDSDSESKAEETKSEDSEETSEKDATAHDEL

SEQ ID NO: 76587 - DNA, 1404 bp, Arabidopsis thaliana
  misc_feature (1)..(1404): Ceres Seq. ID no. 7108512
  misc_feature: MA Experiment ID: 108577 Result: Up-regulated in Transcription
  misc_feature: MA Experiment 108577 PARAMETER Experiment Name: At_42deg_Heat_cDNA_P Parameter: Temperature (deg C) Value: 42 vs. 22
  misc_feature: MA Experiment 108577 PARAMETER Experiment Name: At_42deg_Heat_cDNA_P Parameter: Timepoint (hr) Value: 6
  misc_feature: MA Experiment 108577 PARAMETER Experiment Name: At_42deg_Heat_cDNA_P Parameter: Tissue Value: Aerial
  misc_feature: MA Experiment ID: 108595 Result: Down-regulated in Transcription
  misc_feature: MA Experiment 108595 PARAMETER Experiment Name: At_Ler-pi_Ovule_cDNA_P Parameter: Plant Line Value: null
  misc_feature: MA Experiment ID: 20000173 Result: Up-regulated in Transcription
  misc_feature: MA Experiment 20000173 PARAMETER Experiment Name: At_42deg_Heat_P Parameter: Age (day) Value: 14
  misc_feature: MA Experiment 20000173 PARAMETER Experiment Name: At_42deg_Heat_P Parameter: Organism Value: A. thaliana
  misc_feature: MA Experiment 20000173 PARAMETER Experiment Name: At_42deg_Heat_P Parameter: Plant Line Value: WS
  misc_feature: MA Experiment 20000173 PARAMETER Experiment Name: At_42deg_Heat_P Parameter: Temperature (deg C) Value: 42 vs. 22
  misc_feature: MA Experiment 20000173 PARAMETER Experiment Name: At_42deg_Heat_P Parameter: Timepoint (hr) Value: 6
  misc_feature: MA Experiment 20000173 PARAMETER Experiment Name: At_42deg_Heat_P Parameter: Tissue Value: Aerial
  misc_feature: MA Experiment ID: 20000437 Result: Down-regulated in Transcription
  misc_feature: MA Experiment 20000437 PARAMETER Experiment Name: At_Drought_P Parameter: Age (day) Value: 8
  misc_feature: MA Experiment 20000437 PARAMETER Experiment Name: At_Drought_P Parameter: Organism Value: A. thaliana
  misc_feature: MA Experiment 20000437 PARAMETER Experiment Name: At_Drought_P Parameter: Plant Line Value: WS
  misc_feature: MA Experiment 20000437 PARAMETER Experiment Name: At_Drought_P Parameter: Timepoint (hr) Value: 24
  misc_feature: MA Experiment 20000437 PARAMETER Experiment Name: At_Drought_P Parameter: Tissue Value: Whole Plant
  misc_feature: MA Experiment 20000437 PARAMETER Experiment Name: At_Drought_P Parameter: Treatment Value: Drought vs. No Drought
  misc_feature: MA Experiment ID: 20001557 Result: Down-regulated in Transcription
  misc_feature: MA Experiment 20001557 PARAMETER Experiment Name: At_Drought_Soil_Dry_P Parameter: Age (day) Value: 27
  misc_feature: MA Experiment 20001557 PARAMETER Experiment Name: At_Drought_Soil_Dry_P Parameter: Organism Value: A. thaliana
  misc_feature: MA Experiment 20001557 PARAMETER Experiment Name: At_Drought_Soil_Dry_P Parameter: Plant Line Value: WS
  misc_feature: MA Experiment 20001557 PARAMETER Experiment Name: At_Drought_Soil_Dry_P Parameter: Post Timepoint (hr) Value: 3
  misc_feature: MA Experiment 20001557 PARAMETER Experiment Name: At_Drought_Soil_Dry_P Parameter: Post-Treatment Value: Re-Water vs. No Drought
  misc_feature: MA Experiment 20001557 PARAMETER Experiment Name: At_Drought_Soil_Dry_P Parameter: Timepoint (day) Value: 13
  misc_feature: MA Experiment 20001557 PARAMETER Experiment Name: At_Drought_Soil_Dry_P Parameter: Treatment Value: Drought vs. No Drought
  misc_feature: MA Experiment ID: 20001905 Result: Down-regulated in Transcription
  misc_feature: MA Experiment 20001905 PARAMETER Experiment Name: At_Drought_Reproduction_P Parameter: Age (day) Value: 40
  misc_feature: MA Experiment 20001905 PARAMETER Experiment Name: At_Drought_Reproduction_P Parameter: Organism Value: A. thaliana
  misc_feature: MA Experiment 20001905 PARAMETER Experiment Name: At_Drought_Reproduction_P Parameter: Plant Line Value: WS
  misc_feature: MA Experiment 20001905 PARAMETER Experiment Name: At_Drought_Reproduction_P Parameter: Timepoint (day) Value: 10
  misc_feature: MA Experiment 20001905 PARAMETER Experiment Name: At_Drought_Reproduction_P Parameter: Tissue Value: Rosettes
  misc_feature: MA Experiment 20001905 PARAMETER Experiment Name: At_Drought_Reproduction_P Parameter: Treatment Value: Drought vs. No Drought
aattccgggcaggtcggaaagtgaaggaagatacactgaagcaaaagagcaagtcatggcggcgacatcttcctctgcttttctccttaatccgttgacttctcgccaccgtcctttcaaatactcgccagagctctcttctctctccttatcctctcgaaaggctgctgctttcgatgtttcctcagctgctttcacgctcaagagacagagccggagtgatgttgtgtgcaaggctgtatctatcaagccagaagctggtgttgaagggctcaatatcgccgataacgccgctcagcttattgggaaaactccgatggtgtacttgaacaatgtagtcaagggctgtgttgcaagtgttgctgctaagcttgagatcatggaaccatgttgcagtgtcaaggataggattgggtacagtatgattactgatgctgaagagaaaggacttataacacctggaaagagtgttcttgtggaatctacgagtgggaacacagggattggccttgcattcattgctgcttcaaaaggctataaacttatcttgacgatgcctgcgtccatgagtttggaaaggcgggttcttttgagggcatttggagctgagcttgtgttaactgaacctgcaaaaggtatgactggagcaattcagaaggctgaagaaatcttgaaaaaaactcccaattcctacatgctccaacagtttgacaaccctgccaatcccaagattcattatgagacgactaatcctgagatttgggaagatacaagaggcaaaatcgatatattggttgcggggattggaactggtggaactatcactggtgttggtcgattcattaaagaaagaaaacctgaattgaaggttattggtgtcgaacccacggaaagtgctatactttctggtggaaaaaccggacctcacaagattcaaggaattggagctggatttgtacccaagaatttggatctggctattgtagatgaatacatagcgatttccagtgaggaagctattgaaacctcgaagcaactagctctccaggaaggcttgttggttggtatatcttctggagctgctgctgctgctgcaatccaggttgcaaagagacctgaaaatgccgggaaactcatagccgttgtgttcccgagcttcggggaacgttacctctcgacccagcttttccagtcgattcgagaagagtgcgagcaaatgcagcccgagctttgattttcttctgtaatttcgtgaccaacaaggaacctcttctttgatttattgctgattgtttttcttctaatagacgtttctgcagaaatctctacgtctactgtgtatatttacaaattcgcaacgcaatttggtgtttgttattaataaaggcataagaggttttggtc

SEQ ID NO: 76588 - protein, 410 aa, Arabidopsis thaliana
  peptide (1)..(410): Ceres Seq. ID no. 7108513
  misc_feature (97)..(386): Pfam Name: Pyridoxal-phosphate dependent enzyme Pfam Description: Pyridoxal-phosphate dependent enzyme
  misc_feature (19)..(410): Homolog of NCBI NO: 572517 NR Description: cysteine synthase [Arabidopsis thaliana]
  misc_feature (19)..(410): Homolog of NCBI NO: 15224351 NR Description: cysteine synthase (cpACS1); protein id: supported by cDNA: 21866., supported by cDNA: gi_17529179, by cDNA: gi_20465692 [Arabidopsis thaliana]
  misc_feature (19)..(410): Homolog of NCBI NO: 1084347 NR Description: cysteine synthase (EC 4.2.99.8) isoform 7-4
  misc_feature (19)..(410): Homolog of NCBI NO: 12643295 NR Description: CYSTEINE SYNTHASE, MITOCHONDRIAL PRECURSOR
  misc_feature (19)..(410): Homolog of NCBI NO: 22331875 NR Description: cysteine synthase; protein id: At3g59760.1, by cDNA: gi_20466509 [Arabidopsis thaliana] cysteine synthase [Arabidopsis thaliana]
  misc_feature (19)..(409): Homolog of NCBI NO: 30695056 NR Description: cysteine synthase, mitochondrial (O-acetylserine
  misc_feature (19)..(410): Homolog of NCBI NO: 11269069 NR Description: cysteine synthase (EC 4.2.99.8) F24G16.30 - Arabidopsis thaliana >gi|7019670|emb|CAB75795.1| cysteine
  misc_feature (28)..(410): Homolog of NCBI NO: 25291707 NR Description: cysteine synthase (EC 4.2.99.8) precursor,
  misc_feature (19)..(410): Homolog of NCBI NO: 1488519 NR Description: cysteine synthase [Arabidopsis thaliana]
  misc_feature (25)..(410): Homolog of NCBI NO: 12081919 NR Description: plastidic cysteine synthase 1 [Solanum tuberosum]
IPGRSESEGRYTEAKEQVMAATSSSAFLLNPLTSRHRPFKYSPELSSLSLSSRKAAAFDVSSAAFTLKRQSRSDVVCKAVSIKPEAGVEGLNIADNAAQLIGKTPMVYLNNVVKGCVASVAAKLEIMEPCCSVKDRIGYSMITDAEEKGLITPGKSVLVESTSGNTGIGLAFIAASKGYKLILTMPASMSLERRVLLRAFGAELVLTEPAKGMTGAIQKAEEILKKTPNSYMLQQFDNPANPKIHYETTNPEIWEDTRGKIDILVAGIGTGGTITGVGRFIKERKPELKVIGVEPTESAILSGGKTGPHKIQGIGAGFVPKNLDLAIVDEYIAISSEEAIETSKQLALQEGLLVGISSGAAAAAAIQVAKRPENAGKLIAVVFPSFGERYLSTQLFQSIREECEQMQPEL

SEQ ID NO: 76589 - protein, 392 aa, Arabidopsis thaliana
  peptide (1)..(392): Ceres Seq. ID no. 7108514
  misc_feature (79)..(368): Pfam Name: Pyridoxal-phosphate dependent enzyme Pfam Description: Pyridoxal-phosphate dependent enzyme
  misc_feature (1)..(392): Homolog of NCBI NO: 572517 NR Description: cysteine synthase [Arabidopsis thaliana]
  misc_feature (1)..(392): Homolog of NCBI NO: 15224351 NR Description: cysteine synthase (cpACS1); protein id: supported by cDNA: 21866., supported by cDNA: gi_17529179, by cDNA: gi_20465692 [Arabidopsis thaliana]
  misc_feature (1)..(392): Homolog of NCBI NO: 1084347 NR Description: cysteine synthase (EC 4.2.99.8) isoform 7-4
  misc_feature (1)..(392): Homolog of NCBI NO: 12643295 NR Description: CYSTEINE SYNTHASE, MITOCHONDRIAL PRECURSOR
  misc_feature (1)..(392): Homolog of NCBI NO: 22331875 NR Description: cysteine synthase; protein id: At3g59760.1, by cDNA: gi_20466509 [Arabidopsis thaliana] cysteine synthase [Arabidopsis thaliana]
  misc_feature (1)..(391): Homolog of NCBI NO: 30695056 NR Description: cysteine synthase, mitochondrial (O-acetylserine
  misc_feature (1)..(392): Homolog of NCBI NO: 11269069 NR Description: cysteine synthase (EC 4.2.99.8) F24G16.30 - Arabidopsis thaliana >gi|7019670|emb|CAB75795.1| cysteine
  misc_feature (10)..(392): Homolog of NCBI NO: 25291707 NR Description: cysteine synthase (EC 4.2.99.8) precursor,
  misc_feature (1)..(392): Homolog of NCBI NO: 1488519 NR Description: cysteine synthase [Arabidopsis thaliana]
  misc_feature (7)..(392): Homolog of NCBI NO: 12081919 NR Description: plastidic cysteine synthase 1 [Solanum tuberosum]
MAATSSSAFLLNPLTSRHRPFKYSPELSSLSLSSRKAAAFDVSSAAFTLKRQSRSDVVCKAVSIKPEAGVEGLNIADNAAQLIGKTPMVYLNNVVKGCVASVAAKLEIMEPCCSVKDRIGYSMITDAEEKGLITPGKSVLVESTSGNTGIGLAFIAASKGYKLILTMPASMSLERRVLLRAFGAELVLTEPAKGMTGAIQKAEEILKKTPNSYMLQQFDNPANPKIHYETTNPEIWEDTRGKIDILVAGIGTGGTITGVGRFIKERKPELKVIGVEPTESAILSGGKTGPHKIQGIGAGFVPKNLDLAIVDEYIAISSEEAIETSKQLALQEGLLVGISSGAAAAAAIQVAKRPENAGKLIAVVFPSFGERYLSTQLFQSIREECEQMQPEL

SEQ ID NO: 76590 - protein, 305 aa, Arabidopsis thaliana
  peptide (1)..(305): Ceres Seq. ID no. 7108515
  misc_feature (1)..(281): Pfam Name: Pyridoxal-phosphate dependent enzyme Pfam Description: Pyridoxal-phosphate dependent enzyme
  misc_feature (1)..(305): Homolog of NCBI NO: 572517 NR Description: cysteine synthase [Arabidopsis thaliana]
  misc_feature (1)..(305): Homolog of NCBI NO: 15224351 NR Description: cysteine synthase (cpACS1); protein id: supported by cDNA: 21866., supported by cDNA: gi_17529179, by cDNA: gi_20465692 [Arabidopsis thaliana]
  misc_feature (1)..(305): Homolog of NCBI NO: 1084347 NR Description: cysteine synthase (EC 4.2.99.8) isoform 7-4
  misc_feature (1)..(305): Homolog of NCBI NO: 12643295 NR Description: CYSTEINE SYNTHASE, MITOCHONDRIAL PRECURSOR
  misc_feature (1)..(305): Homolog of NCBI NO: 22331875 NR Description: cysteine synthase; protein id: At3g59760.1, by cDNA: gi_20466509 [Arabidopsis thaliana] cysteine synthase [Arabidopsis thaliana]
  misc_feature (1)..(304): Homolog of NCBI NO: 30695056 NR Description: cysteine synthase, mitochondrial (O-acetylserine
  misc_feature (1)..(305): Homolog of NCBI NO: 11269069 NR Description: cysteine synthase (EC 4.2.99.8) F24G16.30 - Arabidopsis thaliana >gi|7019670|emb|CAB75795.1| cysteine
  misc_feature (1)..(305): Homolog of NCBI NO: 25291707 NR Description: cysteine synthase (EC 4.2.99.8) precursor,
  misc_feature (1)..(305): Homolog of NCBI NO: 1488519 NR Description: cysteine synthase [Arabidopsis thaliana]
  misc_feature (1)..(305): Homolog of NCBI NO: 12081919 NR Description: plastidic cysteine synthase 1 [Solanum tuberosum]
MVYLNNVVKGCVASVAAKLEIMEPCCSVKDRIGYSMITDAEEKGLITPGKSVLVESTSGNTGIGLAFIAASKGYKLILTMPASMSLERRVLLRAFGAELVLTEPAKGMTGAIQKAEEILKKTPNSYMLQQFDNPANPKIHYETTNPEIWEDTRGKIDILVAGIGTGGTITGVGRFIKERKPELKVIGVEPTESAILSGGKTGPHKIQGIGAGFVPKNLDLAIVDEYIAISSEEAIETSKQLALQEGLLVGISSGAAAAAAIQVAKRPENAGKLIAVVFPSFGERYLSTQLFQSIREECEQMQPEL

SEQ ID NO: 76591 - DNA, 893 bp, Arabidopsis thaliana
  misc_feature (1)..(893): Ceres Seq. ID no. 7108525
  misc_feature: MA Experiment ID: 20000182 Result: Up-regulated in Transcription
  misc_feature: MA Experiment 20000182 PARAMETER Experiment Name: At_2mM_SA_P Parameter: Age (day) Value: 14
  misc_feature: MA Experiment 20000182 PARAMETER Experiment Name: At_2mM_SA_P Parameter: Organism Value: A. thaliana
  misc_feature: MA Experiment 20000182 PARAMETER Experiment Name: At_2mM_SA_P Parameter: Plant Line Value: WS
  misc_feature: MA Experiment 20000182 PARAMETER Experiment Name: At_2mM_SA_P Parameter: Timepoint (hr) Value: 6
  misc_feature: MA Experiment 20000182 PARAMETER Experiment Name: At_2mM_SA_P Parameter: Tissue Value: Aerial
  misc_feature: MA Experiment 20000182 PARAMETER Experiment Name: At_2mM_SA_P Parameter: Treatment Value: 2mM SA vs. No Treatment
  misc_feature: MA Experiment ID: 20001911 Result: Up-regulated in Transcription
  misc_feature: MA Experiment 20001911 PARAMETER Experiment Name: At_Drought_Reproduction_P Parameter: Age (day) Value: 40
  misc_feature: MA Experiment 20001911 PARAMETER Experiment Name: At_Drought_Reproduction_P Parameter: Organism Value: A. thaliana
  misc_feature: MA Experiment 20001911 PARAMETER Experiment Name: At_Drought_Reproduction_P Parameter: Plant Line Value: WS
  misc_feature: MA Experiment 20001911 PARAMETER Experiment Name: At_Drought_Reproduction_P Parameter: Timepoint (day) Value: 10
  misc_feature: MA Experiment 20001911 PARAMETER Experiment Name: At_Drought_Reproduction_P Parameter: Tissue Value: Flowers
  misc_feature: MA Experiment 20001911 PARAMETER Experiment Name: At_Drought_Reproduction_P Parameter: Treatment Value: Drought vs. No Drought
ccaatacataaacagaagtttctcgagcttcaaatactgtttcagatcaatcaatcaatcatggctagctctggaaacaagaacatcaacgccaaattggtattactaggagatgttggagctggaaaatcaagtcttgtgctacggtttgttaaagatcaatttgttgaatttcaggaatcaaccattggtgcagcctttttctctcaaacattggctgtgaatgatgcgactgtgaagtttgagatatgggatacagctggtcaggaacgataccacagtttggctccaatgtactacaggggtgcagctgctgctattattgtctttgacattactaatcaagcctcatttgagagggcgaagaaatgggttcaggaactgcaggcacaaggtaaccctaatatggtgatggctcttgctggaaacaaagctgatttattagacgcaaggaaggtgtctgcagaggaggcagagatttatgctcaagagaacagccttttcttcatggaaacctcagcgaagaccgcaacaaatgtcaaagacatattctacgaaatagcgaaaaggctgccgcgtgtacagccagctgaaaacccgacaggaatggttctcccaaacgggccaggggctacggcagtgagttcatcgtgttgtgcttagattcgtaccttaagagagatctcttttggttagtcacatagtagagaacatctggactttcatgtgtttgcttcttcttcgtctttgttactttactttgcttgcattgacaacaacaacagcgtatatcatgatgatacttctgcctttgtgaaatctgaagatatttgtatttggagagatttatatatatatatctcttttgtaattagaaaacataacttagtccg

SEQ ID NO: 76592 - protein, 220 aa, Arabidopsis thaliana
  peptide (1)..(220): Ceres Seq. ID no. 7108526
  misc_feature (32)..(193): Pfam Name: Ras family Pfam Description: Ras family
  misc_feature (21)..(220): Homolog of NCBI NO: 15242309 NR Description: ras-related GTP-binding protein RHA1 (sp|P31582); id: At5g45130.1, supported by cDNA: 37862., supported by cDNA: supported by cDNA: gi_20453278 [Arabidopsis thaliana] protein
  misc_feature (21)..(220): Homolog of NCBI NO: 15235113 NR Description: GTP-binding protein, putative; protein id: supported by cDNA: gi_12964605, supported by cDNA: gi_13878092,
  misc_feature (21)..(220): Homolog of NCBI NO: 421941 NR Description: GTP-binding protein, ras-related - common tobacco
  misc_feature (21)..(220): Homolog of NCBI NO: 1370178 NR Description: RAB5A [Lotus japonicus]
  misc_feature (21)..(220): Homolog of NCBI NO: 12311684 NR Description: GTP binding protein [Cichorium intybus x
  misc_feature (21)..(220): Homolog of NCBI NO: 12311682 NR Description: GTP binding protein [Cichorium intybus x
  misc_feature (21)..(220): Homolog of NCBI NO: 1076545 NR Description: guanine nucleotide regulatory protein - fava bean
  misc_feature (21)..(220): Homolog of NCBI NO: 6010033 NR Description: GTP binding protein [Cichorium intybus x
  misc_feature (21)..(220): Homolog of NCBI NO: 6010031 NR Description: GTP binding protein [Cichorium intybus x
  misc_feature (21)..(219): Homolog of NCBI NO: 266879 NR Description: RAS-RELATED PROTEIN RAB5 >gi|100333|pir||S23524
PIHKQKFLELQILFQINQSIMASSGNKNINAKLVLLGDVGAGKSSLVLRFVKDQFVEFQESTIGAAFFSQTLAVNDATVKFEIWDTAGQERYHSLAPMYYRGAAAAIIVFDITNQASFERAKKWVQELQAQGNPNMVMALAGNKADLLDARKVSAEEAEIYAQENSLFFMETSAKTATNVKDIFYEIAKRLPRVQPAENPTGMVLPNGPGATAVSSSCCA

SEQ ID NO: 76593 - protein, 200 aa, Arabidopsis thaliana; identical to SEQ ID NO: 24213
  peptide (1)..(200): Ceres Seq. ID no. 7108527
  misc_feature (12)..(173): Pfam Name: Ras family Pfam Description: Ras family
  misc_feature (1)..(200): Homolog of NCBI NO: 15242309 NR Description: ras-related GTP-binding protein RHA1 (sp|P31582); id: At5g45130.1, supported by cDNA: 37862., supported by cDNA: supported by cDNA: gi_20453278 [Arabidopsis thaliana] protein
  misc_feature (1)..(200): Homolog of NCBI NO: 15235113 NR Description: GTP-binding protein, putative; protein id: supported by cDNA: gi_12964605, supported by cDNA: gi_13878092,
  misc_feature (1)..(200): Homolog of NCBI NO: 421941 NR Description: GTP-binding protein, ras-related - common tobacco
  misc_feature (1)..(200): Homolog of NCBI NO: 1370178 NR Description: RAB5A [Lotus japonicus]
  misc_feature (1)..(200): Homolog of NCBI NO: 12311684 NR Description: GTP binding protein [Cichorium intybus x
  misc_feature (1)..(200): Homolog of NCBI NO: 12311682 NR Description: GTP binding protein [Cichorium intybus x
  misc_feature (1)..(200): Homolog of NCBI NO: 1076545 NR Description: guanine nucleotide regulatory protein - fava bean
  misc_feature (1)..(200): Homolog of NCBI NO: 6010033 NR Description: GTP binding protein [Cichorium intybus x
  misc_feature (1)..(200): Homolog of NCBI NO: 6010031 NR Description: GTP binding protein [Cichorium intybus x
  misc_feature (1)..(199): Homolog of NCBI NO: 266879 NR Description: RAS-RELATED PROTEIN RAB5 >gi|100333|pir||S23524

SEQ ID NO: 76594 - protein, 123 aa, Arabidopsis thaliana; identical to SEQ ID NO: 24214
  peptide (1)..(123): Ceres Seq. ID no. 7108528
  misc_feature (1)..(96): Pfam Name: Ras family Pfam Description: Ras family
  misc_feature (1)..(123): Homolog of NCBI NO: 15242309 NR Description: ras-related GTP-binding protein RHA1 (sp|P31582); id: At5g45130.1, supported by cDNA: 37862., supported by cDNA: supported by cDNA: gi_20453278 [Arabidopsis thaliana] protein
  misc_feature (1)..(123): Homolog of NCBI NO: 15235113 NR Description: GTP-binding protein, putative; protein id: supported by cDNA: gi_12964605, supported by cDNA: gi_13878092,
  misc_feature (1)..(123): Homolog of NCBI NO: 421941 NR Description: GTP-binding protein, ras-related - common tobacco
  misc_feature (1)..(123): Homolog of NCBI NO: 1370178 NR Description: RAB5A [Lotus japonicus]
  misc_feature (1)..(123): Homolog of NCBI NO: 12311684 NR Description: GTP binding protein [Cichorium intybus x
  misc_feature (1)..(123): Homolog of NCBI NO: 12311682 NR Description: GTP binding protein [Cichorium intybus x
  misc_feature (1)..(123): Homolog of NCBI NO: 1076545 NR Description: guanine nucleotide regulatory protein - fava bean
  misc_feature (1)..(123): Homolog of NCBI NO: 6010033 NR Description: GTP binding protein [Cichorium intybus x
  misc_feature (1)..(123): Homolog of NCBI NO: 6010031 NR Description: GTP binding protein [Cichorium intybus x
  misc_feature (1)..(122): Homolog of NCBI NO: 266879 NR Description: RAS-RELATED PROTEIN RAB5 >gi|100333|pir||S23524

SEQ ID NO: 76595 - DNA, 2668 bp, Arabidopsis thaliana
  misc_feature (1)..(2668): Ceres Seq. ID no. 7108556
  misc_feature: MA Experiment ID: 108435 Result: Down-regulated in Transcription
  misc_feature: MA Experiment 108435 PARAMETER Experiment Name: At_stm_Mutants_cDNA_P Parameter: Plant Line Value: wt Landsburg vs stm
  misc_feature: MA Experiment 108435 PARAMETER Experiment Name: At_stm_Mutants_cDNA_P Parameter: Tissue Value: Shoot Apical Meristem Region
  misc_feature: MA Experiment ID: 20000069 Result: Up-regulated in Transcription
  misc_feature: MA Experiment 20000069 PARAMETER Experiment Name: At_100uM_ABA_Mutants_cDNA_P Parameter: Plant Line Value: CS23
  misc_feature: MA Experiment 20000069 PARAMETER Experiment Name: At_100uM_ABA_Mutants_cDNA_P Parameter: Timepoint (hr) Value: 6
  misc_feature: MA Experiment 20000069 PARAMETER Experiment Name: At_100uM_ABA_Mutants_cDNA_P Parameter: Tissue Value: Aerial
  misc_feature: MA Experiment 20000069 PARAMETER Experiment Name: At_100uM_ABA_Mutants_cDNA_P Parameter: Treatment Value: 100uM ABA vs. No Treatment
  misc_feature: MA Experiment ID: 20000070 Result: Up-regulated in Transcription
  misc_feature: MA Experiment 20000070 PARAMETER Experiment Name: At_100uM_ABA_Mutants_cDNA_P Parameter: Plant Line Value: CS24
  misc_feature: MA Experiment 20000070 PARAMETER Experiment Name: At_100uM_ABA_Mutants_cDNA_P Parameter: Timepoint (hr) Value: 6
  misc_feature: MA Experiment 20000070 PARAMETER Experiment Name: At_100uM_ABA_Mutants_cDNA_P Parameter: Tissue Value: Aerial
  misc_feature: MA Experiment 20000070 PARAMETER Experiment Name: At_100uM_ABA_Mutants_cDNA_P Parameter: Treatment Value: 100uM ABA vs. No Treatment
  misc_feature: MA Experiment ID: 20000071 Result: Up-regulated in Transcription
  misc_feature: MA Experiment 20000071 PARAMETER Experiment Name: At_100uM_ABA_Mutants_cDNA_P Parameter: Plant Line Value: CS8104
  misc_feature: MA Experiment 20000071 PARAMETER Experiment Name: At_100uM_ABA_Mutants_cDNA_P Parameter: Timepoint (hr) Value: 6
  misc_feature: MA Experiment 20000071 PARAMETER Experiment Name: At_100uM_ABA_Mutants_cDNA_P Parameter: Tissue Value: Aerial
  misc_feature: MA Experiment 20000071 PARAMETER Experiment Name: At_100uM_ABA_Mutants_cDNA_P Parameter: Treatment Value: 100uM ABA vs. No Treatment
  misc_feature: MA Experiment ID: 20000072 Result: Up-regulated in Transcription
  misc_feature: MA Experiment 20000072 PARAMETER Experiment Name: At_100uM_ABA_Mutants_cDNA_P Parameter: Plant Line Value: CS8105
  misc_feature: MA Experiment 20000072 PARAMETER Experiment Name: At_100uM_ABA_Mutants_cDNA_P Parameter: Timepoint (hr) Value: 6
  misc_feature: MA Experiment 20000072 PARAMETER Experiment Name: At_100uM_ABA_Mutants_cDNA_P Parameter: Tissue Value: Aerial
  misc_feature: MA Experiment 20000072 PARAMETER Experiment Name: At_100uM_ABA_Mutants_cDNA_P Parameter: Treatment Value: 100uM ABA vs. No Treatment
  misc_feature: MA Experiment ID: 20000086 Result: Up-regulated in Transcription
  misc_feature: MA Experiment 20000086 PARAMETER Experiment Name: At_100uM_ABA_Mutants_cDNA_P Parameter: Plant Line Value: CS22
  misc_feature: MA Experiment 20000086 PARAMETER Experiment Name: At_100uM_ABA_Mutants_cDNA_P Parameter: Timepoint (hr) Value: 6
  misc_feature: MA Experiment 20000086 PARAMETER Experiment Name: At_100uM_ABA_Mutants_cDNA_P Parameter: Tissue Value: Aerial
  misc_feature: MA Experiment 20000086 PARAMETER Experiment Name: At_100uM_ABA_Mutants_cDNA_P Parameter: Treatment Value: 100uM ABA vs. No Treatment
  misc_feature: MA Experiment ID: 20000087 Result: Up-regulated in Transcription
  misc_feature: MA Experiment 20000087 PARAMETER Experiment Name: At_100uM_ABA_Mutants_cDNA_P Parameter: Plant Line Value: WS
  misc_feature: MA Experiment 20000087 PARAMETER Experiment Name: At_100uM_ABA_Mutants_cDNA_P Parameter: Timepoint (hr) Value: 6
  misc_feature: MA Experiment 20000087 PARAMETER Experiment Name: At_100uM_ABA_Mutants_cDNA_P Parameter: Tissue Value: Aerial
  misc_feature: MA Experiment 20000087 PARAMETER Experiment Name: At_100uM_ABA_Mutants_cDNA_P Parameter: Treatment Value: 100uM ABA vs. No Treatment
  misc_feature: MA Experiment ID: 20000088 Result: Up-regulated in Transcription
  misc_feature: MA Experiment 20000088 PARAMETER Experiment Name: At_100uM_ABA_Mutants_cDNA_P Parameter: Plant Line Value: Landsberg
  misc_feature: MA Experiment 20000088 PARAMETER Experiment Name: At_100uM_ABA_Mutants_cDNA_P Parameter: Timepoint (hr) Value: 6
  misc_feature: MA Experiment 20000088 PARAMETER Experiment Name: At_100uM_ABA_Mutants_cDNA_P Parameter: Tissue Value: Aerial
  misc_feature: MA Experiment 20000088 PARAMETER Experiment Name: At_100uM_ABA_Mutants_cDNA_P Parameter: Treatment Value: 100uM ABA vs. No Treatment
  misc_feature: MA Experiment ID: 20000089 Result: Up-regulated in Transcription
  misc_feature: MA Experiment ID: 20000090 Result: Up-regulated in Transcription
  misc_feature: MA Experiment ID: 20000112 Result: Down-regulated in Transcription
  misc_feature: MA Experiment 20000112 PARAMETER Experiment Name: At_42deg_Heat_cDNA_P Parameter: Temperature (deg C) Value: 42 vs. 22
  misc_feature: MA Experiment 20000112 PARAMETER Experiment Name: At_42deg_Heat_cDNA_P Parameter: Timepoint (hr) Value: 2
  misc_feature: MA Experiment 20000112 PARAMETER Experiment Name: At_42deg_Heat_cDNA_P Parameter: Tissue Value: Aerial
  misc_feature: MA Experiment ID: 20000113 Result: Down-regulated in Transcription
  misc_feature: MA Experiment 20000113 PARAMETER Experiment Name: At_42deg_Heat_cDNA_P Parameter: Temperature (deg C) Value: 42 vs. 22
  misc_feature: MA Experiment 20000113 PARAMETER Experiment Name: At_42deg_Heat_cDNA_P Parameter: Timepoint (hr) Value: 8
  misc_feature: MA Experiment 20000113 PARAMETER Experiment Name: At_42deg_Heat_cDNA_P Parameter: Tissue Value: Aerial
  misc_feature: MA Experiment ID: 20000117 Result: Up-regulated in Transcription
  misc_feature: MA Experiment 20000117 PARAMETER Experiment Name: At_100uM_ABA_Mutants_cDNA_P Parameter: Plant Line Value: Columbia
  misc_feature: MA Experiment 20000117 PARAMETER Experiment Name: At_100uM_ABA_Mutants_cDNA_P Parameter: Timepoint (hr) Value: 6
  misc_feature: MA Experiment 20000117 PARAMETER Experiment Name: At_100uM_ABA_Mutants_cDNA_P Parameter: Tissue Value: Aerial
  misc_feature: MA Experiment 20000117 PARAMETER Experiment Name: At_100uM_ABA_Mutants_cDNA_P Parameter: Treatment Value: 100uM ABA vs. No Treatment
  misc_feature: MA Experiment ID: 20000173 Result: Down-regulated in Transcription
  misc_feature: MA Experiment 20000173 PARAMETER Experiment Name: At_42deg_Heat_P Parameter: Age (day) Value: 14
  misc_feature: MA Experiment 20000173 PARAMETER Experiment Name: At_42deg_Heat_P Parameter: Organism Value: A. thaliana
  misc_feature: MA Experiment 20000173 PARAMETER Experiment Name: At_42deg_Heat_P Parameter: Plant Line Value: WS
  misc_feature: MA Experiment 20000173 PARAMETER Experiment Name: At_42deg_Heat_P Parameter: Temperature (deg C) Value: 42 vs. 22
  misc_feature: MA Experiment 20000173 PARAMETER Experiment Name: At_42deg_Heat_P Parameter: Timepoint (hr) Value: 6
  misc_feature: MA Experiment 20000173 PARAMETER Experiment Name: At_42deg_Heat_P Parameter: Tissue Value: Aerial
  misc_feature: MA Experiment ID: 20000182 Result: Down-regulated in Transcription
  misc_feature: MA Experiment 20000182 PARAMETER Experiment Name: At_2mM_SA_P Parameter: Age (day) Value: 14
  misc_feature: MA Experiment 20000182 PARAMETER Experiment Name: At_2mM_SA_P Parameter: Organism Value: A. thaliana
  misc_feature: MA Experiment 20000182 PARAMETER Experiment Name: At_2mM_SA_P Parameter: Plant Line Value: WS
  misc_feature: MA Experiment 20000182 PARAMETER Experiment Name: At_2mM_SA_P Parameter: Timepoint (hr) Value: 6
  misc_feature: MA Experiment 20000182 PARAMETER Experiment Name: At_2mM_SA_P Parameter: Tissue Value: Aerial
  misc_feature: MA Experiment 20000182 PARAMETER Experiment Name: At_2mM_SA_P Parameter: Treatment Value: 2mM SA vs. No Treatment
  misc_feature: MA Experiment ID: 20000184 Result: Down-regulated in Transcription
  misc_feature: MA Experiment 20000184 PARAMETER Experiment Name: At_Shoots__P Parameter: Age (day) Value: 7
  misc_feature: MA Experiment 20000184 PARAMETER Experiment Name: At_Shoots__P Parameter: Tissue Value: Shoots vs. Whole Plant
  misc_feature: MA Experiment ID: 20000437 Result: Up-regulated in Transcription
  misc_feature: MA Experiment 20000437 PARAMETER Experiment Name: At_Drought_P Parameter: Age (day) Value: 8
  misc_feature: MA Experiment 20000437 PARAMETER Experiment Name: At_Drought_P Parameter: Organism Value: A. thaliana
  misc_feature: MA Experiment 20000437 PARAMETER Experiment Name: At_Drought_P Parameter: Plant Line Value: WS
  misc_feature: MA Experiment 20000437 PARAMETER Experiment Name: At_Drought_P Parameter: Timepoint (hr) Value: 24
  misc_feature: MA Experiment 20000437 PARAMETER Experiment Name: At_Drought_P Parameter: Tissue Value: Whole Plant
  misc_feature: MA Experiment 20000437 PARAMETER Experiment Name: At_Drought_P Parameter: Treatment Value: Drought vs. No Drought
  misc_feature: MA Experiment ID: 20000438 Result: Down-regulated in Transcription
  misc_feature: MA Experiment 20000438 PARAMETER Experiment Name: At_Shoots__P Parameter: Age (day) Value: 14
  misc_feature: MA Experiment 20000438 PARAMETER Experiment Name: At_Shoots__P Parameter: Tissue Value: Shoots vs. Whole Plant
  misc_feature: MA Experiment ID: 20001451 Result: Down-regulated in Transcription
  misc_feature: MA Experiment 20001451 PARAMETER Experiment Name: At_Far-red-induction_P Parameter: Age (day) Value: 7
  misc_feature: MA Experiment 20001451 PARAMETER Experiment Name: At_Far-red-induction_P Parameter: Light Value: Far-red vs. White
  misc_feature: MA Experiment 20001451 PARAMETER Experiment Name: At_Far-red-induction_P Parameter: Organism Value: A. thaliana
  misc_feature: MA Experiment 20001451 PARAMETER Experiment Name: At_Far-red-induction_P Parameter: Plant Line Value: Columbia
  misc_feature: MA Experiment 20001451 PARAMETER Experiment Name: At_Far-red-induction_P Parameter: Timepoint (hr) Value: 24
  misc_feature: MA Experiment 20001451 PARAMETER Experiment Name: At_Far-red-induction_P Parameter: Tissue Value: Whole Plant
  misc_feature: MA Experiment ID: 20001555 Result: Up-regulated in Transcription
  misc_feature: MA Experiment 20001555 PARAMETER Experiment Name: At_Drought_Soil_Dry_P Parameter: Age (day) Value: 24
  misc_feature: MA Experiment 20001555 PARAMETER Experiment Name: At_Drought_Soil_Dry_P Parameter: Organism Value: A. thaliana
  misc_feature: MA Experiment 20001555 PARAMETER Experiment Name: At_Drought_Soil_Dry_P Parameter: Plant Line Value: WS
  misc_feature: MA Experiment 20001555 PARAMETER Experiment Name: At_Drought_Soil_Dry_P Parameter: Post Timepoint (hr) Value: None
  misc_feature: MA Experiment 20001555 PARAMETER Experiment Name: At_Drought_Soil_Dry_P Parameter: Post-Treatment Value: None
  misc_feature: MA Experiment 20001555 PARAMETER Experiment Name: At_Drought_Soil_Dry_P Parameter: Timepoint (day) Value: 10
  misc_feature: MA Experiment 20001555 PARAMETER Experiment Name: At_Drought_Soil_Dry_P Parameter: Treatment Value: Drought vs. No Drought
  misc_feature: MA Experiment ID: 20001558 Result: Down-regulated in Transcription
  misc_feature: MA Experiment 20001558 PARAMETER Experiment Name: At_Drought_Soil_Dry_P Parameter: Age (day) Value: 27
  misc_feature: MA Experiment 20001558 PARAMETER Experiment Name: At_Drought_Soil_Dry_P Parameter: Organism Value: A. thaliana
  misc_feature: MA Experiment 20001558 PARAMETER Experiment Name: At_Drought_Soil_Dry_P Parameter: Plant Line Value: WS
  misc_feature: MA Experiment 20001558 PARAMETER Experiment Name: At_Drought_Soil_Dry_P Parameter: Post Timepoint (hr) Value: 6
  misc_feature: MA Experiment 20001558 PARAMETER Experiment Name: At_Drought_Soil_Dry_P Parameter: Post-Treatment Value: Re-Water vs. No Drought
  misc_feature: MA Experiment 20001558 PARAMETER Experiment Name: At_Drought_Soil_Dry_P Parameter: Timepoint (day) Value: 13
  misc_feature: MA Experiment 20001558 PARAMETER Experiment Name: At_Drought_Soil_Dry_P Parameter: Treatment Value: Drought vs. No Drought
  misc_feature: Pfam Name: Alpha-amylase Pfam Description: Alpha amylase, catalytic domain
cgcgcccgcgtacgttttcctcatcttccatcgattaagaagaagaattcgtctcttcacagtttcaatgaagatctcaggagaagcaacgctgtctcattctctctgaggaaggactctcgttcttctgggaaggtttttgctcggaagccatcgtatgattctgattcgtcttccttagctaccactgcatctgagaagctccgtggccatcagagtgatagctcttcatctgcctctgatcaagtacaatctcgggatactgtctctgacgatactcaggtgctcggcaatgtagacgttcagaaaactgaagaagcccaggaaacagagacactagatcaaacttctgcactctcaacatctggaagcataagttataaagaagattttgcaaagatgtcacactctgtcgaccaagaagttgggcagaggaagattccacctcctggagatgggaagagaatatatgacattgatcctatgttgaacagtcatcgtaatcatcttgattaccgatatgggcagtacagaaaactgcgtgaagaaattgacaagaatgaaggtggtttggaggcattttctcgtggttatgaaatatttggcttcactcgaagcgccactggtatcacttaccgggaatgggcaccgggagctaaggcagcatcactgatcggagattttaataactggaatgcgaaatctgatgttatggctcggaacgactttggtgtgtgggaaatatttctgccaaataatgctgatggctcaccagcaattccccatggctcccgtgtgaagatccgcatggataccccatctggtattaaagactccattccagcttggatcaagtattctgtccagccacctggcgagatcccatataatggagtatattatgaccctcctgaggaggataaatatgcgttcaaacatcctcgtccaaagaaacccacatcgctgcgtatatatgaatcacatgttggaatgagtagtacggaaccaaagataaatacatatgccaactttagagatgatgtacttccccgtataaaaaagctaggctataatgctgtgcagataatggccattcaagagcatgcctactatgccagctttgggtatcatgtgacaaattttttcgcacctagcagccgctttggaacacctgatgaccttaaatctttgatagacaaagctcatgagctaggtctggttgttctgatggatattgtgcacagccatgcatcaaaaaacacactggatggcctggacatgtttgatggtactgatggtcaatatttccactctggatcgcgtggttatcattggatgtgggatactcgtcttttcaattacggaagctgggaagtgcttaggtatcttctttccaacgcgagatggtggctggaagaatacaagtttgatgggttcagatttgatggtgtgacttccatgatgtacactcatcatggactgcaggtcgaatttactgggaattacaatgagtactttggatattctactgatgttgacgctgtggtctatctaatgctggtgaacgatttgattcatgggctataccctgaggctattgttgtcggcgaagatgttagcgggatgccagctttttgcgttcctgtcgaagacggtggtgtgggttttgactaccgtctacacatggcagtggcagataaatggattgagcttcttaagaagagagacgaggactggcaggttggtgatataactttcacgcttaccaacaggaggtggggagaaaaatgtgtcgtctatgcagagagtcatgatcaagcccttgttggagacaaaacgatagctttctggctaatggataaggacatgtatgatttcatggccgttgatagacaggccactccgcgtgtagaccgtgggattgctttacacaaaatgatccgtctcattacgatgggattgggtggagaaggatacctcaatttcatgggaaacgaatttggacacccagaatggatcgacttcccaaggaccgaccagcaccttcctgatggcagagtcatcgctgggaataatggtagttatgataaatcccgacgtaggtttgatctgggagatgcagaatatcttagataccatggactacaagagtttgatcgagcaatgcaaaatctagaggagacgtatggtttcatgacttcagagcaccagtacatatcccccaaggatgaaggagacagagtcattgtattcgagagaggtaacttgctcttcgtcttcaacttccactggaccaacagttactctgactaccgtatcggttgctctgttcccggaaagtacaaaatcgttttggactctgataactctttatttggaggcttcaaccggctagatgactccgcggagtttttcacctctgatggaaggcacgacgataggccttgctccttcatggtgtatgcaccgtgcagaaccgctgtagtttacgctgcagtagatgatgatgatgatgatgaacgttcttctcttgtccccataggcctgttacccgaagatgtttaggagcaaagacagttgtccgagtttacctactgtaagcttctttgtactacaaaaatttactcgttgatcttcttctcctttagttttgcttgcagcggccgcg

SEQ ID NO: 76596 - protein, 854 aa, Arabidopsis thaliana
  peptide (1)..(854): Ceres Seq. ID no. 7108557
  misc_feature: Pfam Name: Alpha-amylase Pfam Description: Alpha amylase, catalytic domain
  misc_feature (145)..(834): Homolog of NCBI NO: 7433846 NR Description: 1,4-alpha-glucan branching enzyme (EC 2.4.1.18) - maize >gi|3511236|gb|AAC33764.1| starch branching enzyme IIb
  misc_feature (145)..(834): Homolog of NCBI NO: 1169911 NR Description: 1,4-alpha-glucan branching enzyme IIB,
  misc_feature (90)..(834): Homolog of NCBI NO: 3822022 NR Description: starch branching enzyme IIb [Hordeum vulgare]
  misc_feature (156)..(854): Homolog of NCBI NO: 1771261 NR Description: 1,4-alpha-glucan branching enzyme [Manihot
  misc_feature (156)..(835): Homolog of NCBI NO: 7433851 NR Description: 1,4-alpha-glucan branching enzyme (EC 2.4.1.18) I
  misc_feature (156)..(845): Homolog of NCBI NO: 5441248 NR Description: branching enzyme 3 [Phaseolus vulgaris]
  misc_feature (156)..(807): Homolog of NCBI NO: 1169912 NR Description: 1,4-alpha-glucan branching enzyme (Starch
  misc_feature (156)..(835): Homolog of NCBI NO: 4586236 NR Description: starch branching enzyme I [Triticum aestivum]
  misc_feature (156)..(835): Homolog of NCBI NO: 4586238 NR Description: starch branching enzyme I [Triticum aestivum]
  misc_feature (156)..(835): Homolog of NCBI NO: 11037532 NR Description: starch branching enyzyme 1 [Triticum aestivum]
RARVRFPHLPSIKKKNSSLHSFNEDLRRSNAVSFSLRKDSRSSGKVFARKPSYDSDSSSLATTASEKLRGHQSDSSSSASDQVQSRDTVSDDTQVLGNVDVQKTEEAQETETLDQTSALSTSGSISYKEDFAKMSHSVDQEVGQRKIPPPGDGKRIYDIDPMLNSHRNHLDYRYGQYRKLREEIDKNEGGLEAFSRGYEIFGFTRSATGITYREWAPGAKAASLIGDFNNWNAKSDVMARNDFGVWEIFLPNNADGSPAIPHGSRVKIRMDTPSGIKDSIPAWIKYSVQPPGEIPYNGVYYDPPEEDKYAFKHPRPKKPTSLRIYESHVGMSSTEPKINTYANFRDDVLPRIKKLGYNAVQIMAIQEHAYYASFGYHVTNFFAPSSRFGTPDDLKSLIDKAHELGLVVLMDIVHSHASKNTLDGLDMFDGTDGQYFHSGSRGYHWMWDTRLFNYGSWEVLRYLLSNARWWLEEYKFDGFRFDGVTSMMYTHHGLQVEFTGNYNEYFGYSTDVDAVVYLMLVNDLIHGLYPEAIVVGEDVSGMPAFCVPVEDGGVGFDYRLHMAVADKWIELLKKRDEDWQVGDITFTLTNRRWGEKCVVYAESHDQALVGDKTIAFWLMDKDMYDFMAVDRQATPRVDRGIALHKMIRLITMGLGGEGYLNFMGNEFGHPEWIDFPRTDQHLPDGRVIAGNNGSYDKSRRRFDLGDAEYLRYHGLQEFDRAMQNLEETYGFMTSEHQYISPKDEGDRVIVFERGNLLFVFNFHWTNSYSDYRIGCSVPGKYKIVLDSDNSLFGGFNRLDDSAEFFTSDGRHDDRPCSFMVYAPCRTAVVYAAVDDDDDDERSSLVPIGLLPEDV

SEQ ID NO: 76597 - protein, 721 aa, Arabidopsis thaliana
  peptide (1)..(721): Ceres Seq. ID no. 7108558
  misc_feature: Pfam Name: Alpha-amylase Pfam Description: Alpha amylase, catalytic domain
  misc_feature (12)..(701): Homolog of NCBI NO: 7433846 NR Description: 1,4-alpha-glucan branching enzyme (EC 2.4.1.18) - maize >gi|3511236|gb|AAC33764.1| starch branching enzyme IIb
  misc_feature (12)..(701): Homolog of NCBI NO: 1169911 NR Description: 1,4-alpha-glucan branching enzyme IIB,
  misc_feature (1)..(701): Homolog of NCBI NO: 3822022 NR Description: starch branching enzyme IIb [Hordeum vulgare]
  misc_feature (23)..(721): Homolog of NCBI NO: 1771261 NR Description: 1,4-alpha-glucan branching enzyme [Manihot
  misc_feature (23)..(702): Homolog of NCBI NO: 7433851 NR Description: 1,4-alpha-glucan branching enzyme (EC 2.4.1.18) I
  misc_feature (23)..(712): Homolog of NCBI NO: 5441248 NR Description: branching enzyme 3 [Phaseolus vulgaris]
  misc_feature (23)..(674): Homolog of NCBI NO: 1169912 NR Description: 1,4-alpha-glucan branching enzyme (Starch
  misc_feature (23)..(702): Homolog of NCBI NO: 4586236 NR Description: starch branching enzyme I [Triticum aestivum]
  misc_feature (23)..(702): Homolog of NCBI NO: 4586237 NR Description: starch branching enzyme I [Triticum aestivum]
  misc_feature (23)..(702): Homolog of NCBI NO: 11037532 NR Description: starch branching enyzyme 1 [Triticum aestivum]
MSHSVDQEVGQRKIPPPGDGKRIYDIDPMLNSHRNHLDYRYGQYRKLREEIDKNEGGLEAFSRGYEIFGFTRSATGITYREWAPGAKAASLIGDFNNWNAKSDVMARNDFGVWEIFLPNNADGSPAIPHGSRVKIRMDTPSGIKDSIPAWIKYSVQPPGEIPYNGVYYDPPEEDKYAFKHPRPKKPTSLRIYESHVGMSSTEPKINTYANFRDDVLPRIKKLGYNAVQIMAIQEHAYYASFGYHVTNFFAPSSRFGTPDDLKSLIDKAHELGLVVLMDIVHSHASKNTLDGLDMFDGTDGQYFHSGSRGYHWMWDTRLFNYGSWEVLRYLLSNARWWLEEYKFDGFRFDGVTSMMYTHHGLQVEFTGNYNEYFGYSTDVDAVVYLMLVNDLIHGLYPEAIVVGEDVSGMPAFCVPVEDGGVGFDYRLHMAVADKWIELLKKRDEDWQVGDITFTLTNRRWGEKCVVYAESHDQALVGDKTIAFWLMDKDMYDFMAVDRQATPRVDRGIALHKMIRLITMGLGGEGYLNFMGNEFGHPEWIDFPRTDQHLPDGRVIAGNNGSYDKSRRRFDLGDAEYLRYHGLQEFDRAMQNLEETYGFMTSEHQYISPKDEGDRVIVFERGNLLFVFNFHWTNSYSDYRIGCSVPGKYKIVLDSDNSLFGGFNRLDDSAEFFTSDGRHDDRPCSFMVYAPCRTAVVYAAVDDDDDDERSSLVPIGLLPEDV

SEQ ID NO: 76598 - protein, 693 aa, Arabidopsis thaliana
  peptide (1)..(693): Ceres Seq. ID no. 7108559
  misc_feature: Pfam Name: Alpha-amylase Pfam Description: Alpha amylase, catalytic domain
  misc_feature (1)..(673): Homolog of NCBI NO: 7433846 NR Description: 1,4-alpha-glucan branching enzyme (EC 2.4.1.18) - maize >gi|3511236|gb|AAC33764.1| starch branching enzyme IIb
  misc_feature (1)..(673): Homolog of NCBI NO: 1169911 NR Description: 1,4-alpha-glucan branching enzyme IIB,
  misc_feature (1)..(673): Homolog of NCBI NO: 3822022 NR Description: starch branching enzyme IIb [Hordeum vulgare]
  misc_feature (1)..(693): Homolog of NCBI NO: 1771261 NR Description: 1,4-alpha-glucan branching enzyme [Manihot
  misc_feature (1)..(674): Homolog of NCBI NO: 7433851 NR Description: 1,4-alpha-glucan branching enzyme (EC 2.4.1.18) I
  misc_feature (1)..(684): Homolog of NCBI NO: 5441248 NR Description: branching enzyme 3 [Phaseolus vulgaris]
  misc_feature (1)..(646): Homolog of NCBI NO: 1169912 NR Description: 1,4-alpha-glucan branching enzyme (Starch
  misc_feature (1)..(674): Homolog of NCBI NO: 4586236 NR Description: starch branching enzyme I [Triticum aestivum]
  misc_feature (1)..(674): Homolog of NCBI NO: 11037532 NR Description: starch branching enyzyme 1 [Triticum aestivum]
  misc_feature (1)..(674): Homolog of NCBI NO: 4586237 NR Description: starch branching enzyme I [Triticum aestivum]
MLNSHRNHLDYRYGQYRKLREEIDKNEGGLEAFSRGYEIFGFTRSATGITYREWAPGAKAASLIGDFNNWNAKSDVMARNDFGVWEIFLPNNADGSPAIPHGSRVKIRMDTPSGIKDSIPAWIKYSVQPPGEIPYNGVYYDPPEEDKYAFKHPRPKKPTSLRIYESHVGMSSTEPKINTYANFRDDVLPRIKKLGYNAVQIMAIQEHAYYASFGYHVTNFFAPSSRFGTPDDLKSLIDKAHELGLVVLMDIVHSHASKNTLDGLDMFDGTDGQYFHSGSRGYHWMWDTRLFNYGSWEVLRYLLSNARWWLEEYKFDGFRFDGVTSMMYTHHGLQVEFTGNYNEYFGYSTDVDAVVYLMLVNDLIHGLYPEAIVVGEDVSGMPAFCVPVEDGGVGFDYRLHMAVADKWIELLKKRDEDWQVGDITFTLTNRRWGEKCVVYAESHDQALVGDKTIAFWLMDKDMYDFMAVDRQATPRVDRGIALHKMIRLITMGLGGEGYLNFMGNEFGHPEWIDFPRTDQHLPDGRVIAGNNGSYDKSRRRFDLGDAEYLRYHGLQEFDRAMQNLEETYGFMTSEHQYISPKDEGDRVIVFERGNLLFVFNFHWTNSYSDYRIGCSVPGKYKIVLDSDNSLFGGFNRLDDSAEFFTSDGRHDDRPCSFMVYAPCRTAVVYAAVDDDDDDERSSLVPIGLLPEDV

SEQ ID NO: 76599 - DNA, 1383 bp, Arabidopsis thaliana
  misc_feature (1)..(1383): Ceres Seq. ID no. 7108560
  misc_feature: MA Experiment ID: 108577 Result: Down-regulated in Transcription
  misc_feature: MA Experiment 108577 PARAMETER Experiment Name: At_42deg_Heat_cDNA_P Parameter: Temperature (deg C) Value: 42 vs. 22
  misc_feature: MA Experiment 108577 PARAMETER Experiment Name: At_42deg_Heat_cDNA_P Parameter: Timepoint (hr) Value: 6
  misc_feature: MA Experiment 108577 PARAMETER Experiment Name: At_42deg_Heat_cDNA_P Parameter: Tissue Value: Aerial
  misc_feature: MA Experiment ID: 108595 Result: Down-regulated in Transcription
  misc_feature: MA Experiment 108595 PARAMETER Experiment Name: At_Ler-pi_Ovule_cDNA_P Parameter: Plant Line Value: null
  misc_feature: MA Experiment ID: 20000111 Result: Down-regulated in Transcription
  misc_feature: MA Experiment 20000111 PARAMETER Experiment Name: At_42deg_Heat_cDNA_P Parameter: Temperature (deg C) Value: 42 vs. 22
  misc_feature: MA Experiment 20000111 PARAMETER Experiment Name: At_42deg_Heat_cDNA_P Parameter: Timepoint (hr) Value: 6
  misc_feature: MA Experiment 20000111 PARAMETER Experiment Name: At_42deg_Heat_cDNA_P Parameter: Tissue Value: Aerial
  misc_feature: MA Experiment ID: 20000307 Result: Up-regulated in Transcription
  misc_feature: MA Experiment 20000307 PARAMETER Experiment Name: At_Germinating_Seeds_Sub_P Parameter: Age (hr) Value: 24 vs. 0
  misc_feature: MA Experiment 20000307 PARAMETER Experiment Name: At_Germinating_Seeds_Sub_P Parameter: Organism Value: A. thaliana
  misc_feature: MA Experiment 20000307 PARAMETER Experiment Name: At_Germinating_Seeds_Sub_P Parameter: Plant Line Value: WS
  misc_feature: MA Experiment 20000307 PARAMETER Experiment Name: At_Germinating_Seeds_Sub_P Parameter: Tissue Value: Germinating Seeds
  misc_feature: MA Experiment ID: 20000328 Result: Down-regulated in Transcription
  misc_feature: MA Experiment 20000328 PARAMETER Experiment Name: At_42deg_Heat_Sub_P Parameter: Age (day) Value: 14
  misc_feature: MA Experiment 20000328 PARAMETER Experiment Name: At_42deg_Heat_Sub_P Parameter: Organism Value: A. thaliana
  misc_feature: MA Experiment 20000328 PARAMETER Experiment Name: At_42deg_Heat_Sub_P Parameter: Plant Line Value: WS
  misc_feature: MA Experiment 20000328 PARAMETER Experiment Name: At_42deg_Heat_Sub_P Parameter: Temperature (deg C) Value: 42 vs. 22
  misc_feature: MA Experiment 20000328 PARAMETER Experiment Name: At_42deg_Heat_Sub_P Parameter: Timepoint (hr) Value: 6
  misc_feature: MA Experiment 20000328 PARAMETER Experiment Name: At_42deg_Heat_Sub_P Parameter: Tissue Value: Aerial
ggtttttttttttttttttttggatccaagataatagtttcagatgcaacagatacaatgttgaaacagagacattgtataataataacacgatattacaggaaaacatacagagagaaagctggttttatttgaaaatgaatctattcgcttcctgcgatcttcttcttcaaggattcaatatcctcagccaattcctttctgcttgacttgaagagaaggtatctgtagacaaaccatccagtgtacccgagaccgacaagttccataactttcggaagcagaggaacagagttgatggcaccaacaacaatggaagataaccaaacagcaacaatggtctcctcctccatatataagtacagtagatttgttctcaagtaccatcccaacttttccttcaaatctgtgatgagttcgttggtatcaatggacgaggtctcttctgaagaagctcttgtcttcaacaattcaactttttgcaatccattccctgaaaacaagcttcaacggaacggtgaaagaggatcggccaaaggagcgaggaggaagataagggacggcggagcaacgggtggatacggcgggaacacgtggaaccatcacggccatagaggacgaagctgctactgatatcgccattgaagcacgccgagaacttcttcttcttcttctttgtctgcctacttcttctctctttctcatctaaaccaaaaaatggcagatcagctcaccgatgatcagatctctgagttcaaggaagcttttagccttttcgacaaagacggagatggttgcatcacaacgaaagagctaggaacagtgatgagatcattaggtcaaaatccaacagaagcagagttacaagatatgataaacgaagtagatgctgatggtaacggaaccatagacttccctgagtttctgaacctaatggctaggaagatgaaggacactgactctgaagaagagctcaaagaagctttcagggttttcgataaggaccagaacggtttcatctcggcagctgagttaagacatgtaatgacaaatcttggtgagaagttaactgatgaagaagttgatgagatgatcaaagaagctgatgttgatggagatggtcagatcaattatgaagagtttgtcaaagttatgatggcaaagtgaggaaactattctcatatcttttctctctttttctttctttctttttttgaattgaacaactctgattattgctttattctatgtttgactgttcattattatgcattcgtcccaaatttcatgttatgaactattttgtgactttgggttaaattatttgtttggaagtttttagtttattttatattatgtgaagtaccattgtaatggtcgttg

SEQ ID NO: 76600 - protein, 149 aa, Arabidopsis thaliana; identical to SEQ ID NO: 29417
  peptide (1)..(149): Ceres Seq. ID no. 7108561
  misc_feature (12)..(40): Pfam Name: EF hand Pfam Description: EF hand
  misc_feature (1)..(149): Homolog of NCBI NO: 15225840 NR Description: calmodulin; protein id: At2g27030.1, supported by gi_166650 [Arabidopsis thaliana] >gi|15226835|ref|NP_181644.1|
  misc_feature (1)..(149): Homolog of NCBI NO: 30683369 NR Description: calmodulin [Arabidopsis thaliana]
  misc_feature (1)..(149): Homolog of NCBI NO: 15229784 NR Description: calmodulin 7; protein id: At3g43810.1, supported cDNA: 7008., supported by cDNA: gi_5825597 [Arabidopsis thaliana]
  misc_feature (1)..(149): Homolog of NCBI NO: 34304715 NR Description: calmodulin 4 [Daucus carota]
  misc_feature (1)..(149): Homolog of NCBI NO: 3121848 NR Description: CALMODULIN >gi|1835521|gb|AAB46588.1| calmodulin annuum] >gi|7643792|gb|AAF65511.1| calmodulin [Capsicum annuum]
  misc_feature (1)..(149): Homolog of NCBI NO: 34903134 NR Description: unnamed protein product [Oryza sativa (japonica
  misc_feature (1)..(149): Homolog of NCBI NO: 115515 NR Description: Calmodulin >gi|71683|pir||MCAA calmodulin -
  misc_feature (1)..(149): Homolog of NCBI NO: 3121849 NR Description: CALMODULIN >gi|1773321|gb|AAB68399.1| calmodulin
  misc_feature (1)..(149): Homolog of NCBI NO: 30688187 NR Description: calmodulin-6 (CAM6) [Arabidopsis thaliana]
  misc_feature (1)..(149): Homolog of NCBI NO: 289525 NR Description: calmodulin

SEQ ID NO: 76601 - protein, 113 aa, Arabidopsis thaliana; identical to SEQ ID NO: 29418
  peptide (1)..(113): Ceres Seq. ID no. 7108562
  misc_feature (1)..(113): Homolog of NCBI NO: 15225840 NR Description: calmodulin; protein id: At2g27030.1, supported by gi_166650 [Arabidopsis thaliana] >gi|15226835|ref|NP_181644.1|
  misc_feature (1)..(113): Homolog of NCBI NO: 30683369 NR Description: calmodulin [Arabidopsis thaliana]
  misc_feature (1)..(113): Homolog of NCBI NO: 15229784 NR Description: calmodulin 7; protein id: At3g43810.1, supported cDNA: 7008., supported by cDNA: gi_5825597 [Arabidopsis thaliana]
  misc_feature (1)..(113): Homolog of NCBI NO: 34304715 NR Description: calmodulin 4 [Daucus carota]
  misc_feature (1)..(113): Homolog of NCBI NO: 3121848 NR Description: CALMODULIN >gi|1835521|gb|AAB46588.1| calmodulin annuum] >gi|7643792|gb|AAF65511.1| calmodulin [Capsicum annuum]
  misc_feature (1)..(113): Homolog of NCBI NO: 34903134 NR Description: unnamed protein product [Oryza sativa (japonica
  misc_feature (1)..(113): Homolog of NCBI NO: 115515 NR Description: Calmodulin >gi|71683|pir||MCAA calmodulin -
  misc_feature (1)..(113): Homolog of NCBI NO: 3121849 NR Description: CALMODULIN >gi|1773321|gb|AAB68399.1| calmodulin
  misc_feature (1)..(113): Homolog of NCBI NO: 30688187 NR Description: calmodulin-6 (CAM6) [Arabidopsis thaliana]
  misc_feature (1)..(113): Homolog of NCBI NO: 289525 NR Description: calmodulin

SEQ ID NO: 76602 - protein, 111 aa, Arabidopsis thaliana
  peptide (1)..(111): Ceres Seq. ID no. 7108563
  misc_feature (96)..(111): Homolog of NCBI NO: 34860268 NR Description: similar to Myl9 protein [Rattus norvegicus]
MAPTTMEDNQTATMVSSSIYKYSRFVLKYHPNFSFKSVMSSLVSMDEVSSEEALVFNNSTFCNPFPENKLQRNGERGSAKGARRKIRDGGATGGYGGNTWNHHGHRGRSCY

SEQ ID NO: 76603 - DNA, 1421 bp, Arabidopsis thaliana
  misc_feature (1)..(1421): Ceres Seq. ID no. 7108564
  misc_feature: MA Experiment ID: 108579 Result: Down-regulated in Transcription
  misc_feature: MA Experiment 108579 PARAMETER Experiment Name: At_4deg_Cold_cDNA_P Parameter: Temperature (deg C) Value: 4 vs. 22
  misc_feature: MA Experiment 108579 PARAMETER Experiment Name: At_4deg_Cold_cDNA_P Parameter: Timepoint (hr) Value: 6
  misc_feature: MA Experiment 108579 PARAMETER Experiment Name: At_4deg_Cold_cDNA_P Parameter: Tissue Value: Aerial
ccacgcgtccgctctcagttcctacgcgaagttttcaacagattcgccggagaatcttcgaatcaacggcggagaaatggctctatcacgcctctcatcacgatccaacatcatcactcgtcccttctccgccgccttcagccgattaatctcaacggacacaactccgatcacaatcgagacttcgcttcctttcacagctcacttatgtgatccaccgtcacgctccgtcgaatcatcgagtcaagagcttctcgatttcttcagaaccatggcgttgatgcgacgtatggaaatcgcagccgattcgctttacaaagcgaacgtaatccgagggttttgtcatctctacgacggccaagaagctgtagctataggcatggaagctgcgattacaaagaaagacgcgattattactgcttatcgtgatcactgtattttcttaggtcgtggtggttcgcttcatgaggttttctcagagcttatgggaagacaagctggttgttctaaagggaaaggtggatctatgcacttctataagaaggaatcgtcgttttacggtggtcatgggattgttggtgctcaggttccattaggttgtggtattgcttttgctcagaagtataacaaggaagaggctgtcacatttgctttgtatggtgatggtgctgcgaatcagggacagttgtttgaagctttgaatatttctgctctttgggatttgcctgcaattttggtctgcgagaacaatcactatggaatgggaactgctgaatggagagccgctaagagtccatcttactacaagcgtggtgattatgttcctggactcaaggtagatggtatggatgcatttgctgtcaaacaagcttgcaaatttgctaagcagcatgcgttggagaaggggccaataattcttgagatggacacatacaggtaccacggtcactccatgtctgatcctgggagcacataccgtacccgagatgagatatctggtgtgaggcaggaacgggatccaattgagagaataaagaagctggtactatctcatgacctagcaaccgagaaagagcttaaggatatggagaaggaaattagaaaagaagtagatgacgccattgccaaagctaaggattgcccaatgccagagccttctgagctctttaccaatgtgtatgtgaagggatttggcaccgagtcatttggacctgacagaaaagaagtcaaagcttcccttccatgatcatggagctcttgttcgttaaactgccacgtgtcatgagaaagttggctgatagagaaatctatgaatatgaataaagatctgattgtatactctctctctccccccccttctgaactttaatctctctgtatctttgtttacaaacataaggagaaacaatgttattcttgtg

SEQ ID NO: 76604 - protein, 414 aa, Arabidopsis thaliana
  peptide (1)..(414): Ceres Seq. ID no. 7108565
  misc_feature (89)..(386): Pfam Name: Dehydrogenase E1 component Pfam Description: Dehydrogenase E1 component
  misc_feature (26)..(414): Homolog of NCBI NO: 2117533 NR Description: pyruvate dehydrogenase (lipoamide) (EC 1.2.4.1)
  misc_feature (26)..(414): Homolog of NCBI NO: 15218940 NR Description: pyruvate dehydrogenase e1 alpha subunit, protein id: At1g59900.1, supported by cDNA: 37506., supported by
  misc_feature (26)..(414): Homolog of NCBI NO: 13430788 NR Description: putative pyruvate dehydrogenase e1 alpha subunit
  misc_feature (26)..(414): Homolog of NCBI NO: 1709449 NR Description: Pyruvate dehydrogenase E1 component alpha subunit,
  misc_feature (26)..(414): Homolog of NCBI NO: 15221692 NR Description: pyruvate dehydrogenase E1 alpha subunit; protein At1g24180.1, supported by cDNA: 41337., supported by cDNA: supported by cDNA: gi_15293168 [Arabidopsis thaliana]
  misc_feature (26)..(414): Homolog of NCBI NO: 23306664 NR Description: pyruvate dehydrogenase E1a-like subunit IAR4
  misc_feature (26)..(414): Homolog of NCBI NO: 1709453 NR Description: Pyruvate dehydrogenase E1 component alpha subunit,
  misc_feature (26)..(414): Homolog of NCBI NO: 12003246 NR Description: pyruvate dehydrogenase [Lycopersicon esculentum]
  misc_feature (28)..(414): Homolog of NCBI NO: 3851005 NR Description: pyruvate dehydrogenase E1 alpha subunit [Zea mays]
  misc_feature (28)..(414): Homolog of NCBI NO: 28465343 NR Description: pyruvate dehydrogenase E1alpha subunit [Beta
HASALSSYAKFSTDSPENLRINGGEMALSRLSSRSNIITRPFSAAFSRLISTDTTPITIETSLPFTAHLCDPPSRSVESSSQELLDFFRTMALMRRMEIAADSLYKANVIRGFCHLYDGQEAVAIGMEAAITKKDAIITAYRDHCIFLGRGGSLHEVFSELMGRQAGCSKGKGGSMHFYKKESSFYGGHGIVGAQVPLGCGIAFAQKYNKEEAVTFALYGDGAANQGQLFEALNISALWDLPAILVCENNHYGMGTAEWRAAKSPSYYKRGDYVPGLKVDGMDAFAVKQACKFAKQHALEKGPIILEMDTYRYHGHSMSDPGSTYRTRDEISGVRQERDPIERIKKLVLSHDLATEKELKDMEKEIRKEVDDAIAKAKDCPMPEPSELFTNVYVKGFGTESFGPDRKEVKASLP

SEQ ID NO: 76605 - protein, 389 aa, Arabidopsis thaliana
  peptide (1)..(389): Ceres Seq. ID no. 7108566
  misc_feature (64)..(361): Pfam Name: Dehydrogenase E1 component Pfam Description: Dehydrogenase E1 component
  misc_feature (1)..(389): Homolog of NCBI NO: 2117533 NR Description: pyruvate dehydrogenase (lipoamide) (EC 1.2.4.1)
  misc_feature (1)..(389): Homolog of NCBI NO: 15218940 NR Description: pyruvate dehydrogenase e1 alpha subunit, protein id: At1g59900.1, supported by cDNA: 37506., supported by
  misc_feature (1)..(389): Homolog of NCBI NO: 13430788 NR Description: putative pyruvate dehydrogenase e1 alpha subunit
  misc_feature (1)..(389): Homolog of NCBI NO: 1709449 NR Description: Pyruvate dehydrogenase E1 component alpha subunit,
  misc_feature (1)..(389): Homolog of NCBI NO: 15221692 NR Description: pyruvate dehydrogenase E1 alpha subunit; protein At1g24180.1, supported by cDNA: 41337., supported by cDNA: supported by cDNA: gi_15293168 [Arabidopsis thaliana]
  misc_feature (1)..(389): Homolog of NCBI NO: 23306664 NR Description: pyruvate dehydrogenase E1a-like subunit IAR4
  misc_feature (1)..(389): Homolog of NCBI NO: 1709453 NR Description: Pyruvate dehydrogenase E1 component alpha subunit,
  misc_feature (1)..(389): Homolog of NCBI NO: 12003246 NR Description: pyruvate dehydrogenase [Lycopersicon esculentum]
  misc_feature (3)..(389): Homolog of NCBI NO: 3851005 NR Description: pyruvate dehydrogenase E1 alpha subunit [Zea mays]
  misc_feature (3)..(389): Homolog of NCBI NO: 28465343 NR Description: pyruvate dehydrogenase E1alpha subunit [Beta
MALSRLSSRSNIITRPFSAAFSRLISTDTTPITIETSLPFTAHLCDPPSRSVESSSQELLDFFRTMALMRRMEIAADSLYKANVIRGFCHLYDGQEAVAIGMEAAITKKDAIITAYRDHCIFLGRGGSLHEVFSELMGRQAGCSKGKGGSMHFYKKESSFYGGHGIVGAQVPLGCGIAFAQKYNKEEAVTFALYGDGAANQGQLFEALNISALWDLPAILVCENNHYGMGTAEWRAAKSPSYYKRGDYVPGLKVDGMDAFAVKQACKFAKQHALEKGPIILEMDTYRYHGHSMSDPGSTYRTRDEISGVRQERDPIERIKKLVLSHDLATEKELKDMEKEIRKEVDDAIAKAKDCPMPEPSELFTNVYVKGFGTESFGPDRKEVKASLP

SEQ ID NO: 76606 - protein, 324 aa, Arabidopsis thaliana
  peptide (1)..(324): Ceres Seq. ID no. 7108567
  misc_feature (1)..(296): Pfam Name: Dehydrogenase E1 component Pfam Description: Dehydrogenase E1 component
  misc_feature (1)..(324): Homolog of NCBI NO: 2117533 NR Description: pyruvate dehydrogenase (lipoamide) (EC 1.2.4.1)
  misc_feature (1)..(324): Homolog of NCBI NO: 15218940 NR Description: pyruvate dehydrogenase e1 alpha subunit, protein id: At1g59900.1, supported by cDNA: 37506., supported by
  misc_feature (1)..(324): Homolog of NCBI NO: 13430788 NR Description: putative pyruvate dehydrogenase e1 alpha subunit
  misc_feature (1)..(324): Homolog of NCBI NO: 1709449 NR Description: Pyruvate dehydrogenase E1 component alpha subunit,
  misc_feature (1)..(324): Homolog of NCBI NO: 15221692 NR Description: pyruvate dehydrogenase E1 alpha subunit; protein At1g24180.1, supported by cDNA: 41337., supported by cDNA: supported by cDNA: gi_15293168 [Arabidopsis thaliana]
  misc_feature (1)..(324): Homolog of NCBI NO: 23306664 NR Description: pyruvate dehydrogenase E1a-like subunit IAR4
  misc_feature (1)..(324): Homolog of NCBI NO: 1709453 NR Description: Pyruvate dehydrogenase E1 component alpha subunit,
  misc_feature (1)..(324): Homolog of NCBI NO: 12003246 NR Description: pyruvate dehydrogenase [Lycopersicon esculentum]
  misc_feature (1)..(324): Homolog of NCBI NO: 3851005 NR Description: pyruvate dehydrogenase E1 alpha subunit [Zea mays]
  misc_feature (1)..(324): Homolog of NCBI NO: 28465343 NR Description: pyruvate dehydrogenase E1alpha subunit [Beta
MALMRRMEIAADSLYKANVIRGFCHLYDGQEAVAIGMEAAITKKDAIITAYRDHCIFLGRGGSLHEVFSELMGRQAGCSKGKGGSMHFYKKESSFYGGHGIVGAQVPLGCGIAFAQKYNKEEAVTFALYGDGAANQGQLFEALNISALWDLPAILVCENNHYGMGTAEWRAAKSPSYYKRGDYVPGLKVDGMDAFAVKQACKFAKQHALEKGPIILEMDTYRYHGHSMSDPGSTYRTRDEISGVRQERDPIERIKKLVLSHDLATEKELKDMEKEIRKEVDDAIAKAKDCPMPEPSELFTNVYVKGFGTESFGPDRKEVKASLP

SEQ ID NO: 76607 - DNA, 1955 bp, Arabidopsis thaliana
  misc_feature (1)..(1955): Ceres Seq. ID no. 7108584
  misc_feature: MA Experiment ID: 20000227 Result: Down-regulated in Transcription
  misc_feature: MA Experiment 20000227 PARAMETER Experiment Name: At_Root-Tips-vs-Tops_P Parameter: Tissue Value: Root Tips vs. Root Tops
  misc_feature: MA Experiment ID: 20000265 Result: Up-regulated in Transcription
  misc_feature: MA Experiment 20000265 PARAMETER Experiment Name: At_Open_Flower_P Parameter: Age (day) Value: 21
  misc_feature: MA Experiment 20000265 PARAMETER Experiment Name: At_Open_Flower_P Parameter: Plant Line Value: WS
  misc_feature: MA Experiment 20000265 PARAMETER Experiment Name: At_Open_Flower_P Parameter: Tissue Value: Closed Flower vs. Whole Plant
  misc_feature: MA Experiment ID: 20000437 Result: Down-regulated in Transcription
  misc_feature: MA Experiment 20000437 PARAMETER Experiment Name: At_Drought_P Parameter: Age (day) Value: 8
  misc_feature: MA Experiment 20000437 PARAMETER Experiment Name: At_Drought_P Parameter: Organism Value: A. thaliana
  misc_feature: MA Experiment 20000437 PARAMETER Experiment Name: At_Drought_P Parameter: Plant Line Value: WS
  misc_feature: MA Experiment 20000437 PARAMETER Experiment Name: At_Drought_P Parameter: Timepoint (hr) Value: 24
  misc_feature: MA Experiment 20000437 PARAMETER Experiment Name: At_Drought_P Parameter: Tissue Value: Whole Plant
  misc_feature: MA Experiment 20000437 PARAMETER Experiment Name: At_Drought_P Parameter: Treatment Value: Drought vs. No Drought
  misc_feature: MA Experiment ID: 20000495 Result: Up-regulated in Transcription
  misc_feature: MA Experiment 20000495 PARAMETER Experiment Name: At_Guard_Cells_P Parameter: Harvest Date Value: 8/2/2002
  misc_feature: MA Experiment 20000495 PARAMETER Experiment Name: At_Guard_Cells_P Parameter: Organism Value: A. thaliana
  misc_feature: MA Experiment 20000495 PARAMETER Experiment Name: At_Guard_Cells_P Parameter: Tissue Value: Guard Cells vs. Leaves
  misc_feature: MA Experiment ID: 20000496 Result: Up-regulated in Transcription
  misc_feature: MA Experiment 20000496 PARAMETER Experiment Name: At_Guard_Cells_P Parameter: Harvest Date Value: 7/19/2002
  misc_feature: MA Experiment 20000496 PARAMETER Experiment Name: At_Guard_Cells_P Parameter: Organism Value: Canola
  misc_feature: MA Experiment 20000496 PARAMETER Experiment Name: At_Guard_Cells_P Parameter: Tissue Value: Guard Cells vs. Leaves
  misc_feature: MA Experiment ID: 20000794 Result: Down-regulated in Transcription
  misc_feature: MA Experiment 20000794 PARAMETER Experiment Name: At_Petals_P Parameter: Age (day) Value: 23-25 days
  misc_feature: MA Experiment 20000794 PARAMETER Experiment Name: At_Petals_P Parameter: Plant Line Value: WS
  misc_feature: MA Experiment 20000794 PARAMETER Experiment Name: At_Petals_P Parameter: Tissue Value: Petals vs. Whole plant
  misc_feature: MA Experiment ID: 20001248 Result: Down-regulated in Transcription
  misc_feature: MA Experiment 20001248 PARAMETER Experiment Name: At_Far-red-induction_P Parameter: Age (day) Value: 7
  misc_feature: MA Experiment 20001248 PARAMETER Experiment Name: At_Far-red-induction_P Parameter: Light Value: Far-red vs. White
  misc_feature: MA Experiment 20001248 PARAMETER Experiment Name: At_Far-red-induction_P Parameter: Organism Value: A. thaliana
  misc_feature: MA Experiment 20001248 PARAMETER Experiment Name: At_Far-red-induction_P Parameter: Plant Line Value: Columbia
  misc_feature: MA Experiment 20001248 PARAMETER Experiment Name: At_Far-red-induction_P Parameter: Timepoint (hr) Value: 4
  misc_feature: MA Experiment 20001248 PARAMETER Experiment Name: At_Far-red-induction_P Parameter: Tissue Value: Whole Plant
  misc_feature: MA Experiment ID: 20001450 Result: Down-regulated in Transcription
  misc_feature: MA Experiment 20001450 PARAMETER Experiment Name: At_Far-red-induction_P Parameter: Age (day) Value: 7
  misc_feature: MA Experiment 20001450 PARAMETER Experiment Name: At_Far-red-induction_P Parameter: Light Value: Far-red vs. White
  misc_feature: MA Experiment 20001450 PARAMETER Experiment Name: At_Far-red-induction_P Parameter: Organism Value: A. thaliana
  misc_feature: MA Experiment 20001450 PARAMETER Experiment Name: At_Far-red-induction_P Parameter: Plant Line Value: Columbia
  misc_feature: MA Experiment 20001450 PARAMETER Experiment Name: At_Far-red-induction_P Parameter: Timepoint (hr) Value: 8
  misc_feature: MA Experiment 20001450 PARAMETER Experiment Name: At_Far-red-induction_P Parameter: Tissue Value: Whole Plant
  misc_feature: MA Experiment ID: 20001451 Result: Down-regulated in Transcription
  misc_feature: MA Experiment 20001451 PARAMETER Experiment Name: At_Far-red-induction_P Parameter: Age (day) Value: 7
  misc_feature: MA Experiment 20001451 PARAMETER Experiment Name: At_Far-red-induction_P Parameter: Light Value: Far-red vs. White
  misc_feature: MA Experiment 20001451 PARAMETER Experiment Name: At_Far-red-induction_P Parameter: Organism Value: A. thaliana
  misc_feature: MA Experiment 20001451 PARAMETER Experiment Name: At_Far-red-induction_P Parameter: Plant Line Value: Columbia
  misc_feature: MA Experiment 20001451 PARAMETER Experiment Name: At_Far-red-induction_P Parameter: Timepoint (hr) Value: 24
  misc_feature: MA Experiment 20001451 PARAMETER Experiment Name: At_Far-red-induction_P Parameter: Tissue Value: Whole Plant
  misc_feature: MA Experiment ID: 20001557 Result: Up-regulated in Transcription
  misc_feature: MA Experiment 20001557 PARAMETER Experiment Name: At_Drought_Soil_Dry_P Parameter: Age (day) Value: 27
  misc_feature: MA Experiment 20001557 PARAMETER Experiment Name: At_Drought_Soil_Dry_P Parameter: Organism Value: A. thaliana
  misc_feature: MA Experiment 20001557 PARAMETER Experiment Name: At_Drought_Soil_Dry_P Parameter: Plant Line Value: WS
  misc_feature: MA Experiment 20001557 PARAMETER Experiment Name: At_Drought_Soil_Dry_P Parameter: Post Timepoint (hr) Value: 3
  misc_feature: MA Experiment 20001557 PARAMETER Experiment Name: At_Drought_Soil_Dry_P Parameter: Post-Treatment Value: Re-Water vs. No Drought
  misc_feature: MA Experiment 20001557 PARAMETER Experiment Name: At_Drought_Soil_Dry_P Parameter: Timepoint (day) Value: 13
  misc_feature: MA Experiment 20001557 PARAMETER Experiment Name: At_Drought_Soil_Dry_P Parameter: Treatment Value: Drought vs. No Drought
  misc_feature: MA Experiment ID: 20001757 Result: Up-regulated in Transcription
  misc_feature: MA Experiment 20001757 PARAMETER Experiment Name: At_50mM_NH4NO3_L-to-H_P Parameter: Timepoint (hr) Value: 6
  misc_feature: MA Experiment 20001757 PARAMETER Experiment Name: At_50mM_NH4NO3_L-to-H_P Parameter: Tissue Value: Leaf
  misc_feature: MA Experiment 20001757 PARAMETER Experiment Name: At_50mM_NH4NO3_L-to-H_P Parameter: Treatment Value: 50mM NH4NO3 vs 100mM Mannitol
  misc_feature: MA Experiment ID: 20001911 Result: Down-regulated in Transcription
  misc_feature: MA Experiment 20001911 PARAMETER Experiment Name: At_Drought_Reproduction_P Parameter: Age (day) Value: 40
  misc_feature: MA Experiment 20001911 PARAMETER Experiment Name: At_Drought_Reproduction_P Parameter: Organism Value: A. thaliana
  misc_feature: MA Experiment 20001911 PARAMETER Experiment Name: At_Drought_Reproduction_P Parameter: Plant Line Value: WS
  misc_feature: MA Experiment 20001911 PARAMETER Experiment Name: At_Drought_Reproduction_P Parameter: Timepoint (day) Value: 10
  misc_feature: MA Experiment 20001911 PARAMETER Experiment Name: At_Drought_Reproduction_P Parameter: Tissue Value: Flowers
  misc_feature: MA Experiment 20001911 PARAMETER Experiment Name: At_Drought_Reproduction_P Parameter: Treatment Value: Drought vs. No Drought
agtgtgagtaatttagaaagagagagtgaagatacattatagaaagaagagaagcagaaaccaaaaaaagaaaccatgaagtctttttgtgataatgatgataataatcatagcaacacgactaatttgttagggttctcattgtcttcaaatatgatgaaaatgggaggtagaggaggtagagaagctatttactcatcttcaacttgttcagctgcaacttcttcttcttctgttccacctcaacttgttgttggtgacaacactagcaactttggtgtttgctatggatctaacccaaatggaggaatctattctcacatgtctgtgatgccactcagatctgatggttctctttgcttaatggaagctctcaacagatcttctcactcgaatcaccatcaagattcatctccaaaggtggaggatttctttgggacccatcacaacaacacaagtcacaaagaagccatggatcttagcttagatagtttattctacaacaccactcatgagcccaacacgactacaaactttcaagagttctttagcttccctcaaaccagaaaccatgaggaagaaactagaaattacgggaatgaccctagtttgacacatggagggtcttttaatgtaggggtatatggggaatttcaacagtcactgagcttatccatgagccctgggtcacaatctagctgcatcactggctctcaccaccaccaacaaaaccaaaaccaaaaccaccaaagccaaaaccaccagcagatctctgaagctcttgtggagacaagcgttgggtttgagacgacgacaatggcggctgcgaagaagaagaggggacaagaggatgttgtagttgttggtcagaaacagattgttcatagaaaatctatcgatacttttggacaacgaacttctcaataccgaggcgttacaagacatagatggactggtagatatgaagctcatctatgggacaatagtttcaagaaggaaggtcacagtagaaaaggaagacaagtttatctgggaggttatgatatggaggagaaagctgctcgagcatatgatcttgctgcactcaagtactggggtccctctactcacaccaatttctctgcggagaattatcagaaagagattgaagacatgaagaacatgactagacaagaatatgttgcacatttgagaaggaagagcagtggtttctctaggggtgcttccatctatagaggagtcacaagacatcaccagcatggaaggtggcaagcacggattggtagagtcgctggaaacaaagatctctaccttggaacttttggaacccaagaagaagctgcagaagcttacgatgtagcagcaattaagttccgtggcacaaatgctgtgactaactttgatatcacgaggtacgatgttgatcgtatcatgtctagtaacacactcttgtctggagagttagcgcgaaggaacaacaacagcattgtcgtcaggaatactgaagaccaaaccgctctaaatgctgttgtggaaggtggttccaacaaagaagtcagtactcccgagagactcttgagttttccggcgattttcgcgttgcctcaagttaatcaaaagatgttcggatcaaatatgggcggaaatatgagtccttggacatcaaaccctaatgctgagcttaagaccgtcgctcttactttgcctcagatgccggttttcgctgcttgggctgattcttgatcaacttcaatgactaactctggttttcttggtttagttgctaagtgttttggtttatctccggttttatccggtttgaactacaattcggtttagtttcgtcggtataaatagtatttgcttaggagcggtatatgtttcttttgagtagtattcatgtgaaacagaatgaatctctctataacatattattttaatgaatctcctttgct

SEQ ID NO: 76608 - protein, 555 aa, Arabidopsis thaliana
  peptide (1)..(555): Ceres Seq. ID no. 7108585
  misc_feature (281)..(354): Pfam Name: AP2 domain Pfam Description: AP2 domain
  misc_feature (1)..(555): Homolog of NCBI NO: 1171429 NR Description: CKC
  misc_feature (1)..(555): Homolog of NCBI NO: 15235690 NR Description: ovule development protein aintegumenta (ANT); id: At4g37750.1, supported by cDNA: gi_1171428, supported by gi_1209098, supported by cDNA: gi_1244707, supported by cDNA:
  misc_feature (6)..(491): Homolog of NCBI NO: 38492172 NR Description: ANT-like protein [Nicotiana tabacum]
  misc_feature (226)..(500): Homolog of NCBI NO: 28201307 NR Description: putative ovule development protein antitegumenta
  misc_feature (480)..(555): Homolog of NCBI NO: 28201307 NR Description: putative ovule development protein antitegumenta
  misc_feature (78)..(142): Homolog of NCBI NO: 28201307 NR Description: putative ovule development protein antitegumenta
  misc_feature (179)..(251): Homolog of NCBI NO: 28201307 NR Description: putative ovule development protein antitegumenta
  misc_feature (41)..(466): Homolog of NCBI NO: 20330778 NR Description: Putative ovule development protein antitegumenta
  misc_feature (107)..(470): Homolog of NCBI NO: 15218529 NR Description: ovule development protein, putative; protein id: [Arabidopsis thaliana] >gi|25406191|pir||B96750 hypothetical
  misc_feature (223)..(526): Homolog of NCBI NO: 21069057 NR Description: BABY BOOM [Arabidopsis thaliana]
MKSFCDNDDNNHSNTTNLLGFSLSSNMMKMGGRGGREAIYSSSTCSAATSSSSVPPQLVVGDNTSNFGVCYGSNPNGGIYSHMSVMPLRSDGSLCLMEALNRSSHSNHHQDSSPKVEDFFGTHHNNTSHKEAMDLSLDSLFYNTTHEPNTTTNFQEFFSFPQTRNHEEETRNYGNDPSLTHGGSFNVGVYGEFQQSLSLSMSPGSQSSCITGSHHHQQNQNQNHQSQNHQQISEALVETSVGFETTTMAAAKKKRGQEDVVVVGQKQIVHRKSIDTFGQRTSQYRGVTRHRWTGRYEAHLWDNSFKKEGHSRKGRQVYLGGYDMEEKAARAYDLAALKYWGPSTHTNFSAENYQKEIEDMKNMTRQEYVAHLRRKSSGFSRGASIYRGVTRHHQHGRWQARIGRVAGNKDLYLGTFGTQEEAAEAYDVAAIKFRGTNAVTNFDITRYDVDRIMSSNTLLSGELARRNNNSIVVRNTEDQTALNAVVEGGSNKEVSTPERLLSFPAIFALPQVNQKMFGSNMGGNMSPWTSNPNAELKTVALTLPQMPVFAAWADS

SEQ ID NO: 76609 - protein, 529 aa, Arabidopsis thaliana
  peptide (1)..(529): Ceres Seq. ID no. 7108586
  misc_feature (255)..(328): Pfam Name: AP2 domain Pfam Description: AP2 domain
  misc_feature (1)..(529): Homolog of NCBI NO: 1171429 NR Description: CKC
  misc_feature (1)..(529): Homolog of NCBI NO: 15235690 NR Description: ovule development protein aintegumenta (ANT); id: At4g37750.1, supported by cDNA: gi_1171428, supported by gi_1209098, supported by cDNA: gi_1244707, supported by cDNA:
  misc_feature (1)..(465): Homolog of NCBI NO: 38492172 NR Description: ANT-like protein [Nicotiana tabacum]
  misc_feature (200)..(474): Homolog of NCBI NO: 28201307 NR Description: putative ovule development protein antitegumenta
  misc_feature (454)..(529): Homolog of NCBI NO: 28201307 NR Description: putative ovule development protein antitegumenta
  misc_feature (52)..(116): Homolog of NCBI NO: 28201307 NR Description: putative ovule development protein antitegumenta
  misc_feature (153)..(225): Homolog of NCBI NO: 28201307 NR Description: putative ovule development protein antitegumenta
  misc_feature (15)..(440): Homolog of NCBI NO: 20330778 NR Description: Putative ovule development protein antitegumenta
  misc_feature (81)..(444): Homolog of NCBI NO: 15218529 NR Description: ovule development protein, putative; protein id: [Arabidopsis thaliana] >gi|25406191|pir||B96750 hypothetical
  misc_feature (197)..(500): Homolog of NCBI NO: 21069057 NR Description: BABY BOOM [Arabidopsis thaliana]
MMKMGGRGGREAIYSSSTCSAATSSSSVPPQLVVGDNTSNFGVCYGSNPNGGIYSHMSVMPLRSDGSLCLMEALNRSSHSNHHQDSSPKVEDFFGTHHNNTSHKEAMDLSLDSLFYNTTHEPNTTTNFQEFFSFPQTRNHEEETRNYGNDPSLTHGGSFNVGVYGEFQQSLSLSMSPGSQSSCITGSHHHQQNQNQNHQSQNHQQISEALVETSVGFETTTMAAAKKKRGQEDVVVVGQKQIVHRKSIDTFGQRTSQYRGVTRHRWTGRYEAHLWDNSFKKEGHSRKGRQVYLGGYDMEEKAARAYDLAALKYWGPSTHTNFSAENYQKEIEDMKNMTRQEYVAHLRRKSSGFSRGASIYRGVTRHHQHGRWQARIGRVAGNKDLYLGTFGTQEEAAEAYDVAAIKFRGTNAVTNFDITRYDVDRIMSSNTLLSGELARRNNNSIVVRNTEDQTALNAVVEGGSNKEVSTPERLLSFPAIFALPQVNQKMFGSNMGGNMSPWTSNPNAELKTVALTLPQMPVFAAWADS

SEQ ID NO: 76610 - protein, 528 aa, Arabidopsis thaliana
  peptide (1)..(528): Ceres Seq. ID no. 7108587
  misc_feature (254)..(327): Pfam Name: AP2 domain Pfam Description: AP2 domain
  misc_feature (1)..(528): Homolog of NCBI NO: 1171429 NR Description: CKC
  misc_feature (1)..(528): Homolog of NCBI NO: 15235690 NR Description: ovule development protein aintegumenta (ANT); id: At4g37750.1, supported by cDNA: gi_1171428, supported by gi_1209098, supported by cDNA: gi_1244707, supported by cDNA:
  misc_feature (1)..(464): Homolog of NCBI NO: 38492172 NR Description: ANT-like protein [Nicotiana tabacum]
  misc_feature (199)..(473): Homolog of NCBI NO: 28201307 NR Description: putative ovule development protein antitegumenta
  misc_feature (453)..(528): Homolog of NCBI NO: 28201307 NR Description: putative ovule development protein antitegumenta
  misc_feature (51)..(115): Homolog of NCBI NO: 28201307 NR Description: putative ovule development protein antitegumenta
  misc_feature (152)..(224): Homolog of NCBI NO: 28201307 NR Description: putative ovule development protein antitegumenta
  misc_feature (14)..(439): Homolog of NCBI NO: 20330778 NR Description: Putative ovule development protein antitegumenta
  misc_feature (80)..(443): Homolog of NCBI NO: 15218529 NR Description: ovule development protein, putative; protein id: [Arabidopsis thaliana] >gi|25406191|pir||B96750 hypothetical
  misc_feature (196)..(499): Homolog of NCBI NO: 21069057 NR Description: BABY BOOM [Arabidopsis thaliana]
MKMGGRGGREAIYSSSTCSAATSSSSVPPQLVVGDNTSNFGVCYGSNPNGGIYSHMSVMPLRSDGSLCLMEALNRSSHSNHHQDSSPKVEDFFGTHHNNTSHKEAMDLSLDSLFYNTTHEPNTTTNFQEFFSFPQTRNHEEETRNYGNDPSLTHGGSFNVGVYGEFQQSLSLSMSPGSQSSCITGSHHHQQNQNQNHQSQNHQQISEALVETSVGFETTTMAAAKKKRGQEDVVVVGQKQIVHRKSIDTFGQRTSQYRGVTRHRWTGRYEAHLWDNSFKKEGHSRKGRQVYLGGYDMEEKAARAYDLAALKYWGPSTHTNFSAENYQKEIEDMKNMTRQEYVAHLRRKSSGFSRGASIYRGVTRHHQHGRWQARIGRVAGNKDLYLGTFGTQEEAAEAYDVAAIKFRGTNAVTNFDITRYDVDRIMSSNTLLSGELARRNNNSIVVRNTEDQTALNAVVEGGSNKEVSTPERLLSFPAIFALPQVNQKMFGSNMGGNMSPWTSNPNAELKTVALTLPQMPVFAAWADS

SEQ ID NO: 76611 - DNA, 913 bp, Arabidopsis thaliana
  misc_feature (1)..(913): Ceres Seq. ID no. 7108596
  misc_feature: MA Experiment ID: 108435 Result: Down-regulated in Transcription
  misc_feature: MA Experiment 108435 PARAMETER Experiment Name: At_stm_Mutants_cDNA_P Parameter: Plant Line Value: wt Landsburg vs stm
  misc_feature: MA Experiment 108435 PARAMETER Experiment Name: At_stm_Mutants_cDNA_P Parameter: Tissue Value: Shoot Apical Meristem Region
  misc_feature: MA Experiment ID: 108461 Result: Up-regulated in Transcription
  misc_feature: MA Experiment 108461 PARAMETER Experiment Name: At_Germinating_Seeds_cDNA_P Parameter: Age (day) Value: 1 vs. 0
  misc_feature: MA Experiment 108461 PARAMETER Experiment Name: At_Germinating_Seeds_cDNA_P Parameter: Tissue Value: Germinating Seeds
  misc_feature: MA Experiment ID: 108462 Result: Up-regulated in Transcription
  misc_feature: MA Experiment 108462 PARAMETER Experiment Name: At_Germinating_Seeds_cDNA_P Parameter: Age (day) Value: 2 vs. 0
  misc_feature: MA Experiment 108462 PARAMETER Experiment Name: At_Germinating_Seeds_cDNA_P Parameter: Tissue Value: Germinating Seeds
  misc_feature: MA Experiment ID: 108463 Result: Up-regulated in Transcription
  misc_feature: MA Experiment 108463 PARAMETER Experiment Name: At_Germinating_Seeds_cDNA_P Parameter: Age (day) Value: 3 vs. 0
  misc_feature: MA Experiment 108463 PARAMETER Experiment Name: At_Germinating_Seeds_cDNA_P Parameter: Tissue Value: Germinating Seeds
  misc_feature: MA Experiment ID: 108464 Result: Up-regulated in Transcription
  misc_feature: MA Experiment 108464 PARAMETER Experiment Name: At_Germinating_Seeds_cDNA_P Parameter: Age (day) Value: 4 vs. 0
  misc_feature: MA Experiment 108464 PARAMETER Experiment Name: At_Germinating_Seeds_cDNA_P Parameter: Tissue Value: Germinating Seeds
  misc_feature: MA Experiment ID: 108488 Result: Up-regulated in Transcription
  misc_feature: MA Experiment ID: 108489 Result: Down-regulated in Transcription
  misc_feature: MA Experiment ID: 108595 Result: Down-regulated in Transcription
  misc_feature: MA Experiment 108595 PARAMETER Experiment Name: At_Ler-pi_Ovule_cDNA_P Parameter: Plant Line Value: null
  misc_feature: MA Experiment ID: 20000087 Result: Down-regulated in Transcription
  misc_feature: MA Experiment 20000087 PARAMETER Experiment Name: At_100uM_ABA_Mutants_cDNA_P Parameter: Plant Line Value: WS
  misc_feature: MA Experiment 20000087 PARAMETER Experiment Name: At_100uM_ABA_Mutants_cDNA_P Parameter: Timepoint (hr) Value: 6
  misc_feature: MA Experiment 20000087 PARAMETER Experiment Name: At_100uM_ABA_Mutants_cDNA_P Parameter: Tissue Value: Aerial
  misc_feature: MA Experiment 20000087 PARAMETER Experiment Name: At_100uM_ABA_Mutants_cDNA_P Parameter: Treatment Value: 100uM ABA vs. No Treatment
  misc_feature: MA Experiment ID: 20000180 Result: Up-regulated in Transcription
  misc_feature: MA Experiment 20000180 PARAMETER Experiment Name: At_Germinating_Seeds_P Parameter: Age (hr) Value: 24 vs. 0
  misc_feature: MA Experiment 20000180 PARAMETER Experiment Name: At_Germinating_Seeds_P Parameter: Tissue Value: Germinating Seeds
  misc_feature: MA Experiment ID: 20000185 Result: Down-regulated in Transcription
  misc_feature: MA Experiment 20000185 PARAMETER Experiment Name: At_Roots__P Parameter: Age (day) Value: 7 vs. 21
  misc_feature: MA Experiment 20000185 PARAMETER Experiment Name: At_Roots__P Parameter: Organism Value: A. thaliana
  misc_feature: MA Experiment 20000185 PARAMETER Experiment Name: At_Roots__P Parameter: Tissue Value: Roots vs. Whole Plant
  misc_feature: MA Experiment ID: 20000227 Result: Down-regulated in Transcription
  misc_feature: MA Experiment 20000227 PARAMETER Experiment Name: At_Root-Tips-vs-Tops_P Parameter: Tissue Value: Root Tips vs. Root Tops
  misc_feature: MA Experiment ID: 20000234 Result: Down-regulated in Transcription
  misc_feature: MA Experiment 20000234 PARAMETER Experiment Name: At_Siliques_P Parameter: Age (day) Value: 21
  misc_feature: MA Experiment 20000234 PARAMETER Experiment Name: At_Siliques_P Parameter: Organism Value: A. thaliana
  misc_feature: MA Experiment 20000234 PARAMETER Experiment Name: At_Siliques_P Parameter: Plant Line Value: WS
  misc_feature: MA Experiment 20000234 PARAMETER Experiment Name: At_Siliques_P Parameter: Tissue Value: Less Than 5mm Siliques vs. Whole Plant
  misc_feature: MA Experiment ID: 20000264 Result: Down-regulated in Transcription
  misc_feature: MA Experiment 20000264 PARAMETER Experiment Name: At_Open_Flower_P Parameter: Age (day) Value: 21
  misc_feature: MA Experiment 20000264 PARAMETER Experiment Name: At_Open_Flower_P Parameter: Plant Line Value: WS
  misc_feature: MA Experiment 20000264 PARAMETER Experiment Name: At_Open_Flower_P Parameter: Tissue Value: Open Flower vs. Whole Plant
  misc_feature: MA Experiment ID: 20000265 Result: Down-regulated in Transcription
  misc_feature: MA Experiment 20000265 PARAMETER Experiment Name: At_Open_Flower_P Parameter: Age (day) Value: 21
  misc_feature: MA Experiment 20000265 PARAMETER Experiment Name: At_Open_Flower_P Parameter: Plant Line Value: WS
  misc_feature: MA Experiment 20000265 PARAMETER Experiment Name: At_Open_Flower_P Parameter: Tissue Value: Closed Flower vs. Whole Plant
  misc_feature: MA Experiment ID: 20000286 Result: Down-regulated in Transcription
  misc_feature: MA Experiment 20000286 PARAMETER Experiment Name: At_Open_Flower_P Parameter: Age (day) Value: 21
  misc_feature: MA Experiment 20000286 PARAMETER Experiment Name: At_Open_Flower_P Parameter: Plant Line Value: WS
  misc_feature: MA Experiment 20000286 PARAMETER Experiment Name: At_Open_Flower_P Parameter: Tissue Value: Half Open vs. Whole Plant
  misc_feature: MA Experiment ID: 20000439 Result: Down-regulated in Transcription
  misc_feature: MA Experiment 20000439 PARAMETER Experiment Name: At_Roots__P Parameter: Age (day) Value: 14 vs. 21
  misc_feature: MA Experiment 20000439 PARAMETER Experiment Name: At_Roots__P Parameter: Organism Value: A. thaliana
  misc_feature: MA Experiment 20000439 PARAMETER Experiment Name: At_Roots__P Parameter: Tissue Value: Roots vs. Whole Plant
  misc_feature: MA Experiment ID: 20000441 Result: Up-regulated in Transcription
  misc_feature: MA Experiment 20000441 PARAMETER Experiment Name: At_1uM_BR-BRZ__P Parameter: Tissue Value: Shoot Apices
  misc_feature: MA Experiment 20000441 PARAMETER Experiment Name: At_1uM_BR-BRZ__P Parameter: Treatment Value: 1uM BR vs. No Treatment
  misc_feature: MA Experiment ID: 20000443 Result: Up-regulated in Transcription
  misc_feature: MA Experiment 20000443 PARAMETER Experiment Name: At_1uM_BR-BRZ__P Parameter: Tissue Value: Shoot Apices
  misc_feature: MA Experiment 20000443 PARAMETER Experiment Name: At_1uM_BR-BRZ__P Parameter: Treatment Value: 1uM BRZ vs. No Treatment
  misc_feature: MA Experiment ID: 20000496 Result: Down-regulated in Transcription
  misc_feature: MA Experiment 20000496 PARAMETER Experiment Name: At_Guard_Cells_P Parameter: Harvest Date Value: 7/19/2002
  misc_feature: MA Experiment 20000496 PARAMETER Experiment Name: At_Guard_Cells_P Parameter: Organism Value: Canola
  misc_feature: MA Experiment 20000496 PARAMETER Experiment Name: At_Guard_Cells_P Parameter: Tissue Value: Guard Cells vs. Leaves
  misc_feature: MA Experiment ID: 20000794 Result: Down-regulated in Transcription
  misc_feature: MA Experiment 20000794 PARAMETER Experiment Name: At_Petals_P Parameter: Age (day) Value: 23-25 days
  misc_feature: MA Experiment 20000794 PARAMETER Experiment Name: At_Petals_P Parameter: Plant Line Value: WS
  misc_feature: MA Experiment 20000794 PARAMETER Experiment Name: At_Petals_P Parameter: Tissue Value: Petals vs. Whole plant
  misc_feature: MA Experiment ID: 20001451 Result: Down-regulated in Transcription
  misc_feature: MA Experiment 20001451 PARAMETER Experiment Name: At_Far-red-induction_P Parameter: Age (day) Value: 7
  misc_feature: MA Experiment 20001451 PARAMETER Experiment Name: At_Far-red-induction_P Parameter: Light Value: Far-red vs. White
  misc_feature: MA Experiment 20001451 PARAMETER Experiment Name: At_Far-red-induction_P Parameter: Organism Value: A. thaliana
  misc_feature: MA Experiment 20001451 PARAMETER Experiment Name: At_Far-red-induction_P Parameter: Plant Line Value: Columbia
  misc_feature: MA Experiment 20001451 PARAMETER Experiment Name: At_Far-red-induction_P Parameter: Timepoint (hr) Value: 24
  misc_feature: MA Experiment 20001451 PARAMETER Experiment Name: At_Far-red-induction_P Parameter: Tissue Value: Whole Plant
  misc_feature: MA Experiment ID: 20001557 Result: Down-regulated in Transcription
  misc_feature: MA Experiment 20001557 PARAMETER Experiment Name: At_Drought_Soil_Dry_P Parameter: Age (day) Value: 27
  misc_feature: MA Experiment 20001557 PARAMETER Experiment Name: At_Drought_Soil_Dry_P Parameter: Organism Value: A. thaliana
  misc_feature: MA Experiment 20001557 PARAMETER Experiment Name: At_Drought_Soil_Dry_P Parameter: Plant Line Value: WS
  misc_feature: MA Experiment 20001557 PARAMETER Experiment Name: At_Drought_Soil_Dry_P Parameter: Post Timepoint (hr) Value: 3
  misc_feature: MA Experiment 20001557 PARAMETER Experiment Name: At_Drought_Soil_Dry_P Parameter: Post-Treatment Value: Re-Water vs. No Drought
  misc_feature: MA Experiment 20001557 PARAMETER Experiment Name: At_Drought_Soil_Dry_P Parameter: Timepoint (day) Value: 13
  misc_feature: MA Experiment 20001557 PARAMETER Experiment Name: At_Drought_Soil_Dry_P Parameter: Treatment Value: Drought vs. No Drought
  misc_feature: MA Experiment ID: 20001558 Result: Down-regulated in Transcription
  misc_feature: MA Experiment 20001558 PARAMETER Experiment Name: At_Drought_Soil_Dry_P Parameter: Age (day) Value: 27
  misc_feature: MA Experiment 20001558 PARAMETER Experiment Name: At_Drought_Soil_Dry_P Parameter: Organism Value: A. thaliana
  misc_feature: MA Experiment 20001558 PARAMETER Experiment Name: At_Drought_Soil_Dry_P Parameter: Plant Line Value: WS
  misc_feature: MA Experiment 20001558 PARAMETER Experiment Name: At_Drought_Soil_Dry_P Parameter: Post Timepoint (hr) Value: 6
  misc_feature: MA Experiment 20001558 PARAMETER Experiment Name: At_Drought_Soil_Dry_P Parameter: Post-Treatment Value: Re-Water vs. No Drought
  misc_feature: MA Experiment 20001558 PARAMETER Experiment Name: At_Drought_Soil_Dry_P Parameter: Timepoint (day) Value: 13
  misc_feature: MA Experiment 20001558 PARAMETER Experiment Name: At_Drought_Soil_Dry_P Parameter: Treatment Value: Drought vs. No Drought
  misc_feature: MA Experiment ID: 20001757 Result: Up-regulated in Transcription
  misc_feature: MA Experiment 20001757 PARAMETER Experiment Name: At_50mM_NH4NO3_L-to-H_P Parameter: Timepoint (hr) Value: 6
  misc_feature: MA Experiment 20001757 PARAMETER Experiment Name: At_50mM_NH4NO3_L-to-H_P Parameter: Tissue Value: Leaf
  misc_feature: MA Experiment 20001757 PARAMETER Experiment Name: At_50mM_NH4NO3_L-to-H_P Parameter: Treatment Value: 50mM NH4NO3 vs 100mM Mannitol
  misc_feature: MA Experiment ID: 20001904 Result: Down-regulated in Transcription
  misc_feature: MA Experiment 20001904 PARAMETER Experiment Name: At_Drought_Reproduction_P Parameter: Age (day) Value: 37
  misc_feature: MA Experiment 20001904 PARAMETER Experiment Name: At_Drought_Reproduction_P Parameter: Organism Value: A. thaliana
  misc_feature: MA Experiment 20001904 PARAMETER Experiment Name: At_Drought_Reproduction_P Parameter: Plant Line Value: WS
  misc_feature: MA Experiment 20001904 PARAMETER Experiment Name: At_Drought_Reproduction_P Parameter: Timepoint (day) Value: 7
  misc_feature: MA Experiment 20001904 PARAMETER Experiment Name: At_Drought_Reproduction_P Parameter: Tissue Value: Rosettes
  misc_feature: MA Experiment 20001904 PARAMETER Experiment Name: At_Drought_Reproduction_P Parameter: Treatment Value: Drought vs. No Drought
  misc_feature: MA Experiment ID: 20001905 Result: Down-regulated in Transcription
  misc_feature: MA Experiment 20001905 PARAMETER Experiment Name: At_Drought_Reproduction_P Parameter: Age (day) Value: 40
  misc_feature: MA Experiment 20001905 PARAMETER Experiment Name: At_Drought_Reproduction_P Parameter: Organism Value: A. thaliana
  misc_feature: MA Experiment 20001905 PARAMETER Experiment Name: At_Drought_Reproduction_P Parameter: Plant Line Value: WS
  misc_feature: MA Experiment 20001905 PARAMETER Experiment Name: At_Drought_Reproduction_P Parameter: Timepoint (day) Value: 10
  misc_feature: MA Experiment 20001905 PARAMETER Experiment Name: At_Drought_Reproduction_P Parameter: Tissue Value: Rosettes
  misc_feature: MA Experiment 20001905 PARAMETER Experiment Name: At_Drought_Reproduction_P Parameter: Treatment Value: Drought vs. No Drought
  misc_feature: MA Experiment ID: 20001906 Result: Down-regulated in Transcription
  misc_feature: MA Experiment 20001906 PARAMETER Experiment Name: At_Drought_Reproduction_P Parameter: Age (day) Value: 35
  misc_feature: MA Experiment 20001906 PARAMETER Experiment Name: At_Drought_Reproduction_P Parameter: Organism Value: A. thaliana
  misc_feature: MA Experiment 20001906 PARAMETER Experiment Name: At_Drought_Reproduction_P Parameter: Plant Line Value: WS
  misc_feature: MA Experiment 20001906 PARAMETER Experiment Name: At_Drought_Reproduction_P Parameter: Timepoint (day) Value: 5
  misc_feature: MA Experiment 20001906 PARAMETER Experiment Name: At_Drought_Reproduction_P Parameter: Tissue Value: Siliques
  misc_feature: MA Experiment 20001906 PARAMETER Experiment Name: At_Drought_Reproduction_P Parameter: Treatment Value: Drought vs. No Drought
  misc_feature: MA Experiment ID: 20001908 Result: Down-regulated in Transcription
  misc_feature: MA Experiment 20001908 PARAMETER Experiment Name: At_Drought_Reproduction_P Parameter: Age (day) Value: 40
  misc_feature: MA Experiment 20001908 PARAMETER Experiment Name: At_Drought_Reproduction_P Parameter: Organism Value: A. thaliana
  misc_feature: MA Experiment 20001908 PARAMETER Experiment Name: At_Drought_Reproduction_P Parameter: Plant Line Value: WS
  misc_feature: MA Experiment 20001908 PARAMETER Experiment Name: At_Drought_Reproduction_P Parameter: Timepoint (day) Value: 10
  misc_feature: MA Experiment 20001908 PARAMETER Experiment Name: At_Drought_Reproduction_P Parameter: Tissue Value: Siliques
  misc_feature: MA Experiment 20001908 PARAMETER Experiment Name: At_Drought_Reproduction_P Parameter: Treatment Value: Drought vs. No Drought
cctgcgccggcgttccagccgagcgggcaagaaacaatgccaccaaacacctctcgtccacatctttctcctttggtggcaaacacaacgacagatagagagaaacgatggcgtcgaactcgcttatgagctgtggcatagccgccgtgtacccttcgcttctctcttcttccaagtctaaattcgtatccgccggagttccactcccaaacgccgggaatgttggtcgtatcagaatggctgctcactggatgcctggcgagccacgaccagcttaccttgacggttctgctcctggtgactttgggtttgacccacttggacttggagaagttccagcgaaccttgagagatacaaagagtcagagctcatccactgtagatgggctatgctcgctgttcctgggattttggtaccagaagcattaggatatggaaactgggttaaggctcaggaatgggcagcactaccagggggtcaagccacttacttgggaaacccagtcccgtggggtactttgcccacaatcttggccattgagttcttagccattgcatttgttgagcaccagagaagtatggagaaagaccctgagaagaagaagtacccgggaggcgcatttgaccctcttggatactcgaaggaccccaagaagctcgaggaattgaaagttaaagagatcaagaacgggcggcttgcgctgttggcgtttgtaggattctgtgtgcaacagtcggcttacccggggacaggaccattggagaacttggcaactcacttggcggatccatggcacaacaacattggcgatattgttatccctttcaactaatgaatgtaaaaatagaaatatgtgtaccttatgagctttatgtgtatcaaaaacactgtgtaatgaaagacagatttgtg

SEQ ID NO: 76612 - protein, 241 aa, Arabidopsis thaliana; identical to SEQ ID NO: 35134
  peptide (1)..(241): Ceres Seq. ID no. 7108597
  misc_feature (53)..(210): Pfam Name: Chlorophyll A-B binding protein Pfam Description: Chlorophyll A-B binding protein
  misc_feature (1)..(241): Homolog of NCBI NO: 15233115 NR Description: light-harvesting chlorophyll a/b binding protein; id: At3g54890.1, supported by cDNA: gi_12642855, supported by
  misc_feature (1)..(241): Homolog of NCBI NO: 13265501 NR Description: AT3g54890 [Arabidopsis thaliana]
  misc_feature (1)..(238): Homolog of NCBI NO: 625547 NR Description: chlorophyll a/b-binding protein type I - common
  misc_feature (1)..(239): Homolog of NCBI NO: 82078 NR Description: chlorophyll a/b-binding protein type I precursor
  misc_feature (1)..(239): Homolog of NCBI NO: 82079 NR Description: chlorophyll a/b-binding protein type I precursor
  misc_feature (1)..(239): Homolog of NCBI NO: 115764 NR Description: Chlorophyll A-B binding protein 6A, chloroplast
  misc_feature (1)..(151): Homolog of NCBI NO: 30694146 NR Description: light-harvesting chlorophyll a/b binding protein
  misc_feature (186)..(241): Homolog of NCBI NO: 30694146 NR Description: light-harvesting chlorophyll a/b binding protein
  misc_feature (1)..(241): Homolog of NCBI NO: 6685157 NR Description: chlorophyll a/b binding protein precursor
  misc_feature (1)..(239): Homolog of NCBI NO: 3789954 NR Description: chlorophyll a/b-binding protein precursor [Oryza

SEQ ID NO: 76613 - protein, 235 aa, Arabidopsis thaliana; identical to SEQ ID NO: 35135
  peptide (1)..(235): Ceres Seq. ID no. 7108598
  misc_feature (47)..(204): Pfam Name: Chlorophyll A-B binding protein Pfam Description: Chlorophyll A-B binding protein
  misc_feature (1)..(235): Homolog of NCBI NO: 15233115 NR Description: light-harvesting chlorophyll a/b binding protein; id: At3g54890.1, supported by cDNA: gi_12642855, supported by
  misc_feature (1)..(235): Homolog of NCBI NO: 13265501 NR Description: AT3g54890 [Arabidopsis thaliana]
  misc_feature (1)..(232): Homolog of NCBI NO: 625547 NR Description: chlorophyll a/b-binding protein type I - common
  misc_feature (1)..(233): Homolog of NCBI NO: 82078 NR Description: chlorophyll a/b-binding protein type I precursor
  misc_feature (1)..(233): Homolog of NCBI NO: 82079 NR Description: chlorophyll a/b-binding protein type I precursor
  misc_feature (1)..(233): Homolog of NCBI NO: 115764 NR Description: Chlorophyll A-B binding protein 6A, chloroplast
  misc_feature (1)..(145): Homolog of NCBI NO: 30694146 NR Description: light-harvesting chlorophyll a/b binding protein
  misc_feature (180)..(235): Homolog of NCBI NO: 30694146 NR Description: light-harvesting chlorophyll a/b binding protein
  misc_feature (1)..(235): Homolog of NCBI NO: 6685157 NR Description: chlorophyll a/b binding protein precursor
  misc_feature (1)..(233): Homolog of NCBI NO: 3789954 NR Description: chlorophyll a/b-binding protein precursor [Oryza

SEQ ID NO: 76614 - protein, 198 aa, Arabidopsis thaliana; identical to SEQ ID NO: 35136
  peptide (1)..(198): Ceres Seq. ID no. 7108599
  misc_feature (10)..(167): Pfam Name: Chlorophyll A-B binding protein Pfam Description: Chlorophyll A-B binding protein
  misc_feature (1)..(198): Homolog of NCBI NO: 15233115 NR Description: light-harvesting chlorophyll a/b binding protein; id: At3g54890.1, supported by cDNA: gi_12642855, supported by
  misc_feature (1)..(198): Homolog of NCBI NO: 13265501 NR Description: AT3g54890 [Arabidopsis thaliana]
  misc_feature (1)..(195): Homolog of NCBI NO: 625547 NR Description: chlorophyll a/b-binding protein type I - common
  misc_feature (1)..(196): Homolog of NCBI NO: 82078 NR Description: chlorophyll a/b-binding protein type I precursor
  misc_feature (1)..(196): Homolog of NCBI NO: 82079 NR Description: chlorophyll a/b-binding protein type I precursor
  misc_feature (1)..(196): Homolog of NCBI NO: 115764 NR Description: Chlorophyll A-B binding protein 6A, chloroplast
  misc_feature (1)..(108): Homolog of NCBI NO: 30694146 NR Description: light-harvesting chlorophyll a/b binding protein
  misc_feature (143)..(198): Homolog of NCBI NO: 30694146 NR Description: light-harvesting chlorophyll a/b binding protein
  misc_feature (1)..(198): Homolog of NCBI NO: 6685157 NR Description: chlorophyll a/b binding protein precursor
  misc_feature (1)..(196): Homolog of NCBI NO: 3789954 NR Description: chlorophyll a/b-binding protein precursor [Oryza

SEQ ID NO: 76615 - DNA, 1153 bp, Arabidopsis thaliana
  misc_feature (1)..(1153): Ceres Seq. ID no. 7108604
  misc_feature: MA Experiment ID: 20000166 Result: Up-regulated in Transcription
  misc_feature: MA Experiment 20000166 PARAMETER Experiment Name: At_100uM_ABA_P Parameter: Age (day) Value: 14
  misc_feature: MA Experiment 20000166 PARAMETER Experiment Name: At_100uM_ABA_P Parameter: Organism Value: A. thaliana
  misc_feature: MA Experiment 20000166 PARAMETER Experiment Name: At_100uM_ABA_P Parameter: Plant Line Value: WS
  misc_feature: MA Experiment 20000166 PARAMETER Experiment Name: At_100uM_ABA_P Parameter: Timepoint (hr) Value: 1
  misc_feature: MA Experiment 20000166 PARAMETER Experiment Name: At_100uM_ABA_P Parameter: Tissue Value: Aerial
  misc_feature: MA Experiment 20000166 PARAMETER Experiment Name: At_100uM_ABA_P Parameter: Treatment Value: 100uM ABA vs. No Treatment
  misc_feature: MA Experiment ID: 20000169 Result: Up-regulated in Transcription
  misc_feature: MA Experiment 20000169 PARAMETER Experiment Name: At_100uM_ABA_P Parameter: Age (day) Value: 14
  misc_feature: MA Experiment 20000169 PARAMETER Experiment Name: At_100uM_ABA_P Parameter: Organism Value: A. thaliana
  misc_feature: MA Experiment 20000169 PARAMETER Experiment Name: At_100uM_ABA_P Parameter: Plant Line Value: WS
  misc_feature: MA Experiment 20000169 PARAMETER Experiment Name: At_100uM_ABA_P Parameter: Timepoint (hr) Value: 6
  misc_feature: MA Experiment 20000169 PARAMETER Experiment Name: At_100uM_ABA_P Parameter: Tissue Value: Aerial
  misc_feature: MA Experiment 20000169 PARAMETER Experiment Name: At_100uM_ABA_P Parameter: Treatment Value: 100uM ABA vs. No Treatment
  misc_feature: MA Experiment ID: 20000171 Result: Down-regulated in Transcription
  misc_feature: MA Experiment 20000171 PARAMETER Experiment Name: At_42deg_Heat_P Parameter: Age (day) Value: 14
  misc_feature: MA Experiment 20000171 PARAMETER Experiment Name: At_42deg_Heat_P Parameter: Organism Value: A. thaliana
  misc_feature: MA Experiment 20000171 PARAMETER Experiment Name: At_42deg_Heat_P Parameter: Plant Line Value: WS
  misc_feature: MA Experiment 20000171 PARAMETER Experiment Name: At_42deg_Heat_P Parameter: Temperature (deg C) Value: 42 vs. 22
  misc_feature: MA Experiment 20000171 PARAMETER Experiment Name: At_42deg_Heat_P Parameter: Timepoint (hr) Value: 1
  misc_feature: MA Experiment 20000171 PARAMETER Experiment Name: At_42deg_Heat_P Parameter: Tissue Value: Aerial
  misc_feature: MA Experiment ID: 20000173 Result: Down-regulated in Transcription
  misc_feature: MA Experiment 20000173 PARAMETER Experiment Name: At_42deg_Heat_P Parameter: Age (day) Value: 14
  misc_feature: MA Experiment 20000173 PARAMETER Experiment Name: At_42deg_Heat_P Parameter: Organism Value: A. thaliana
  misc_feature: MA Experiment 20000173 PARAMETER Experiment Name: At_42deg_Heat_P Parameter: Plant Line Value: WS
  misc_feature: MA Experiment 20000173 PARAMETER Experiment Name: At_42deg_Heat_P Parameter: Temperature (deg C) Value: 42 vs. 22
  misc_feature: MA Experiment 20000173 PARAMETER Experiment Name: At_42deg_Heat_P Parameter: Timepoint (hr) Value: 6
  misc_feature: MA Experiment 20000173 PARAMETER Experiment Name: At_42deg_Heat_P Parameter: Tissue Value: Aerial
  misc_feature: MA Experiment ID: 20000182 Result: Up-regulated in Transcription
  misc_feature: MA Experiment 20000182 PARAMETER Experiment Name: At_2mM_SA_P Parameter: Age (day) Value: 14
  misc_feature: MA Experiment 20000182 PARAMETER Experiment Name: At_2mM_SA_P Parameter: Organism Value: A. thaliana
  misc_feature: MA Experiment 20000182 PARAMETER Experiment Name: At_2mM_SA_P Parameter: Plant Line Value: WS
  misc_feature: MA Experiment 20000182 PARAMETER Experiment Name: At_2mM_SA_P Parameter: Timepoint (hr) Value: 6
  misc_feature: MA Experiment 20000182 PARAMETER Experiment Name: At_2mM_SA_P Parameter: Tissue Value: Aerial
  misc_feature: MA Experiment 20000182 PARAMETER Experiment Name: At_2mM_SA_P Parameter: Treatment Value: 2mM SA vs. No Treatment
  misc_feature: MA Experiment ID: 20000184 Result: Down-regulated in Transcription
  misc_feature: MA Experiment 20000184 PARAMETER Experiment Name: At_Shoots__P Parameter: Age (day) Value: 7
  misc_feature: MA Experiment 20000184 PARAMETER Experiment Name: At_Shoots__P Parameter: Tissue Value: Shoots vs. Whole Plant
  misc_feature: MA Experiment ID: 20000227 Result: Down-regulated in Transcription
  misc_feature: MA Experiment 20000227 PARAMETER Experiment Name: At_Root-Tips-vs-Tops_P Parameter: Tissue Value: Root Tips vs. Root Tops
  misc_feature: MA Experiment ID: 20000234 Result: Down-regulated in Transcription
  misc_feature: MA Experiment 20000234 PARAMETER Experiment Name: At_Siliques_P Parameter: Age (day) Value: 21
  misc_feature: MA Experiment 20000234 PARAMETER Experiment Name: At_Siliques_P Parameter: Organism Value: A. thaliana
  misc_feature: MA Experiment 20000234 PARAMETER Experiment Name: At_Siliques_P Parameter: Plant Line Value: WS
  misc_feature: MA Experiment 20000234 PARAMETER Experiment Name: At_Siliques_P Parameter: Tissue Value: Less Than 5mm Siliques vs. Whole Plant
  misc_feature: MA Experiment ID: 20000235 Result: Down-regulated in Transcription
  misc_feature: MA Experiment 20000235 PARAMETER Experiment Name: At_Siliques_P Parameter: Age (day) Value: 21
  misc_feature: MA Experiment 20000235 PARAMETER Experiment Name: At_Siliques_P Parameter: Organism Value: A. thaliana
  misc_feature: MA Experiment 20000235 PARAMETER Experiment Name: At_Siliques_P Parameter: Plant Line Value: WS
  misc_feature: MA Experiment 20000235 PARAMETER Experiment Name: At_Siliques_P Parameter: Tissue Value: 5-10mm Siliques vs. Whole Plant
  misc_feature: MA Experiment ID: 20000264 Result: Up-regulated in Transcription
  misc_feature: MA Experiment 20000264 PARAMETER Experiment Name: At_Open_Flower_P Parameter: Age (day) Value: 21
  misc_feature: MA Experiment 20000264 PARAMETER Experiment Name: At_Open_Flower_P Parameter: Plant Line Value: WS
  misc_feature: MA Experiment 20000264 PARAMETER Experiment Name: At_Open_Flower_P Parameter: Tissue Value: Open Flower vs. Whole Plant
  misc_feature: MA Experiment ID: 20000267 Result: Up-regulated in Transcription
  misc_feature: MA Experiment 20000267 PARAMETER Experiment Name: At_Drought_P Parameter: Age (day) Value: 7
  misc_feature: MA Experiment 20000267 PARAMETER Experiment Name: At_Drought_P Parameter: Organism Value: A. thaliana
  misc_feature: MA Experiment 20000267 PARAMETER Experiment Name: At_Drought_P Parameter: Plant Line Value: WS
  misc_feature: MA Experiment 20000267 PARAMETER Experiment Name: At_Drought_P Parameter: Timepoint (hr) Value: 6
  misc_feature: MA Experiment 20000267 PARAMETER Experiment Name: At_Drought_P Parameter: Tissue Value: Whole Plant
  misc_feature: MA Experiment 20000267 PARAMETER Experiment Name: At_Drought_P Parameter: Treatment Value: Drought vs. No Drought
  misc_feature: MA Experiment ID: 20000268 Result: Up-regulated in Transcription
  misc_feature: MA Experiment 20000268 PARAMETER Experiment Name: At_100mM_NaCl__P Parameter: Age (day) Value: 14
  misc_feature: MA Experiment 20000268 PARAMETER Experiment Name: At_100mM_NaCl__P Parameter: Organism Value: A. thaliana
  misc_feature: MA Experiment 20000268 PARAMETER Experiment Name: At_100mM_NaCl__P Parameter: Plant Line Value: WS
  misc_feature: MA Experiment 20000268 PARAMETER Experiment Name: At_100mM_NaCl__P Parameter: Timepoint (hr) Value: 6
  misc_feature: MA Experiment 20000268 PARAMETER Experiment Name: At_100mM_NaCl__P Parameter: Tissue Value: Whole Plant
  misc_feature: MA Experiment 20000268 PARAMETER Experiment Name: At_100mM_NaCl__P Parameter: Treatment Value: 100mM NaCl vs. No Treatment
  misc_feature: MA Experiment ID: 20000436 Result: Up-regulated in Transcription
  misc_feature: MA Experiment 20000436 PARAMETER Experiment Name: At_Drought_P Parameter: Age (day) Value: 7
  misc_feature: MA Experiment 20000436 PARAMETER Experiment Name: At_Drought_P Parameter: Organism Value: A. thaliana
  misc_feature: MA Experiment 20000436 PARAMETER Experiment Name: At_Drought_P Parameter: Plant Line Value: WS
  misc_feature: MA Experiment 20000436 PARAMETER Experiment Name: At_Drought_P Parameter: Timepoint (hr) Value: 12
  misc_feature: MA Experiment 20000436 PARAMETER Experiment Name: At_Drought_P Parameter: Tissue Value: Whole Plant
  misc_feature: MA Experiment 20000436 PARAMETER Experiment Name: At_Drought_P Parameter: Treatment Value: Drought vs. No Drought
  misc_feature: MA Experiment ID: 20000437 Result: Up-regulated in Transcription
  misc_feature: MA Experiment 20000437 PARAMETER Experiment Name: At_Drought_P Parameter: Age (day) Value: 8
  misc_feature: MA Experiment 20000437 PARAMETER Experiment Name: At_Drought_P Parameter: Organism Value: A. thaliana
  misc_feature: MA Experiment 20000437 PARAMETER Experiment Name: At_Drought_P Parameter: Plant Line Value: WS
  misc_feature: MA Experiment 20000437 PARAMETER Experiment Name: At_Drought_P Parameter: Timepoint (hr) Value: 24
  misc_feature: MA Experiment 20000437 PARAMETER Experiment Name: At_Drought_P Parameter: Tissue Value: Whole Plant
  misc_feature: MA Experiment 20000437 PARAMETER Experiment Name: At_Drought_P Parameter: Treatment Value: Drought vs. No Drought
  misc_feature: MA Experiment ID: 20000438 Result: Down-regulated in Transcription
  misc_feature: MA Experiment 20000438 PARAMETER Experiment Name: At_Shoots__P Parameter: Age (day) Value: 14
  misc_feature: MA Experiment 20000438 PARAMETER Experiment Name: At_Shoots__P Parameter: Tissue Value: Shoots vs. Whole Plant
  misc_feature: MA Experiment ID: 20000453 Result: Up-regulated in Transcription
  misc_feature: MA Experiment 20000453 PARAMETER Experiment Name: At_100uM_ABA_P Parameter: Age (day) Value: 15
  misc_feature: MA Experiment 20000453 PARAMETER Experiment Name: At_100uM_ABA_P Parameter: Organism Value: A. thaliana
  misc_feature: MA Experiment 20000453 PARAMETER Experiment Name: At_100uM_ABA_P Parameter: Plant Line Value: WS
  misc_feature: MA Experiment 20000453 PARAMETER Experiment Name: At_100uM_ABA_P Parameter: Timepoint (hr) Value: 24
  misc_feature: MA Experiment 20000453 PARAMETER Experiment Name: At_100uM_ABA_P Parameter: Tissue Value: Aerial
  misc_feature: MA Experiment 20000453 PARAMETER Experiment Name: At_100uM_ABA_P Parameter: Treatment Value: 100uM ABA vs. No Treatment
  misc_feature: MA Experiment ID: 20000455 Result: Up-regulated in Transcription
  misc_feature: MA Experiment 20000455 PARAMETER Experiment Name: At_100uM_ABA_P Parameter: Age (day) Value: 16
  misc_feature: MA Experiment 20000455 PARAMETER Experiment Name: At_100uM_ABA_P Parameter: Organism Value: A. thaliana
  misc_feature: MA Experiment 20000455 PARAMETER Experiment Name: At_100uM_ABA_P Parameter: Plant Line Value: WS
  misc_feature: MA Experiment 20000455 PARAMETER Experiment Name: At_100uM_ABA_P Parameter: Timepoint (hr) Value: 48
  misc_feature: MA Experiment 20000455 PARAMETER Experiment Name: At_100uM_ABA_P Parameter: Tissue Value: Aerial
  misc_feature: MA Experiment 20000455 PARAMETER Experiment Name: At_100uM_ABA_P Parameter: Treatment Value: 100uM ABA vs. No Treatment
  misc_feature: MA Experiment ID: 20000575 Result: Up-regulated in Transcription
  misc_feature: MA Experiment 20000575 PARAMETER Experiment Name: At_100uM_ABA_Mutants__P Parameter: Organism Value: A. thaliana
  misc_feature: MA Experiment 20000575 PARAMETER Experiment Name: At_100uM_ABA_Mutants__P Parameter: Plant Line Value: CS22
  misc_feature: MA Experiment 20000575 PARAMETER Experiment Name: At_100uM_ABA_Mutants__P Parameter: Timepoint (hr) Value: 6
  misc_feature: MA Experiment 20000575 PARAMETER Experiment Name: At_100uM_ABA_Mutants__P Parameter: Tissue Value: Whole Plant
  misc_feature: MA Experiment 20000575 PARAMETER Experiment Name: At_100uM_ABA_Mutants__P Parameter: Treatment Value: 1uM ABA vs. No Treatment
  misc_feature: MA Experiment ID: 20000576 Result: Up-regulated in Transcription
  misc_feature: MA Experiment 20000576 PARAMETER Experiment Name: At_100uM_ABA_Mutants__P Parameter: Organism Value: A. thaliana
  misc_feature: MA Experiment 20000576 PARAMETER Experiment Name: At_100uM_ABA_Mutants__P Parameter: Plant Line Value: CS23
  misc_feature: MA Experiment 20000576 PARAMETER Experiment Name: At_100uM_ABA_Mutants__P Parameter: Timepoint (hr) Value: 6
  misc_feature: MA Experiment 20000576 PARAMETER Experiment Name: At_100uM_ABA_Mutants__P Parameter: Tissue Value: Whole Plant
  misc_feature: MA Experiment 20000576 PARAMETER Experiment Name: At_100uM_ABA_Mutants__P Parameter: Treatment Value: 1uM ABA vs. No Treatment
  misc_feature: MA Experiment ID: 20000709 Result: Down-regulated in Transcription
  misc_feature: MA Experiment 20000709 PARAMETER Experiment Name: At_15mM_NH4NO3_L-to-H_P Parameter: Age (hr) Value: 14
  misc_feature: MA Experiment 20000709 PARAMETER Experiment Name: At_15mM_NH4NO3_L-to-H_P Parameter: Organism Value: A. thaliana
  misc_feature: MA Experiment 20000709 PARAMETER Experiment Name: At_15mM_NH4NO3_L-to-H_P Parameter: Plant Line Value: WS
  misc_feature: MA Experiment 20000709 PARAMETER Experiment Name: At_15mM_NH4NO3_L-to-H_P Parameter: Timepoint (hr) Value: 4
  misc_feature: MA Experiment 20000709 PARAMETER Experiment Name: At_15mM_NH4NO3_L-to-H_P Parameter: Tissue Value: Aerial
  misc_feature: MA Experiment 20000709 PARAMETER Experiment Name: At_15mM_NH4NO3_L-to-H_P Parameter: Treatment Value: 15mM NH4NO3 vs. 30mM Mannitol
  misc_feature: MA Experiment ID: 20000794 Result: Up-regulated in Transcription
  misc_feature: MA Experiment 20000794 PARAMETER Experiment Name: At_Petals_P Parameter: Age (day) Value: 23-25 days
  misc_feature: MA Experiment 20000794 PARAMETER Experiment Name: At_Petals_P Parameter: Plant Line Value: WS
  misc_feature: MA Experiment 20000794 PARAMETER Experiment Name: At_Petals_P Parameter: Tissue Value: Petals vs. Whole plant
  misc_feature: MA Experiment ID: 20001553 Result: Up-regulated in Transcription
  misc_feature: MA Experiment 20001553 PARAMETER Experiment Name: At_Drought_Soil_Dry_P Parameter: Age (day) Value: 19
  misc_feature: MA Experiment 20001553 PARAMETER Experiment Name: At_Drought_Soil_Dry_P Parameter: Organism Value: A. thaliana
  misc_feature: MA Experiment 20001553 PARAMETER Experiment Name: At_Drought_Soil_Dry_P Parameter: Plant Line Value: WS
  misc_feature: MA Experiment 20001553 PARAMETER Experiment Name: At_Drought_Soil_Dry_P Parameter: Post Timepoint (hr) Value: None
  misc_feature: MA Experiment 20001553 PARAMETER Experiment Name: At_Drought_Soil_Dry_P Parameter: Post-Treatment Value: None
  misc_feature: MA Experiment 20001553 PARAMETER Experiment Name: At_Drought_Soil_Dry_P Parameter: Timepoint (day) Value: 5
  misc_feature: MA Experiment 20001553 PARAMETER Experiment Name: At_Drought_Soil_Dry_P Parameter: Treatment Value: Drought vs. No Drought
  misc_feature: MA Experiment ID: 20001554 Result: Up-regulated in Transcription
  misc_feature: MA Experiment 20001554 PARAMETER Experiment Name: At_Drought_Soil_Dry_P Parameter: Age (day) Value: 21
  misc_feature: MA Experiment 20001554 PARAMETER Experiment Name: At_Drought_Soil_Dry_P Parameter: Organism Value: A. thaliana
  misc_feature: MA Experiment 20001554 PARAMETER Experiment Name: At_Drought_Soil_Dry_P Parameter: Plant Line Value: WS
  misc_feature: MA Experiment 20001554 PARAMETER Experiment Name: At_Drought_Soil_Dry_P Parameter: Post Timepoint (hr) Value: None
  misc_feature: MA Experiment 20001554 PARAMETER Experiment Name: At_Drought_Soil_Dry_P Parameter: Post-Treatment Value: None
  misc_feature: MA Experiment 20001554 PARAMETER Experiment Name: At_Drought_Soil_Dry_P Parameter: Timepoint (day) Value: 7
  misc_feature: MA Experiment 20001554 PARAMETER Experiment Name: At_Drought_Soil_Dry_P Parameter: Treatment Value: Drought vs. No Drought
  misc_feature: MA Experiment ID: 20001555 Result: Up-regulated in Transcription
  misc_feature: MA Experiment 20001555 PARAMETER Experiment Name: At_Drought_Soil_Dry_P Parameter: Age (day) Value: 24
  misc_feature: MA Experiment 20001555 PARAMETER Experiment Name: At_Drought_Soil_Dry_P Parameter: Organism Value: A. thaliana
  misc_feature: MA Experiment 20001555 PARAMETER Experiment Name: At_Drought_Soil_Dry_P Parameter: Plant Line Value: WS
  misc_feature: MA Experiment 20001555 PARAMETER Experiment Name: At_Drought_Soil_Dry_P Parameter: Post Timepoint (hr) Value: None
  misc_feature: MA Experiment 20001555 PARAMETER Experiment Name: At_Drought_Soil_Dry_P Parameter: Post-Treatment Value: None
  misc_feature: MA Experiment 20001555 PARAMETER Experiment Name: At_Drought_Soil_Dry_P Parameter: Timepoint (day) Value: 10
  misc_feature: MA Experiment 20001555 PARAMETER Experiment Name: At_Drought_Soil_Dry_P Parameter: Treatment Value: Drought vs. No Drought
  misc_feature: MA Experiment ID: 20001556 Result: Up-regulated in Transcription
  misc_feature: MA Experiment 20001556 PARAMETER Experiment Name: At_Drought_Soil_Dry_P Parameter: Age (day) Value: 26
  misc_feature: MA Experiment 20001556 PARAMETER Experiment Name: At_Drought_Soil_Dry_P Parameter: Organism Value: A. thaliana
  misc_feature: MA Experiment 20001556 PARAMETER Experiment Name: At_Drought_Soil_Dry_P Parameter: Plant Line Value: WS
  misc_feature: MA Experiment 20001556 PARAMETER Experiment Name: At_Drought_Soil_Dry_P Parameter: Post Timepoint (hr) Value: None
  misc_feature: MA Experiment 20001556 PARAMETER Experiment Name: At_Drought_Soil_Dry_P Parameter: Post-Treatment Value: None
  misc_feature: MA Experiment 20001556 PARAMETER Experiment Name: At_Drought_Soil_Dry_P Parameter: Timepoint (day) Value: 12
  misc_feature: MA Experiment 20001556 PARAMETER Experiment Name: At_Drought_Soil_Dry_P Parameter: Treatment Value: Drought vs. No Drought
  misc_feature: MA Experiment ID: 20001559 Result: Up-regulated in Transcription
  misc_feature: MA Experiment 20001559 PARAMETER Experiment Name: At_Drought_Soil_Dry_P Parameter: Age (day) Value: 28
  misc_feature: MA Experiment 20001559 PARAMETER Experiment Name: At_Drought_Soil_Dry_P Parameter: Organism Value: A. thaliana
  misc_feature: MA Experiment 20001559 PARAMETER Experiment Name: At_Drought_Soil_Dry_P Parameter: Plant Line Value: WS
  misc_feature: MA Experiment 20001559 PARAMETER Experiment Name: At_Drought_Soil_Dry_P Parameter: Post Timepoint (hr) Value: 29
  misc_feature: MA Experiment 20001559 PARAMETER Experiment Name: At_Drought_Soil_Dry_P Parameter: Post-Treatment Value: Re-Water vs. No Drought
  misc_feature: MA Experiment 20001559 PARAMETER Experiment Name: At_Drought_Soil_Dry_P Parameter: Timepoint (day) Value: 14
  misc_feature: MA Experiment 20001559 PARAMETER Experiment Name: At_Drought_Soil_Dry_P Parameter: Treatment Value: Drought vs. No Drought
  misc_feature: MA Experiment ID: 20001771 Result: Up-regulated in Transcription
  misc_feature: MA Experiment 20001771 PARAMETER Experiment Name: At_Far-red-enriched-adult_P Parameter: Age (day) Value: 28
  misc_feature: MA Experiment 20001771 PARAMETER Experiment Name: At_Far-red-enriched-adult_P Parameter: Light Value: Far-red enriched vs. White
  misc_feature: MA Experiment 20001771 PARAMETER Experiment Name: At_Far-red-enriched-adult_P Parameter: Organism Value: A. thaliana
  misc_feature: MA Experiment 20001771 PARAMETER Experiment Name: At_Far-red-enriched-adult_P Parameter: Plant Line Value: Columbia
  misc_feature: MA Experiment 20001771 PARAMETER Experiment Name: At_Far-red-enriched-adult_P Parameter: Timepoint (hr) Value: 16
  misc_feature: MA Experiment 20001771 PARAMETER Experiment Name: At_Far-red-enriched-adult_P Parameter: Tissue Value: Aerial
  misc_feature: MA Experiment ID: 20001904 Result: Up-regulated in Transcription
  misc_feature: MA Experiment 20001904 PARAMETER Experiment Name: At_Drought_Reproduction_P Parameter: Age (day) Value: 37
  misc_feature: MA Experiment 20001904 PARAMETER Experiment Name: At_Drought_Reproduction_P Parameter: Organism Value: A. thaliana
  misc_feature: MA Experiment 20001904 PARAMETER Experiment Name: At_Drought_Reproduction_P Parameter: Plant Line Value: WS
  misc_feature: MA Experiment 20001904 PARAMETER Experiment Name: At_Drought_Reproduction_P Parameter: Timepoint (day) Value: 7
  misc_feature: MA Experiment 20001904 PARAMETER Experiment Name: At_Drought_Reproduction_P Parameter: Tissue Value: Rosettes
  misc_feature: MA Experiment 20001904 PARAMETER Experiment Name: At_Drought_Reproduction_P Parameter: Treatment Value: Drought vs. No Drought
  misc_feature: MA Experiment ID: 20001905 Result: Up-regulated in Transcription
  misc_feature: MA Experiment 20001905 PARAMETER Experiment Name: At_Drought_Reproduction_P Parameter: Age (day) Value: 40
  misc_feature: MA Experiment 20001905 PARAMETER Experiment Name: At_Drought_Reproduction_P Parameter: Organism Value: A. thaliana
  misc_feature: MA Experiment 20001905 PARAMETER Experiment Name: At_Drought_Reproduction_P Parameter: Plant Line Value: WS
  misc_feature: MA Experiment 20001905 PARAMETER Experiment Name: At_Drought_Reproduction_P Parameter: Timepoint (day) Value: 10
  misc_feature: MA Experiment 20001905 PARAMETER Experiment Name: At_Drought_Reproduction_P Parameter: Tissue Value: Rosettes
  misc_feature: MA Experiment 20001905 PARAMETER Experiment Name: At_Drought_Reproduction_P Parameter: Treatment Value: Drought vs. No Drought
  misc_feature: MA Experiment ID: 20001906 Result: Up-regulated in Transcription
  misc_feature: MA Experiment 20001906 PARAMETER Experiment Name: At_Drought_Reproduction_P Parameter: Age (day) Value: 35
  misc_feature: MA Experiment 20001906 PARAMETER Experiment Name: At_Drought_Reproduction_P Parameter: Organism Value: A. thaliana
  misc_feature: MA Experiment 20001906 PARAMETER Experiment Name: At_Drought_Reproduction_P Parameter: Plant Line Value: WS
  misc_feature: MA Experiment 20001906 PARAMETER Experiment Name: At_Drought_Reproduction_P Parameter: Timepoint (day) Value: 5
  misc_feature: MA Experiment 20001906 PARAMETER Experiment Name: At_Drought_Reproduction_P Parameter: Tissue Value: Siliques
  misc_feature: MA Experiment 20001906 PARAMETER Experiment Name: At_Drought_Reproduction_P Parameter: Treatment Value: Drought vs. No Drought
  misc_feature: MA Experiment ID: 20001907 Result: Up-regulated in Transcription
  misc_feature: MA Experiment 20001907 PARAMETER Experiment Name: At_Drought_Reproduction_P Parameter: Age (day) Value: 37
  misc_feature: MA Experiment 20001907 PARAMETER Experiment Name: At_Drought_Reproduction_P Parameter: Organism Value: A. thaliana
  misc_feature: MA Experiment 20001907 PARAMETER Experiment Name: At_Drought_Reproduction_P Parameter: Plant Line Value: WS
  misc_feature: MA Experiment 20001907 PARAMETER Experiment Name: At_Drought_Reproduction_P Parameter: Timepoint (day) Value: 7
  misc_feature: MA Experiment 20001907 PARAMETER Experiment Name: At_Drought_Reproduction_P Parameter: Tissue Value: Siliques
  misc_feature: MA Experiment 20001907 PARAMETER Experiment Name: At_Drought_Reproduction_P Parameter: Treatment Value: Drought vs. No Drought
  misc_feature: MA Experiment ID: 20001908 Result: Up-regulated in Transcription
  misc_feature: MA Experiment 20001908 PARAMETER Experiment Name: At_Drought_Reproduction_P Parameter: Age (day) Value: 40
  misc_feature: MA Experiment 20001908 PARAMETER Experiment Name: At_Drought_Reproduction_P Parameter: Organism Value: A. thaliana
  misc_feature: MA Experiment 20001908 PARAMETER Experiment Name: At_Drought_Reproduction_P Parameter: Plant Line Value: WS
  misc_feature: MA Experiment 20001908 PARAMETER Experiment Name: At_Drought_Reproduction_P Parameter: Timepoint (day) Value: 10
  misc_feature: MA Experiment 20001908 PARAMETER Experiment Name: At_Drought_Reproduction_P Parameter: Tissue Value: Siliques
  misc_feature: MA Experiment 20001908 PARAMETER Experiment Name: At_Drought_Reproduction_P Parameter: Treatment Value: Drought vs. No Drought
  misc_feature: MA Experiment ID: 20001909 Result: Up-regulated in Transcription
  misc_feature: MA Experiment 20001909 PARAMETER Experiment Name: At_Drought_Reproduction_P Parameter: Age (day) Value: 35
  misc_feature: MA Experiment 20001909 PARAMETER Experiment Name: At_Drought_Reproduction_P Parameter: Organism Value: A. thaliana
  misc_feature: MA Experiment 20001909 PARAMETER Experiment Name: At_Drought_Reproduction_P Parameter: Plant Line Value: WS
  misc_feature: MA Experiment 20001909 PARAMETER Experiment Name: At_Drought_Reproduction_P Parameter: Timepoint (day) Value: 5
  misc_feature: MA Experiment 20001909 PARAMETER Experiment Name: At_Drought_Reproduction_P Parameter: Tissue Value: Flowers
  misc_feature: MA Experiment 20001909 PARAMETER Experiment Name: At_Drought_Reproduction_P Parameter: Treatment Value: Drought vs. No Drought
  misc_feature: MA Experiment ID: 20001910 Result: Up-regulated in Transcription
  misc_feature: MA Experiment 20001910 PARAMETER Experiment Name: At_Drought_Reproduction_P Parameter: Age (day) Value: 37
  misc_feature: MA Experiment 20001910 PARAMETER Experiment Name: At_Drought_Reproduction_P Parameter: Organism Value: A. thaliana
  misc_feature: MA Experiment 20001910 PARAMETER Experiment Name: At_Drought_Reproduction_P Parameter: Plant Line Value: WS
  misc_feature: MA Experiment 20001910 PARAMETER Experiment Name: At_Drought_Reproduction_P Parameter: Timepoint (day) Value: 7
  misc_feature: MA Experiment 20001910 PARAMETER Experiment Name: At_Drought_Reproduction_P Parameter: Tissue Value: Flowers
  misc_feature: MA Experiment 20001910 PARAMETER Experiment Name: At_Drought_Reproduction_P Parameter: Treatment Value: Drought vs. No Drought
  misc_feature: MA Experiment ID: 20001911 Result: Up-regulated in Transcription
  misc_feature: MA Experiment 20001911 PARAMETER Experiment Name: At_Drought_Reproduction_P Parameter: Age (day) Value: 40
  misc_feature: MA Experiment 20001911 PARAMETER Experiment Name: At_Drought_Reproduction_P Parameter: Organism Value: A. thaliana
  misc_feature: MA Experiment 20001911 PARAMETER Experiment Name: At_Drought_Reproduction_P Parameter: Plant Line Value: WS
  misc_feature: MA Experiment 20001911 PARAMETER Experiment Name: At_Drought_Reproduction_P Parameter: Timepoint (day) Value: 10
  misc_feature: MA Experiment 20001911 PARAMETER Experiment Name: At_Drought_Reproduction_P Parameter: Tissue Value: Flowers
  misc_feature: MA Experiment 20001911 PARAMETER Experiment Name: At_Drought_Reproduction_P Parameter: Treatment Value: Drought vs. No Drought
gagaagttcatggaggttctgattccggtcgatgagatgacagaaggtggagaatattctccggcgatgatgtcagcagagccattcttgaccatgaagaagatgaagaagagcaaccacaacaagaacaatcagagaaggtttagcgacgagcagatcaagtcactggagatgatgtttgagtctgagacaaggcttgagccaaggaagaaggttcaattagctagagagctagggttgcagccgaggcaagtggctatatggtttcagaacaagagggctcgttggaaatccaagcagctcgagactgagtacaacattctcagacaaaactacgacaacttggcttctcagttcgagtccttaaagaaagaaaaacaagctttagtctctgagttgcagaggctaaaagaggcgacgcaaaagaagacacaggaggaggaaaggcagtgtagtggagatcaagcggtggttgctctaagcagcacacatcatgaatcagaaaacgaagagaaccggaggcgtaaaccggaagaggttagaccggagatggagatgaaagatgataggggtcatcatggggttatgtgtgatcatcatgattatgaagatgatgataatggttatagtaacaacatcaagagagagtgttttggtgggtttgaggaagaaccagatcacttaatgaacattgttgaaccagctgatagttgtttgacatcatctgatgattggagaggtttcaaatcagatactactactctcttggaccaatcctgcaacaattacccttggcgggatttttggtcatgaaaacaataaactctaaacaagaagatgaaacagattgagactaaagattggatatatacatattcaaatcgaaatttaccggtctacatcgcatgaaccgagccacggatatagagatattcggtccagcaaatgactcgtttctcagcgagaattttgcaggattttgagctgaaattgtatggttttgtctgtataaatgatgtgtttagaaagacgtatattctcagttcgtgtttgtaattctgtttttaagtagtaagtactcgtcatgctttgtagctaagtagtaagtttaagactaaatttggatgaataaaaatcaaaagcaggagaaatc

SEQ ID NO: 76616 - protein, 270 aa, Arabidopsis thaliana
  peptide (1)..(270): Ceres Seq. ID no. 7108605
  misc_feature (42)..(98): Pfam Name: Homeobox domain Pfam Description: Homeobox domain
  misc_feature (4)..(270): Homolog of NCBI NO: 629527 NR Description: homeotic protein Athb-7 - Arabidopsis thaliana
  misc_feature (13)..(270): Homolog of NCBI NO: 15226424 NR Description: homeodomain transcription factor (ATHB-7); id: At2g46680.1, supported by cDNA: gi_15027938, supported by
  misc_feature (13)..(205): Homolog of NCBI NO: 15228625 NR Description: homeobox-leucine zipper protein ATHB-12; protein At3g61890.1, supported by cDNA: 32615., supported by cDNA:
  misc_feature (13)..(205): Homolog of NCBI NO: 11357332 NR Description: homeobox-leucine zipper protein ATHB-12
  misc_feature (12)..(145): Homolog of NCBI NO: 5031277 NR Description: homeobox leucine zipper protein [Prunus armeniaca]
  misc_feature (43)..(142): Homolog of NCBI NO: 5006857 NR Description: homeodomain leucine zipper protein [Oryza sativa]
  misc_feature (45)..(171): Homolog of NCBI NO: 29367373 NR Description: homeodomain leucine zipper protein-like protein
  misc_feature (45)..(171): Homolog of NCBI NO: 21741304 NR Description: OSJNBb0103I08.6 [Oryza sativa (japonica
  misc_feature (44)..(143): Homolog of NCBI NO: 37147908 NR Description: HD-ZIP [Capsicum annuum]
  misc_feature (35)..(206): Homolog of NCBI NO: 22651698 NR Description: homeodomain protein Hfi22 [Nicotiana tabacum]
EKFMEVLIPVDEMTEGGEYSPAMMSAEPFLTMKKMKKSNHNKNNQRRFSDEQIKSLEMMFESETRLEPRKKVQLARELGLQPRQVAIWFQNKRARWKSKQLETEYNILRQNYDNLASQFESLKKEKQALVSELQRLKEATQKKTQEEERQCSGDQAVVALSSTHHESENEENRRRKPEEVRPEMEMKDDRGHHGVMCDHHDYEDDDNGYSNNIKRECFGGFEEEPDHLMNIVEPADSCLTSSDDWRGFKSDTTTLLDQSCNNYPWRDFWS

SEQ ID NO: 76617 - protein, 267 aa, Arabidopsis thaliana
  peptide (1)..(267): Ceres Seq. ID no. 7108606
  misc_feature (39)..(95): Pfam Name: Homeobox domain Pfam Description: Homeobox domain
  misc_feature (1)..(267): Homolog of NCBI NO: 629527 NR Description: homeotic protein Athb-7 - Arabidopsis thaliana
  misc_feature (10)..(267): Homolog of NCBI NO: 15226424 NR Description: homeodomain transcription factor (ATHB-7); id: At2g46680.1, supported by cDNA: gi_15027938, supported by
  misc_feature (10)..(202): Homolog of NCBI NO: 15228625 NR Description: homeobox-leucine zipper protein ATHB-12; protein At3g61890.1, supported by cDNA: 32615., supported by cDNA:
  misc_feature (10)..(202): Homolog of NCBI NO: 11357332 NR Description: homeobox-leucine zipper protein ATHB-12
  misc_feature (9)..(142): Homolog of NCBI NO: 5031277 NR Description: homeobox leucine zipper protein [Prunus armeniaca]
  misc_feature (40)..(139): Homolog of NCBI NO: 5006857 NR Description: homeodomain leucine zipper protein [Oryza sativa]
  misc_feature (42)..(168): Homolog of NCBI NO: 29367373 NR Description: homeodomain leucine zipper protein-like protein
  misc_feature (42)..(168): Homolog of NCBI NO: 21741304 NR Description: OSJNBb0103I08.6 [Oryza sativa (japonica
  misc_feature (41)..(140): Homolog of NCBI NO: 37147908 NR Description: HD-ZIP [Capsicum annuum]
  misc_feature (32)..(203): Homolog of NCBI NO: 22651698 NR Description: homeodomain protein Hfi22 [Nicotiana tabacum]
MEVLIPVDEMTEGGEYSPAMMSAEPFLTMKKMKKSNHNKNNQRRFSDEQIKSLEMMFESETRLEPRKKVQLARELGLQPRQVAIWFQNKRARWKSKQLETEYNILRQNYDNLASQFESLKKEKQALVSELQRLKEATQKKTQEEERQCSGDQAVVALSSTHHESENEENRRRKPEEVRPEMEMKDDRGHHGVMCDHHDYEDDDNGYSNNIKRECFGGFEEEPDHLMNIVEPADSCLTSSDDWRGFKSDTTTLLDQSCNNYPWRDFWS

SEQ ID NO: 76618 - protein, 258 aa, Arabidopsis thaliana
  peptide (1)..(258): Ceres Seq. ID no. 7108607
  misc_feature (30)..(86): Pfam Name: Homeobox domain Pfam Description: Homeobox domain
  misc_feature (1)..(258): Homolog of NCBI NO: 629527 NR Description: homeotic protein Athb-7 - Arabidopsis thaliana
  misc_feature (1)..(258): Homolog of NCBI NO: 15226424 NR Description: homeodomain transcription factor (ATHB-7); id: At2g46680.1, supported by cDNA: gi_15027938, supported by
  misc_feature (1)..(193): Homolog of NCBI NO: 15228625 NR Description: homeobox-leucine zipper protein ATHB-12; protein At3g61890.1, supported by cDNA: 32615., supported by cDNA:
  misc_feature (1)..(193): Homolog of NCBI NO: 11357332 NR Description: homeobox-leucine zipper protein ATHB-12
  misc_feature (1)..(133): Homolog of NCBI NO: 5031277 NR Description: homeobox leucine zipper protein [Prunus armeniaca]
  misc_feature (31)..(130): Homolog of NCBI NO: 5006857 NR Description: homeodomain leucine zipper protein [Oryza sativa]
  misc_feature (33)..(159): Homolog of NCBI NO: 29367373 NR Description: homeodomain leucine zipper protein-like protein
  misc_feature (33)..(159): Homolog of NCBI NO: 21741304 NR Description: OSJNBb0103I08.6 [Oryza sativa (japonica
  misc_feature (32)..(131): Homolog of NCBI NO: 37147908 NR Description: HD-ZIP [Capsicum annuum]
  misc_feature (23)..(194): Homolog of NCBI NO: 22651698 NR Description: homeodomain protein Hfi22 [Nicotiana tabacum]
MTEGGEYSPAMMSAEPFLTMKKMKKSNHNKNNQRRFSDEQIKSLEMMFESETRLEPRKKVQLARELGLQPRQVAIWFQNKRARWKSKQLETEYNILRQNYDNLASQFESLKKEKQALVSELQRLKEATQKKTQEEERQCSGDQAVVALSSTHHESENEENRRRKPEEVRPEMEMKDDRGHHGVMCDHHDYEDDDNGYSNNIKRECFGGFEEEPDHLMNIVEPADSCLTSSDDWRGFKSDTTTLLDQSCNNYPWRDFWS

SEQ ID NO: 76619 - DNA, 768 bp, Arabidopsis thaliana
  misc_feature (1)..(768): Ceres Seq. ID no. 7108616
  misc_feature: MA Experiment ID: 20000171 Result: Up-regulated in Transcription
  misc_feature: MA Experiment 20000171 PARAMETER Experiment Name: At_42deg_Heat_P Parameter: Age (day) Value: 14
  misc_feature: MA Experiment 20000171 PARAMETER Experiment Name: At_42deg_Heat_P Parameter: Organism Value: A. thaliana
  misc_feature: MA Experiment 20000171 PARAMETER Experiment Name: At_42deg_Heat_P Parameter: Plant Line Value: WS
  misc_feature: MA Experiment 20000171 PARAMETER Experiment Name: At_42deg_Heat_P Parameter: Temperature (deg C) Value: 42 vs. 22
  misc_feature: MA Experiment 20000171 PARAMETER Experiment Name: At_42deg_Heat_P Parameter: Timepoint (hr) Value: 1
  misc_feature: MA Experiment 20000171 PARAMETER Experiment Name: At_42deg_Heat_P Parameter: Tissue Value: Aerial
  misc_feature: MA Experiment ID: 20000173 Result: Up-regulated in Transcription
  misc_feature: MA Experiment 20000173 PARAMETER Experiment Name: At_42deg_Heat_P Parameter: Age (day) Value: 14
  misc_feature: MA Experiment 20000173 PARAMETER Experiment Name: At_42deg_Heat_P Parameter: Organism Value: A. thaliana
  misc_feature: MA Experiment 20000173 PARAMETER Experiment Name: At_42deg_Heat_P Parameter: Plant Line Value: WS
  misc_feature: MA Experiment 20000173 PARAMETER Experiment Name: At_42deg_Heat_P Parameter: Temperature (deg C) Value: 42 vs. 22
  misc_feature: MA Experiment 20000173 PARAMETER Experiment Name: At_42deg_Heat_P Parameter: Timepoint (hr) Value: 6
  misc_feature: MA Experiment 20000173 PARAMETER Experiment Name: At_42deg_Heat_P Parameter: Tissue Value: Aerial
  misc_feature: MA Experiment ID: 20000496 Result: Up-regulated in Transcription
  misc_feature: MA Experiment 20000496 PARAMETER Experiment Name: At_Guard_Cells_P Parameter: Harvest Date Value: 7/19/2002
  misc_feature: MA Experiment 20000496 PARAMETER Experiment Name: At_Guard_Cells_P Parameter: Organism Value: Canola
  misc_feature: MA Experiment 20000496 PARAMETER Experiment Name: At_Guard_Cells_P Parameter: Tissue Value: Guard Cells vs. Leaves
  misc_feature: Pfam Name: GST_C Pfam Description: Glutathione S-transferase, C-terminal domain
actagtctcttatctttcagcaactactctcatactttccgactaaaaaaatggttaccgtcaagctctacggcatggcctactcgacctgcactaagcgtgtatacaccaccgccaaggaaatcggtgtcgatgtcaagatcgttcctgttgatcttatgaaaggcgagcacaaggagcccgcgtaccttgacaactaccacccattcggtgttatccccgtccttgaggacgaagatggaacaaagatctatgaatctcgcgctatttcccgttacttggtcgccaagtatggaaaaggttcttccttgcttcccagcccgagcgaccccaaggcatatggactgtttgaacaagcagccagcgtcgagtactcgagctttgaccctccggcttcctcccttgcctacgagcgggtctttgcaggaatgaggggtttgaaaaccaacgaagaattggctaaaaaatacgtcgacacgttgaatgcgaagatggatggctacgagcgcattttgtccaagcaaaagtatctcgctggaaacgatttcaccctcgccgacttgttccatttgccctacggtgccatggtagctcagctcgagcctaccgtcctggattccaaaccccatgtcaaggcgtggtgggctgcatcccttcgcgtgattcctggaaggctgctcaggaactcaagtaaggagttcatgtgatgccaagtgtgtgtagtagctacgattgaaagtgaaatatacaagcaatacttacgaagcg

SEQ ID NO: 76620 - protein, 218 aa, Arabidopsis thaliana
  peptide (1)..(218): Ceres Seq. ID no. 7108617
  misc_feature: Pfam Name: GST_C Pfam Description: Glutathione S-transferase, C-terminal domain
  misc_feature (1)..(218): Homolog of NCBI NO: 1170093 NR Description: GLUTATHIONE S-TRANSFERASE PM239X14 (GST CLASS-PHI)
  misc_feature (2)..(198): Homolog of NCBI NO: 1353751 NR Description: glutathione S-transferase III homolog
  misc_feature (2)..(198): Homolog of NCBI NO: 15224581 NR Description: glutathione transferase, putative; protein id: supported by cDNA: gi_13926309 [Arabidopsis thaliana]
  misc_feature (4)..(198): Homolog of NCBI NO: 18150415 NR Description: glutathione S-transferase [Allium cepa]
  misc_feature (1)..(197): Homolog of NCBI NO: 12643792 NR Description: Glutathione S-transferase 6 (GST class phi)
  misc_feature (1)..(197): Homolog of NCBI NO: 30690772 NR Description: glutathione transferase, putative (GST6)
  misc_feature (1)..(198): Homolog of NCBI NO: 23504745 NR Description: glutathione transferase F5 [Triticum aestivum]
  misc_feature (1)..(200): Homolog of NCBI NO: 1170090 NR Description: GLUTATHIONE S-TRANSFERASE III (GST-III) (GST
  misc_feature (4)..(199): Homolog of NCBI NO: 1170094 NR Description: Glutathione S-transferase (GST class-PHI) (25 kDa binding protein) >gi|860956|emb|CAA55039.1| glutathione
  misc_feature (1)..(199): Homolog of NCBI NO: 31790095 NR Description: glutathione S-transferase 2 [Brassica juncea]
MVTVKLYGMAYSTCTKRVYTTAKEIGVDVKIVPVDLMKGEHKEPAYLDNYHPFGVIPVLEDEDGTKIYESRAISRYLVAKYGKGSSLLPSPSDPKAYGLFEQAASVEYSSFDPPASSLAYERVFAGMRGLKTNEELAKKYVDTLNAKMDGYERILSKQKYLAGNDFTLADLFHLPYGAMVAQLEPTVLDSKPHVKAWWAASLRVIPGRLLRNSSKEFM

SEQ ID NO: 76621 - protein, 210 aa, Arabidopsis thaliana
  peptide (1)..(210): Ceres Seq. ID no. 7108618
  misc_feature: Pfam Name: GST_C Pfam Description: Glutathione S-transferase, C-terminal domain
  misc_feature (1)..(210): Homolog of NCBI NO: 1170093 NR Description: GLUTATHIONE S-TRANSFERASE PM239X14 (GST CLASS-PHI)
  misc_feature (1)..(190): Homolog of NCBI NO: 1353751 NR Description: glutathione S-transferase III homolog
  misc_feature (1)..(190): Homolog of NCBI NO: 15224581 NR Description: glutathione transferase, putative; protein id: supported by cDNA: gi_13926309 [Arabidopsis thaliana]
  misc_feature (1)..(190): Homolog of NCBI NO: 18150415 NR Description: glutathione S-transferase [Allium cepa]
  misc_feature (1)..(189): Homolog of NCBI NO: 12643792 NR Description: Glutathione S-transferase 6 (GST class phi)
  misc_feature (1)..(189): Homolog of NCBI NO: 30690772 NR Description: glutathione transferase, putative (GST6)
  misc_feature (1)..(190): Homolog of NCBI NO: 23504745 NR Description: glutathione transferase F5 [Triticum aestivum]
  misc_feature (1)..(192): Homolog of NCBI NO: 1170090 NR Description: GLUTATHIONE S-TRANSFERASE III (GST-III) (GST
  misc_feature (1)..(191): Homolog of NCBI NO: 1170094 NR Description: Glutathione S-transferase (GST class-PHI) (25 kDa binding protein) >gi|860956|emb|CAA55039.1| glutathione
  misc_feature (1)..(191): Homolog of NCBI NO: 31790095 NR Description: glutathione S-transferase 2 [Brassica juncea]
MAYSTCTKRVYTTAKEIGVDVKIVPVDLMKGEHKEPAYLDNYHPFGVIPVLEDEDGTKIYESRAISRYLVAKYGKGSSLLPSPSDPKAYGLFEQAASVEYSSFDPPASSLAYERVFAGMRGLKTNEELAKKYVDTLNAKMDGYERILSKQKYLAGNDFTLADLFHLPYGAMVAQLEPTVLDSKPHVKAWWAASLRVIPGRLLRNSSKEFM

SEQ ID NO: 76622 - protein, 182 aa, Arabidopsis thaliana
  peptide (1)..(182): Ceres Seq. ID no. 7108619
  misc_feature: Pfam Name: GST_C Pfam Description: Glutathione S-transferase, C-terminal domain
  misc_feature (1)..(182): Homolog of NCBI NO: 1170093 NR Description: GLUTATHIONE S-TRANSFERASE PM239X14 (GST CLASS-PHI)
  misc_feature (1)..(162): Homolog of NCBI NO: 1353751 NR Description: glutathione S-transferase III homolog
  misc_feature (1)..(162): Homolog of NCBI NO: 15224581 NR Description: glutathione transferase, putative; protein id: supported by cDNA: gi_13926309 [Arabidopsis thaliana]
  misc_feature (1)..(162): Homolog of NCBI NO: 18150415 NR Description: glutathione S-transferase [Allium cepa]
  misc_feature (1)..(161): Homolog of NCBI NO: 12643792 NR Description: Glutathione S-transferase 6 (GST class phi)
  misc_feature (1)..(161): Homolog of NCBI NO: 30690772 NR Description: glutathione transferase, putative (GST6)
  misc_feature (1)..(162): Homolog of NCBI NO: 23504745 NR Description: glutathione transferase F5 [Triticum aestivum]
  misc_feature (1)..(164): Homolog of NCBI NO: 1170090 NR Description: GLUTATHIONE S-TRANSFERASE III (GST-III) (GST
  misc_feature (1)..(163): Homolog of NCBI NO: 1170094 NR Description: Glutathione S-transferase (GST class-PHI) (25 kDa binding protein) >gi|860956|emb|CAA55039.1| glutathione
  misc_feature (1)..(163): Homolog of NCBI NO: 31790095 NR Description: glutathione S-transferase 2 [Brassica juncea]
MKGEHKEPAYLDNYHPFGVIPVLEDEDGTKIYESRAISRYLVAKYGKGSSLLPSPSDPKAYGLFEQAASVEYSSFDPPASSLAYERVFAGMRGLKTNEELAKKYVDTLNAKMDGYERILSKQKYLAGNDFTLADLFHLPYGAMVAQLEPTVLDSKPHVKAWWAASLRVIPGRLLRNSSKEFM

SEQ ID NO: 76623 - DNA, 1106 bp, Arabidopsis thaliana
  misc_feature (1)..(1106): Ceres Seq. ID no. 7108656
  misc_feature: MA Experiment ID: 20000169 Result: Up-regulated in Transcription
  misc_feature: MA Experiment 20000169 PARAMETER Experiment Name: At_100uM_ABA_P Parameter: Age (day) Value: 14
  misc_feature: MA Experiment 20000169 PARAMETER Experiment Name: At_100uM_ABA_P Parameter: Organism Value: A. thaliana
  misc_feature: MA Experiment 20000169 PARAMETER Experiment Name: At_100uM_ABA_P Parameter: Plant Line Value: WS
  misc_feature: MA Experiment 20000169 PARAMETER Experiment Name: At_100uM_ABA_P Parameter: Timepoint (hr) Value: 6
  misc_feature: MA Experiment 20000169 PARAMETER Experiment Name: At_100uM_ABA_P Parameter: Tissue Value: Aerial
  misc_feature: MA Experiment 20000169 PARAMETER Experiment Name: At_100uM_ABA_P Parameter: Treatment Value: 100uM ABA vs. No Treatment
  misc_feature: MA Experiment ID: 20000180 Result: Up-regulated in Transcription
  misc_feature: MA Experiment 20000180 PARAMETER Experiment Name: At_Germinating_Seeds_P Parameter: Age (hr) Value: 24 vs. 0
  misc_feature: MA Experiment 20000180 PARAMETER Experiment Name: At_Germinating_Seeds_P Parameter: Tissue Value: Germinating Seeds
  misc_feature: MA Experiment ID: 20000182 Result: Up-regulated in Transcription
  misc_feature: MA Experiment 20000182 PARAMETER Experiment Name: At_2mM_SA_P Parameter: Age (day) Value: 14
  misc_feature: MA Experiment 20000182 PARAMETER Experiment Name: At_2mM_SA_P Parameter: Organism Value: A. thaliana
  misc_feature: MA Experiment 20000182 PARAMETER Experiment Name: At_2mM_SA_P Parameter: Plant Line Value: WS
  misc_feature: MA Experiment 20000182 PARAMETER Experiment Name: At_2mM_SA_P Parameter: Timepoint (hr) Value: 6
  misc_feature: MA Experiment 20000182 PARAMETER Experiment Name: At_2mM_SA_P Parameter: Tissue Value: Aerial
  misc_feature: MA Experiment 20000182 PARAMETER Experiment Name: At_2mM_SA_P Parameter: Treatment Value: 2mM SA vs. No Treatment
  misc_feature: MA Experiment ID: 20000234 Result: Down-regulated in Transcription
  misc_feature: MA Experiment 20000234 PARAMETER Experiment Name: At_Siliques_P Parameter: Age (day) Value: 21
  misc_feature: MA Experiment 20000234 PARAMETER Experiment Name: At_Siliques_P Parameter: Organism Value: A. thaliana
  misc_feature: MA Experiment 20000234 PARAMETER Experiment Name: At_Siliques_P Parameter: Plant Line Value: WS
  misc_feature: MA Experiment 20000234 PARAMETER Experiment Name: At_Siliques_P Parameter: Tissue Value: Less Than 5mm Siliques vs. Whole Plant
  misc_feature: MA Experiment ID: 20000451 Result: Down-regulated in Transcription
  misc_feature: MA Experiment 20000451 PARAMETER Experiment Name: At_CS6879_Shoots-Roots_P Parameter: Age (day) Value: 14
  misc_feature: MA Experiment 20000451 PARAMETER Experiment Name: At_CS6879_Shoots-Roots_P Parameter: Organism Value: A. thaliana
  misc_feature: MA Experiment 20000451 PARAMETER Experiment Name: At_CS6879_Shoots-Roots_P Parameter: Plant Line Value: CS6879 vs. WS
  misc_feature: MA Experiment 20000451 PARAMETER Experiment Name: At_CS6879_Shoots-Roots_P Parameter: Tissue Value: Roots
  misc_feature: MA Experiment ID: 20000506 Result: Up-regulated in Transcription
  misc_feature: MA Experiment 20000506 PARAMETER Experiment Name: At_Wounding_P Parameter: Organism Value: A. thaliana
  misc_feature: MA Experiment 20000506 PARAMETER Experiment Name: At_Wounding_P Parameter: Plant Line Value: WS
  misc_feature: MA Experiment 20000506 PARAMETER Experiment Name: At_Wounding_P Parameter: Timepoint (hr) Value: 6
  misc_feature: MA Experiment 20000506 PARAMETER Experiment Name: At_Wounding_P Parameter: Tissue Value: Aerial
  misc_feature: MA Experiment 20000506 PARAMETER Experiment Name: At_Wounding_P Parameter: Treatment Value: Wounding vs. No Wounding
  misc_feature: MA Experiment ID: 20001247 Result: Up-regulated in Transcription
  misc_feature: MA Experiment 20001247 PARAMETER Experiment Name: At_Far-red-induction_P Parameter: Age (day) Value: 7
  misc_feature: MA Experiment 20001247 PARAMETER Experiment Name: At_Far-red-induction_P Parameter: Light Value: Far-red vs. White
  misc_feature: MA Experiment 20001247 PARAMETER Experiment Name: At_Far-red-induction_P Parameter: Organism Value: A. thaliana
  misc_feature: MA Experiment 20001247 PARAMETER Experiment Name: At_Far-red-induction_P Parameter: Plant Line Value: Columbia
  misc_feature: MA Experiment 20001247 PARAMETER Experiment Name: At_Far-red-induction_P Parameter: Timepoint (hr) Value: 1
  misc_feature: MA Experiment 20001247 PARAMETER Experiment Name: At_Far-red-induction_P Parameter: Tissue Value: Whole Plant
  misc_feature: MA Experiment ID: 20001450 Result: Up-regulated in Transcription
  misc_feature: MA Experiment 20001450 PARAMETER Experiment Name: At_Far-red-induction_P Parameter: Age (day) Value: 7
  misc_feature: MA Experiment 20001450 PARAMETER Experiment Name: At_Far-red-induction_P Parameter: Light Value: Far-red vs. White
  misc_feature: MA Experiment 20001450 PARAMETER Experiment Name: At_Far-red-induction_P Parameter: Organism Value: A. thaliana
  misc_feature: MA Experiment 20001450 PARAMETER Experiment Name: At_Far-red-induction_P Parameter: Plant Line Value: Columbia
  misc_feature: MA Experiment 20001450 PARAMETER Experiment Name: At_Far-red-induction_P Parameter: Timepoint (hr) Value: 8
  misc_feature: MA Experiment 20001450 PARAMETER Experiment Name: At_Far-red-induction_P Parameter: Tissue Value: Whole Plant
  misc_feature: MA Experiment ID: 20001556 Result: Down-regulated in Transcription
  misc_feature: MA Experiment 20001556 PARAMETER Experiment Name: At_Drought_Soil_Dry_P Parameter: Age (day) Value: 26
  misc_feature: MA Experiment 20001556 PARAMETER Experiment Name: At_Drought_Soil_Dry_P Parameter: Organism Value: A. thaliana
  misc_feature: MA Experiment 20001556 PARAMETER Experiment Name: At_Drought_Soil_Dry_P Parameter: Plant Line Value: WS
  misc_feature: MA Experiment 20001556 PARAMETER Experiment Name: At_Drought_Soil_Dry_P Parameter: Post Timepoint (hr) Value: None
  misc_feature: MA Experiment 20001556 PARAMETER Experiment Name: At_Drought_Soil_Dry_P Parameter: Post-Treatment Value: None
  misc_feature: MA Experiment 20001556 PARAMETER Experiment Name: At_Drought_Soil_Dry_P Parameter: Timepoint (day) Value: 12
  misc_feature: MA Experiment 20001556 PARAMETER Experiment Name: At_Drought_Soil_Dry_P Parameter: Treatment Value: Drought vs. No Drought
  misc_feature: MA Experiment ID: 20001559 Result: Down-regulated in Transcription
  misc_feature: MA Experiment 20001559 PARAMETER Experiment Name: At_Drought_Soil_Dry_P Parameter: Age (day) Value: 28
  misc_feature: MA Experiment 20001559 PARAMETER Experiment Name: At_Drought_Soil_Dry_P Parameter: Organism Value: A. thaliana
  misc_feature: MA Experiment 20001559 PARAMETER Experiment Name: At_Drought_Soil_Dry_P Parameter: Plant Line Value: WS
  misc_feature: MA Experiment 20001559 PARAMETER Experiment Name: At_Drought_Soil_Dry_P Parameter: Post Timepoint (hr) Value: 29
  misc_feature: MA Experiment 20001559 PARAMETER Experiment Name: At_Drought_Soil_Dry_P Parameter: Post-Treatment Value: Re-Water vs. No Drought
  misc_feature: MA Experiment 20001559 PARAMETER Experiment Name: At_Drought_Soil_Dry_P Parameter: Timepoint (day) Value: 14
  misc_feature: MA Experiment 20001559 PARAMETER Experiment Name: At_Drought_Soil_Dry_P Parameter: Treatment Value: Drought vs. No Drought
  misc_feature: MA Experiment ID: 20001905 Result: Down-regulated in Transcription
  misc_feature: MA Experiment 20001905 PARAMETER Experiment Name: At_Drought_Reproduction_P Parameter: Age (day) Value: 40
  misc_feature: MA Experiment 20001905 PARAMETER Experiment Name: At_Drought_Reproduction_P Parameter: Organism Value: A. thaliana
  misc_feature: MA Experiment 20001905 PARAMETER Experiment Name: At_Drought_Reproduction_P Parameter: Plant Line Value: WS
  misc_feature: MA Experiment 20001905 PARAMETER Experiment Name: At_Drought_Reproduction_P Parameter: Timepoint (day) Value: 10
  misc_feature: MA Experiment 20001905 PARAMETER Experiment Name: At_Drought_Reproduction_P Parameter: Tissue Value: Rosettes
  misc_feature: MA Experiment 20001905 PARAMETER Experiment Name: At_Drought_Reproduction_P Parameter: Treatment Value: Drought vs. No Drought
  misc_feature: MA Experiment ID: 20001907 Result: Down-regulated in Transcription
  misc_feature: MA Experiment 20001907 PARAMETER Experiment Name: At_Drought_Reproduction_P Parameter: Age (day) Value: 37
  misc_feature: MA Experiment 20001907 PARAMETER Experiment Name: At_Drought_Reproduction_P Parameter: Organism Value: A. thaliana
  misc_feature: MA Experiment 20001907 PARAMETER Experiment Name: At_Drought_Reproduction_P Parameter: Plant Line Value: WS
  misc_feature: MA Experiment 20001907 PARAMETER Experiment Name: At_Drought_Reproduction_P Parameter: Timepoint (day) Value: 7
  misc_feature: MA Experiment 20001907 PARAMETER Experiment Name: At_Drought_Reproduction_P Parameter: Tissue Value: Siliques
  misc_feature: MA Experiment 20001907 PARAMETER Experiment Name: At_Drought_Reproduction_P Parameter: Treatment Value: Drought vs. No Drought
  misc_feature: MA Experiment ID: 20001908 Result: Down-regulated in Transcription
  misc_feature: MA Experiment 20001908 PARAMETER Experiment Name: At_Drought_Reproduction_P Parameter: Age (day) Value: 40
  misc_feature: MA Experiment 20001908 PARAMETER Experiment Name: At_Drought_Reproduction_P Parameter: Organism Value: A. thaliana
  misc_feature: MA Experiment 20001908 PARAMETER Experiment Name: At_Drought_Reproduction_P Parameter: Plant Line Value: WS
  misc_feature: MA Experiment 20001908 PARAMETER Experiment Name: At_Drought_Reproduction_P Parameter: Timepoint (day) Value: 10
  misc_feature: MA Experiment 20001908 PARAMETER Experiment Name: At_Drought_Reproduction_P Parameter: Tissue Value: Siliques
  misc_feature: MA Experiment 20001908 PARAMETER Experiment Name: At_Drought_Reproduction_P Parameter: Treatment Value: Drought vs. No Drought
ctggcttgaaaaaccagagctttacggtttctctctacagagatcgaagatatggaaggcaaggaagaagacgttagagttggagctaacaagttcccggagagacaaccaatcggaacatcagctcagagtgacaaggactacaaggaaccaccaccagctccgtttttcgaacctggtgagctttcttcatggtctttttggagagctgggatcgctgagttcatcgctacttttctctttctctacatcactgtcttgactgttatgggagtgaaaaggtcaccgaacatgtgtgcttccgtcggaatccaaggaatcgcttgggctttcggtggtatgatatttgccttagtctactgtaccgctggtatctccggtggacacatcaacccagcggttacttttggtctgttcttagcccggaagctgtcgcttactagagctctgtactacatagtgatgcagtgcttgggagctatctgtggtgctggagtggttaaagggttccagcctaagcaataccaggctctaggaggaggagctaacactgtggcacatggttacaccaagggaagtggtcttggtgctgagatcattggcacattcgttcttgtatacacagtcttctcagcaactgacgccaagagaaatgctcgtgactctcatgtccctattcttgcaccactcccaatcgggtttgcggttttcttggttcacttggcaaccatcccaatcactgccacaggcatcaacccagctagaagccttggagctgcaatcatctacaacaaagaccattcctgggatgaccactgggtgttttgggttggccccttcattggagctgcacttgctgctctttaccatgtggttgtcatcagagccatccccttcaagtccagaagctaagtaaaaacaagacatcaagtcctctggtttctggccttgtccttagttagttgcttctatagttctattgttgatctactacatgtatgtgtgcaatgtgtttatctatgtgccctcttaatgcaatatttgtaaacaaggaagaagtcaaaggagaactatttcgaaattatgatgtttaacatgtttattag

SEQ ID NO: 76624 - protein, 286 aa, Arabidopsis thaliana
  peptide (1)..(286): Ceres Seq. ID no. 7108657
  misc_feature (44)..(273): Pfam Name: Major intrinsic protein Pfam Description: Major intrinsic protein
  misc_feature (1)..(286): Homolog of NCBI NO: 472873 NR Description: plasma membrane intrinsic protein 1a [Arabidopsis
  misc_feature (1)..(286): Homolog of NCBI NO: 15233109 NR Description: plasma membrane intrinsic protein 1a; protein id: supported by cDNA: 6690., supported by cDNA: gi_16648674, by cDNA: gi_20453350 [Arabidopsis thaliana]
  misc_feature (1)..(286): Homolog of NCBI NO: 3551131 NR Description: plasma membrane aquaporin (PAQ1) [Raphanus
  misc_feature (1)..(286): Homolog of NCBI NO: 21594059 NR Description: plasma membrane intrinsic protein 1a [Arabidopsis
  misc_feature (1)..(286): Homolog of NCBI NO: 10799093 NR Description: aquaporin PIP1b1 [Brassica oleracea]
  misc_feature (1)..(286): Homolog of NCBI NO: 15225913 NR Description: aquaporin (plasma membrane intrinsic protein 1B); id: At2g45960.1, supported by cDNA: 108944., supported by cDNA: supported by cDNA: gi_17380949, supported by cDNA: membrane
  misc_feature (1)..(286): Homolog of NCBI NO: 10799095 NR Description: aquaporin PIP1b2 [Brassica oleracea]
  misc_feature (1)..(286): Homolog of NCBI NO: 1199804 NR Description: transmembrane channel protein [Brassica oleracea]
  misc_feature (1)..(286): Homolog of NCBI NO: 4467357 NR Description: PIP1b protein [Arabidopsis thaliana]
  misc_feature (1)..(286): Homolog of NCBI NO: 7209556 NR Description: plasma membrane aquaporin 1b [Raphanus sativus]
MEGKEEDVRVGANKFPERQPIGTSAQSDKDYKEPPPAPFFEPGELSSWSFWRAGIAEFIATFLFLYITVLTVMGVKRSPNMCASVGIQGIAWAFGGMIFALVYCTAGISGGHINPAVTFGLFLARKLSLTRALYYIVMQCLGAICGAGVVKGFQPKQYQALGGGANTVAHGYTKGSGLGAEIIGTFVLVYTVFSATDAKRNARDSHVPILAPLPIGFAVFLVHLATIPITATGINPARSLGAAIIYNKDHSWDDHWVFWVGPFIGAALAALYHVVVIRAIPFKSRS

SEQ ID NO: 76625 - protein, 214 aa, Arabidopsis thaliana
  peptide (1)..(214): Ceres Seq. ID no. 7108658
  misc_feature (1)..(201): Pfam Name: Major intrinsic protein Pfam Description: Major intrinsic protein
  misc_feature (1)..(214): Homolog of NCBI NO: 472873 NR Description: plasma membrane intrinsic protein 1a [Arabidopsis
  misc_feature (1)..(214): Homolog of NCBI NO: 15233109 NR Description: plasma membrane intrinsic protein 1a; protein id: supported by cDNA: 6690., supported by cDNA: gi_16648674, by cDNA: gi_20453350 [Arabidopsis thaliana]
  misc_feature (1)..(214): Homolog of NCBI NO: 3551131 NR Description: plasma membrane aquaporin (PAQ1) [Raphanus
  misc_feature (1)..(214): Homolog of NCBI NO: 21594059 NR Description: plasma membrane intrinsic protein 1a [Arabidopsis
  misc_feature (1)..(214): Homolog of NCBI NO: 10799093 NR Description: aquaporin PIP1b1 [Brassica oleracea]
  misc_feature (1)..(214): Homolog of NCBI NO: 15225913 NR Description: aquaporin (plasma membrane intrinsic protein 1B); id: At2g45960.1, supported by cDNA: 108944., supported by cDNA: supported by cDNA: gi_17380949, supported by cDNA: membrane
  misc_feature (1)..(214): Homolog of NCBI NO: 10799095 NR Description: aquaporin PIP1b2 [Brassica oleracea]
  misc_feature (1)..(214): Homolog of NCBI NO: 1199804 NR Description: transmembrane channel protein [Brassica oleracea]
  misc_feature (1)..(214): Homolog of NCBI NO: 4467357 NR Description: PIP1b protein [Arabidopsis thaliana]
  misc_feature (1)..(214): Homolog of NCBI NO: 7209556 NR Description: plasma membrane aquaporin 1b [Raphanus sativus]
MGVKRSPNMCASVGIQGIAWAFGGMIFALVYCTAGISGGHINPAVTFGLFLARKLSLTRALYYIVMQCLGAICGAGVVKGFQPKQYQALGGGANTVAHGYTKGSGLGAEIIGTFVLVYTVFSATDAKRNARDSHVPILAPLPIGFAVFLVHLATIPITATGINPARSLGAAIIYNKDHSWDDHWVFWVGPFIGAALAALYHVVVIRAIPFKSRS

SEQ ID NO: 76626 - protein, 206 aa, Arabidopsis thaliana
  peptide (1)..(206): Ceres Seq. ID no. 7108659
  misc_feature (1)..(193): Pfam Name: Major intrinsic protein Pfam Description: Major intrinsic protein
  misc_feature (1)..(206): Homolog of NCBI NO: 472873 NR Description: plasma membrane intrinsic protein 1a [Arabidopsis
  misc_feature (1)..(206): Homolog of NCBI NO: 15233109 NR Description: plasma membrane intrinsic protein 1a; protein id: supported by cDNA: 6690., supported by cDNA: gi_16648674, by cDNA: gi_20453350 [Arabidopsis thaliana]
  misc_feature (1)..(206): Homolog of NCBI NO: 3551131 NR Description: plasma membrane aquaporin (PAQ1) [Raphanus
  misc_feature (1)..(206): Homolog of NCBI NO: 21594059 NR Description: plasma membrane intrinsic protein 1a [Arabidopsis
  misc_feature (1)..(206): Homolog of NCBI NO: 10799093 NR Description: aquaporin PIP1b1 [Brassica oleracea]
  misc_feature (1)..(206): Homolog of NCBI NO: 15225913 NR Description: aquaporin (plasma membrane intrinsic protein 1B); id: At2g45960.1, supported by cDNA: 108944., supported by cDNA: supported by cDNA: gi_17380949, supported by cDNA: membrane
  misc_feature (1)..(206): Homolog of NCBI NO: 10799095 NR Description: aquaporin PIP1b2 [Brassica oleracea]
  misc_feature (1)..(206): Homolog of NCBI NO: 1199804 NR Description: transmembrane channel protein [Brassica oleracea]
  misc_feature (1)..(206): Homolog of NCBI NO: 4467357 NR Description: PIP1b protein [Arabidopsis thaliana]
  misc_feature (1)..(206): Homolog of NCBI NO: 7209556 NR Description: plasma membrane aquaporin 1b [Raphanus sativus]
MCASVGIQGIAWAFGGMIFALVYCTAGISGGHINPAVTFGLFLARKLSLTRALYYIVMQCLGAICGAGVVKGFQPKQYQALGGGANTVAHGYTKGSGLGAEIIGTFVLVYTVFSATDAKRNARDSHVPILAPLPIGFAVFLVHLATIPITATGINPARSLGAAIIYNKDHSWDDHWVFWVGPFIGAALAALYHVVVIRAIPFKSRS

SEQ ID NO: 76627 - DNA, 1317 bp, Arabidopsis thaliana
  misc_feature (1)..(1317): Ceres Seq. ID no. 7108668
  misc_feature: MA Experiment ID: 20000169 Result: Up-regulated in Transcription
  misc_feature: MA Experiment 20000169 PARAMETER Experiment Name: At_100uM_ABA_P Parameter: Age (day) Value: 14
  misc_feature: MA Experiment 20000169 PARAMETER Experiment Name: At_100uM_ABA_P Parameter: Organism Value: A. thaliana
  misc_feature: MA Experiment 20000169 PARAMETER Experiment Name: At_100uM_ABA_P Parameter: Plant Line Value: WS
  misc_feature: MA Experiment 20000169 PARAMETER Experiment Name: At_100uM_ABA_P Parameter: Timepoint (hr) Value: 6
  misc_feature: MA Experiment 20000169 PARAMETER Experiment Name: At_100uM_ABA_P Parameter: Tissue Value: Aerial
  misc_feature: MA Experiment 20000169 PARAMETER Experiment Name: At_100uM_ABA_P Parameter: Treatment Value: 100uM ABA vs. No Treatment
  misc_feature: MA Experiment ID: 20000182 Result: Up-regulated in Transcription
  misc_feature: MA Experiment 20000182 PARAMETER Experiment Name: At_2mM_SA_P Parameter: Age (day) Value: 14
  misc_feature: MA Experiment 20000182 PARAMETER Experiment Name: At_2mM_SA_P Parameter: Organism Value: A. thaliana
  misc_feature: MA Experiment 20000182 PARAMETER Experiment Name: At_2mM_SA_P Parameter: Plant Line Value: WS
  misc_feature: MA Experiment 20000182 PARAMETER Experiment Name: At_2mM_SA_P Parameter: Timepoint (hr) Value: 6
  misc_feature: MA Experiment 20000182 PARAMETER Experiment Name: At_2mM_SA_P Parameter: Tissue Value: Aerial
  misc_feature: MA Experiment 20000182 PARAMETER Experiment Name: At_2mM_SA_P Parameter: Treatment Value: 2mM SA vs. No Treatment
  misc_feature: MA Experiment ID: 20000184 Result: Up-regulated in Transcription
  misc_feature: MA Experiment 20000184 PARAMETER Experiment Name: At_Shoots__P Parameter: Age (day) Value: 7
  misc_feature: MA Experiment 20000184 PARAMETER Experiment Name: At_Shoots__P Parameter: Tissue Value: Shoots vs. Whole Plant
  misc_feature: MA Experiment ID: 20000185 Result: Down-regulated in Transcription
  misc_feature: MA Experiment 20000185 PARAMETER Experiment Name: At_Roots__P Parameter: Age (day) Value: 7 vs. 21
  misc_feature: MA Experiment 20000185 PARAMETER Experiment Name: At_Roots__P Parameter: Organism Value: A. thaliana
  misc_feature: MA Experiment 20000185 PARAMETER Experiment Name: At_Roots__P Parameter: Tissue Value: Roots vs. Whole Plant
  misc_feature: MA Experiment ID: 20000438 Result: Up-regulated in Transcription
  misc_feature: MA Experiment 20000438 PARAMETER Experiment Name: At_Shoots__P Parameter: Age (day) Value: 14
  misc_feature: MA Experiment 20000438 PARAMETER Experiment Name: At_Shoots__P Parameter: Tissue Value: Shoots vs. Whole Plant
  misc_feature: MA Experiment ID: 20000439 Result: Down-regulated in Transcription
  misc_feature: MA Experiment 20000439 PARAMETER Experiment Name: At_Roots__P Parameter: Age (day) Value: 14 vs. 21
  misc_feature: MA Experiment 20000439 PARAMETER Experiment Name: At_Roots__P Parameter: Organism Value: A. thaliana
  misc_feature: MA Experiment 20000439 PARAMETER Experiment Name: At_Roots__P Parameter: Tissue Value: Roots vs. Whole Plant
  misc_feature: MA Experiment ID: 20000453 Result: Up-regulated in Transcription
  misc_feature: MA Experiment 20000453 PARAMETER Experiment Name: At_100uM_ABA_P Parameter: Age (day) Value: 15
  misc_feature: MA Experiment 20000453 PARAMETER Experiment Name: At_100uM_ABA_P Parameter: Organism Value: A. thaliana
  misc_feature: MA Experiment 20000453 PARAMETER Experiment Name: At_100uM_ABA_P Parameter: Plant Line Value: WS
  misc_feature: MA Experiment 20000453 PARAMETER Experiment Name: At_100uM_ABA_P Parameter: Timepoint (hr) Value: 24
  misc_feature: MA Experiment 20000453 PARAMETER Experiment Name: At_100uM_ABA_P Parameter: Tissue Value: Aerial
  misc_feature: MA Experiment 20000453 PARAMETER Experiment Name: At_100uM_ABA_P Parameter: Treatment Value: 100uM ABA vs. No Treatment
  misc_feature: MA Experiment ID: 20000455 Result: Up-regulated in Transcription
  misc_feature: MA Experiment 20000455 PARAMETER Experiment Name: At_100uM_ABA_P Parameter: Age (day) Value: 16
  misc_feature: MA Experiment 20000455 PARAMETER Experiment Name: At_100uM_ABA_P Parameter: Organism Value: A. thaliana
  misc_feature: MA Experiment 20000455 PARAMETER Experiment Name: At_100uM_ABA_P Parameter: Plant Line Value: WS
  misc_feature: MA Experiment 20000455 PARAMETER Experiment Name: At_100uM_ABA_P Parameter: Timepoint (hr) Value: 48
  misc_feature: MA Experiment 20000455 PARAMETER Experiment Name: At_100uM_ABA_P Parameter: Tissue Value: Aerial
  misc_feature: MA Experiment 20000455 PARAMETER Experiment Name: At_100uM_ABA_P Parameter: Treatment Value: 100uM ABA vs. No Treatment
  misc_feature: MA Experiment ID: 20000527 Result: Down-regulated in Transcription
  misc_feature: MA Experiment 20000527 PARAMETER Experiment Name: At_10percent_PEG_P Parameter: Age (day) Value: 20
  misc_feature: MA Experiment 20000527 PARAMETER Experiment Name: At_10percent_PEG_P Parameter: Organism Value: A. thaliana
  misc_feature: MA Experiment 20000527 PARAMETER Experiment Name: At_10percent_PEG_P Parameter: Plant Line Value: WS
  misc_feature: MA Experiment 20000527 PARAMETER Experiment Name: At_10percent_PEG_P Parameter: Timepoint (day) Value: 20
  misc_feature: MA Experiment 20000527 PARAMETER Experiment Name: At_10percent_PEG_P Parameter: Tissue Value: Whole Plant
  misc_feature: MA Experiment 20000527 PARAMETER Experiment Name: At_10percent_PEG_P Parameter: Treatment Value: 10percent PEG vs. No Treatment
  misc_feature: MA Experiment ID: 20001904 Result: Up-regulated in Transcription
  misc_feature: MA Experiment 20001904 PARAMETER Experiment Name: At_Drought_Reproduction_P Parameter: Age (day) Value: 37
  misc_feature: MA Experiment 20001904 PARAMETER Experiment Name: At_Drought_Reproduction_P Parameter: Organism Value: A. thaliana
  misc_feature: MA Experiment 20001904 PARAMETER Experiment Name: At_Drought_Reproduction_P Parameter: Plant Line Value: WS
  misc_feature: MA Experiment 20001904 PARAMETER Experiment Name: At_Drought_Reproduction_P Parameter: Timepoint (day) Value: 7
  misc_feature: MA Experiment 20001904 PARAMETER Experiment Name: At_Drought_Reproduction_P Parameter: Tissue Value: Rosettes
  misc_feature: MA Experiment 20001904 PARAMETER Experiment Name: At_Drought_Reproduction_P Parameter: Treatment Value: Drought vs. No Drought
  misc_feature: Pfam Name: ADH_zinc_N Pfam Description: Zinc-binding dehydrogenase
caaatacttacttttgaatccgtttttttcattgtttgatcgattatgggaaaggttcttcagaaagaggcgttcggattagccgcgaaagacaattccggagttctctcgcctttcagtttctctagaagggcgacgggtgaaaaggatgtgaggttcaaagtcttgttctgtggaatttgccacactgatctgagtatggccaaaaacgaatgggggttaactacttatcctcttgtccctgggcatgagattgtgggcgtggtgactgaagttggagccaaagtgaaaaaattcaacgctggagacaaagtcggagttggctatatggccggctcgtgcaggtcatgtgacagctgcaatgatggcgacgagaactactgtccaaagatgatcttaacgtccggagccaaaaactttgacgataccatgacccatggtggatactccgaccacatggtgtgtgctgaggatttcatcatccgtattcctgacaatctcccattagacggtgccgcaccactactctgcgccggggtcacggtctactcccccatgaagtatcacgggctcgacaagcccggtatgcacatcggtgtggtgggactaggcggtttgggccatgtagcagtgaaatttgctaaggctatgggtactaaagttacggttattagtacttcggagcgtaagagagacgaggccgttactcggcttggtgcggatgccttcttggtgagccgtgacccgaaacaaatgaaggatgcaatggggactatggatggtatcattgataccgtatctgcgacccatccacttcttccgctgcttggtttgcttaaaaataagggaaaacttgttatggttggtgcaccagcagaaccgctcgagcttcctgtttttcctctcatctttgggcggaagatggtggtgggtagtatggtaggaggtataaaggagacgcaagagatggtggatttggctggaaaacacaacatcacggcggatattgagctcatctctgcggattatgtcaacaccgccatggaacggcttgcaaaggctgacgttaagtaccgatttgtgattgatgttgccaacacgatgaagccaactccttaactagaaagcttaagaattgaatatccccaaagcttttttcatgtttttgcttgtttgtttgatgttgtttgctggcgactttgtgtgtagtattaccacactgcatgtactttatcagttgaataaacttgaatattgtatttaataagctatctacattagattttggggaagtttgattaaaatttattccgattg

SEQ ID NO: 76628 - protein, 357 aa, Arabidopsis thaliana
  peptide (1)..(357): Ceres Seq. ID no. 7108669
  misc_feature: Pfam Name: ADH_zinc_N Pfam Description: Zinc-binding dehydrogenase
  misc_feature (1)..(357): Homolog of NCBI NO: 16267 NR Description: Eli3-1 [Arabidopsis thaliana]
  misc_feature (1)..(357): Homolog of NCBI NO: 15233642 NR Description: cinnamyl-alcohol dehydrogenase ELI3-1; protein At4g37980.1, supported by cDNA: gi_13430625, supported by cDNA:
  misc_feature (1)..(357): Homolog of NCBI NO: 15233643 NR Description: cinnamyl-alcohol dehydrogenase ELI3-2; protein At4g37990.1, supported by cDNA: gi_13605755 [Arabidopsis >gi|1168730|sp|Q02972|MTD2_ARATH Probable mannitol dehydrogenase
  misc_feature (6)..(354): Homolog of NCBI NO: 10720093 NR Description: Probable mannitol dehydrogenase (NAD-dependent dehydrogenase) >gi|4097522|gb|AAD10327.1| cinnamyl alcohol
  misc_feature (8)..(354): Homolog of NCBI NO: 13507210 NR Description: cinnamyl alcohol dehydrogenase [Fragaria x
  misc_feature (8)..(356): Homolog of NCBI NO: 14279694 NR Description: sinapyl alcohol dehydrogenase [Populus
  misc_feature (8)..(356): Homolog of NCBI NO: 33519154 NR Description: 10-hydroxygeraniol oxidoreductase [Camptotheca
  misc_feature (7)..(354): Homolog of NCBI NO: 10720090 NR Description: Probable mannitol dehydrogenase (NAD-dependent
  misc_feature (8)..(354): Homolog of NCBI NO: 34013695 NR Description: 10-hydroxygeraniol oxidoreductase [Catharanthus
  misc_feature (8)..(353): Homolog of NCBI NO: 25815120 NR Description: alcohol NADP+ oxidoreductase [Solanum tuberosum]
MGKVLQKEAFGLAAKDNSGVLSPFSFSRRATGEKDVRFKVLFCGICHTDLSMAKNEWGLTTYPLVPGHEIVGVVTEVGAKVKKFNAGDKVGVGYMAGSCRSCDSCNDGDENYCPKMILTSGAKNFDDTMTHGGYSDHMVCAEDFIIRIPDNLPLDGAAPLLCAGVTVYSPMKYHGLDKPGMHIGVVGLGGLGHVAVKFAKAMGTKVTVISTSERKRDEAVTRLGADAFLVSRDPKQMKDAMGTMDGIIDTVSATHPLLPLLGLLKNKGKLVMVGAPAEPLELPVFPLIFGRKMVVGSMVGGIKETQEMVDLAGKHNITADIELISADYVNTAMERLAKADVKYRFVIDVANTMKPTP

SEQ ID NO: 76629 - protein, 306 aa, Arabidopsis thaliana; identical to SEQ ID NO: 41177
  peptide (1)..(306): Ceres Seq. ID no. 7108670
  misc_feature: Pfam Name: ADH_zinc_N Pfam Description: Zinc-binding dehydrogenase
  misc_feature (1)..(306): Homolog of NCBI NO: 16267 NR Description: Eli3-1 [Arabidopsis thaliana]
  misc_feature (1)..(306): Homolog of NCBI NO: 15233642 NR Description: cinnamyl-alcohol dehydrogenase ELI3-1; protein At4g37980.1, supported by cDNA: gi_13430625, supported by cDNA:
  misc_feature (1)..(306): Homolog of NCBI NO: 15233643 NR Description: cinnamyl-alcohol dehydrogenase ELI3-2; protein At4g37990.1, supported by cDNA: gi_13605755 [Arabidopsis >gi|1168730|sp|Q02972|MTD2_ARATH Probable mannitol dehydrogenase
  misc_feature (1)..(303): Homolog of NCBI NO: 10720093 NR Description: Probable mannitol dehydrogenase (NAD-dependent dehydrogenase) >gi|4097522|gb|AAD10327.1| cinnamyl alcohol
  misc_feature (1)..(303): Homolog of NCBI NO: 13507210 NR Description: cinnamyl alcohol dehydrogenase [Fragaria x
  misc_feature (1)..(305): Homolog of NCBI NO: 14279694 NR Description: sinapyl alcohol dehydrogenase [Populus
  misc_feature (1)..(305): Homolog of NCBI NO: 33519154 NR Description: 10-hydroxygeraniol oxidoreductase [Camptotheca
  misc_feature (1)..(303): Homolog of NCBI NO: 10720090 NR Description: Probable mannitol dehydrogenase (NAD-dependent
  misc_feature (1)..(303): Homolog of NCBI NO: 34013695 NR Description: 10-hydroxygeraniol oxidoreductase [Catharanthus
  misc_feature (1)..(302): Homolog of NCBI NO: 25815120 NR Description: alcohol NADP+ oxidoreductase [Solanum tuberosum]

SEQ ID NO: 76630 - protein, 263 aa, Arabidopsis thaliana; identical to SEQ ID NO: 41178
  peptide (1)..(263): Ceres Seq. ID no. 7108671
  misc_feature: Pfam Name: ADH_zinc_N Pfam Description: Zinc-binding dehydrogenase
  misc_feature (1)..(263): Homolog of NCBI NO: 16267 NR Description: Eli3-1 [Arabidopsis thaliana]
  misc_feature (1)..(263): Homolog of NCBI NO: 15233642 NR Description: cinnamyl-alcohol dehydrogenase ELI3-1; protein At4g37980.1, supported by cDNA: gi_13430625, supported by cDNA:
  misc_feature (1)..(263): Homolog of NCBI NO: 15233643 NR Description: cinnamyl-alcohol dehydrogenase ELI3-2; protein At4g37990.1, supported by cDNA: gi_13605755 [Arabidopsis >gi|1168730|sp|Q02972|MTD2_ARATH Probable mannitol dehydrogenase
  misc_feature (1)..(260): Homolog of NCBI NO: 10720093 NR Description: Probable mannitol dehydrogenase (NAD-dependent dehydrogenase) >gi|4097522|gb|AAD10327.1| cinnamyl alcohol
  misc_feature (1)..(260): Homolog of NCBI NO: 13507210 NR Description: cinnamyl alcohol dehydrogenase [Fragaria x
  misc_feature (1)..(262): Homolog of NCBI NO: 14279694 NR Description: sinapyl alcohol dehydrogenase [Populus
  misc_feature (1)..(262): Homolog of NCBI NO: 33519154 NR Description: 10-hydroxygeraniol oxidoreductase [Camptotheca
  misc_feature (1)..(260): Homolog of NCBI NO: 10720090 NR Description: Probable mannitol dehydrogenase (NAD-dependent
  misc_feature (1)..(260): Homolog of NCBI NO: 34013695 NR Description: 10-hydroxygeraniol oxidoreductase [Catharanthus
  misc_feature (1)..(259): Homolog of NCBI NO: 25815120 NR Description: alcohol NADP+ oxidoreductase [Solanum tuberosum]

SEQ ID NO: 76631 - DNA, 1184 bp, Arabidopsis thaliana
  misc_feature (1)..(1184): Ceres Seq. ID no. 7108672
  misc_feature: MA Experiment ID: 108434 Result: Down-regulated in Transcription
  misc_feature: MA Experiment 108434 PARAMETER Experiment Name: At_Root_Tips_cDNA_P Parameter: Tissue Value: Root Tips
  misc_feature: MA Experiment ID: 108435 Result: Down-regulated in Transcription
  misc_feature: MA Experiment 108435 PARAMETER Experiment Name: At_stm_Mutants_cDNA_P Parameter: Plant Line Value: wt Landsburg vs stm
  misc_feature: MA Experiment 108435 PARAMETER Experiment Name: At_stm_Mutants_cDNA_P Parameter: Tissue Value: Shoot Apical Meristem Region
  misc_feature: MA Experiment ID: 108461 Result: Up-regulated in Transcription
  misc_feature: MA Experiment 108461 PARAMETER Experiment Name: At_Germinating_Seeds_cDNA_P Parameter: Age (day) Value: 1 vs. 0
  misc_feature: MA Experiment 108461 PARAMETER Experiment Name: At_Germinating_Seeds_cDNA_P Parameter: Tissue Value: Germinating Seeds
  misc_feature: MA Experiment ID: 108462 Result: Up-regulated in Transcription
  misc_feature: MA Experiment 108462 PARAMETER Experiment Name: At_Germinating_Seeds_cDNA_P Parameter: Age (day) Value: 2 vs. 0
  misc_feature: MA Experiment 108462 PARAMETER Experiment Name: At_Germinating_Seeds_cDNA_P Parameter: Tissue Value: Germinating Seeds
  misc_feature: MA Experiment ID: 108463 Result: Up-regulated in Transcription
  misc_feature: MA Experiment 108463 PARAMETER Experiment Name: At_Germinating_Seeds_cDNA_P Parameter: Age (day) Value: 3 vs. 0
  misc_feature: MA Experiment 108463 PARAMETER Experiment Name: At_Germinating_Seeds_cDNA_P Parameter: Tissue Value: Germinating Seeds
  misc_feature: MA Experiment ID: 108464 Result: Up-regulated in Transcription
  misc_feature: MA Experiment 108464 PARAMETER Experiment Name: At_Germinating_Seeds_cDNA_P Parameter: Age (day) Value: 4 vs. 0
  misc_feature: MA Experiment 108464 PARAMETER Experiment Name: At_Germinating_Seeds_cDNA_P Parameter: Tissue Value: Germinating Seeds
  misc_feature: MA Experiment ID: 108469 Result: Up-regulated in Transcription
  misc_feature: MA Experiment ID: 108488 Result: Down-regulated in Transcription
  misc_feature: MA Experiment ID: 108573 Result: Down-regulated in Transcription
  misc_feature: MA Experiment 108573 PARAMETER Experiment Name: At_Drought_cDNA_P Parameter: Timepoint (hr) Value: 6
  misc_feature: MA Experiment 108573 PARAMETER Experiment Name: At_Drought_cDNA_P Parameter: Tissue Value: Aerial
  misc_feature: MA Experiment 108573 PARAMETER Experiment Name: At_Drought_cDNA_P Parameter: Treatment Value: Drought vs. No Drought
  misc_feature: MA Experiment ID: 108577 Result: Down-regulated in Transcription
  misc_feature: MA Experiment 108577 PARAMETER Experiment Name: At_42deg_Heat_cDNA_P Parameter: Temperature (deg C) Value: 42 vs. 22
  misc_feature: MA Experiment 108577 PARAMETER Experiment Name: At_42deg_Heat_cDNA_P Parameter: Timepoint (hr) Value: 6
  misc_feature: MA Experiment 108577 PARAMETER Experiment Name: At_42deg_Heat_cDNA_P Parameter: Tissue Value: Aerial
  misc_feature: MA Experiment ID: 108594 Result: Down-regulated in Transcription
  misc_feature: MA Experiment 108594 PARAMETER Experiment Name: At_Ler-rhl_Root_cDNA_P Parameter: Plant Line Value: null
  misc_feature: MA Experiment ID: 108595 Result: Down-regulated in Transcription
  misc_feature: MA Experiment 108595 PARAMETER Experiment Name: At_Ler-pi_Ovule_cDNA_P Parameter: Plant Line Value: null
  misc_feature: MA Experiment ID: 108668 Result: Up-regulated in Transcription
  misc_feature: MA Experiment 108668 PARAMETER Experiment Name: At_2mM_SA_cDNA_P Parameter: Plant Line Value: WS
  misc_feature: MA Experiment 108668 PARAMETER Experiment Name: At_2mM_SA_cDNA_P Parameter: Timepoint (hr) Value: 6
  misc_feature: MA Experiment 108668 PARAMETER Experiment Name: At_2mM_SA_cDNA_P Parameter: Treatment Value: 2mM SA vs. No Treatment
  misc_feature: MA Experiment ID: 20000088 Result: Up-regulated in Transcription
  misc_feature: MA Experiment 20000088 PARAMETER Experiment Name: At_100uM_ABA_Mutants_cDNA_P Parameter: Plant Line Value: Landsberg
  misc_feature: MA Experiment 20000088 PARAMETER Experiment Name: At_100uM_ABA_Mutants_cDNA_P Parameter: Timepoint (hr) Value: 6
  misc_feature: MA Experiment 20000088 PARAMETER Experiment Name: At_100uM_ABA_Mutants_cDNA_P Parameter: Tissue Value: Aerial
  misc_feature: MA Experiment 20000088 PARAMETER Experiment Name: At_100uM_ABA_Mutants_cDNA_P Parameter: Treatment Value: 100uM ABA vs. No Treatment
  misc_feature: MA Experiment ID: 20000113 Result: Down-regulated in Transcription
  misc_feature: MA Experiment 20000113 PARAMETER Experiment Name: At_42deg_Heat_cDNA_P Parameter: Temperature (deg C) Value: 42 vs. 22
  misc_feature: MA Experiment 20000113 PARAMETER Experiment Name: At_42deg_Heat_cDNA_P Parameter: Timepoint (hr) Value: 8
  misc_feature: MA Experiment 20000113 PARAMETER Experiment Name: At_42deg_Heat_cDNA_P Parameter: Tissue Value: Aerial
  misc_feature: MA Experiment ID: 20000173 Result: Down-regulated in Transcription
  misc_feature: MA Experiment 20000173 PARAMETER Experiment Name: At_42deg_Heat_P Parameter: Age (day) Value: 14
  misc_feature: MA Experiment 20000173 PARAMETER Experiment Name: At_42deg_Heat_P Parameter: Organism Value: A. thaliana
  misc_feature: MA Experiment 20000173 PARAMETER Experiment Name: At_42deg_Heat_P Parameter: Plant Line Value: WS
  misc_feature: MA Experiment 20000173 PARAMETER Experiment Name: At_42deg_Heat_P Parameter: Temperature (deg C) Value: 42 vs. 22
  misc_feature: MA Experiment 20000173 PARAMETER Experiment Name: At_42deg_Heat_P Parameter: Timepoint (hr) Value: 6
  misc_feature: MA Experiment 20000173 PARAMETER Experiment Name: At_42deg_Heat_P Parameter: Tissue Value: Aerial
  misc_feature: MA Experiment ID: 20000179 Result: Down-regulated in Transcription
  misc_feature: MA Experiment 20000179 PARAMETER Experiment Name: At_Germinating_Seeds_P Parameter: Age (hr) Value: 6 vs. 0
  misc_feature: MA Experiment 20000179 PARAMETER Experiment Name: At_Germinating_Seeds_P Parameter: Tissue Value: Germinating Seeds
  misc_feature: MA Experiment ID: 20000180 Result: Up-regulated in Transcription
  misc_feature: MA Experiment 20000180 PARAMETER Experiment Name: At_Germinating_Seeds_P Parameter: Age (hr) Value: 24 vs. 0
  misc_feature: MA Experiment 20000180 PARAMETER Experiment Name: At_Germinating_Seeds_P Parameter: Tissue Value: Germinating Seeds
  misc_feature: MA Experiment ID: 20000182 Result: Up-regulated in Transcription
  misc_feature: MA Experiment 20000182 PARAMETER Experiment Name: At_2mM_SA_P Parameter: Age (day) Value: 14
  misc_feature: MA Experiment 20000182 PARAMETER Experiment Name: At_2mM_SA_P Parameter: Organism Value: A. thaliana
  misc_feature: MA Experiment 20000182 PARAMETER Experiment Name: At_2mM_SA_P Parameter: Plant Line Value: WS
  misc_feature: MA Experiment 20000182 PARAMETER Experiment Name: At_2mM_SA_P Parameter: Timepoint (hr) Value: 6
  misc_feature: MA Experiment 20000182 PARAMETER Experiment Name: At_2mM_SA_P Parameter: Tissue Value: Aerial
  misc_feature: MA Experiment 20000182 PARAMETER Experiment Name: At_2mM_SA_P Parameter: Treatment Value: 2mM SA vs. No Treatment
  misc_feature: MA Experiment ID: 20000184 Result: Up-regulated in Transcription
  misc_feature: MA Experiment 20000184 PARAMETER Experiment Name: At_Shoots__P Parameter: Age (day) Value: 7
  misc_feature: MA Experiment 20000184 PARAMETER Experiment Name: At_Shoots__P Parameter: Tissue Value: Shoots vs. Whole Plant
  misc_feature: MA Experiment ID: 20000234 Result: Down-regulated in Transcription
  misc_feature: MA Experiment 20000234 PARAMETER Experiment Name: At_Siliques_P Parameter: Age (day) Value: 21
  misc_feature: MA Experiment 20000234 PARAMETER Experiment Name: At_Siliques_P Parameter: Organism Value: A. thaliana
  misc_feature: MA Experiment 20000234 PARAMETER Experiment Name: At_Siliques_P Parameter: Plant Line Value: WS
  misc_feature: MA Experiment 20000234 PARAMETER Experiment Name: At_Siliques_P Parameter: Tissue Value: Less Than 5mm Siliques vs. Whole Plant
  misc_feature: MA Experiment ID: 20000264 Result: Down-regulated in Transcription
  misc_feature: MA Experiment 20000264 PARAMETER Experiment Name: At_Open_Flower_P Parameter: Age (day) Value: 21
  misc_feature: MA Experiment 20000264 PARAMETER Experiment Name: At_Open_Flower_P Parameter: Plant Line Value: WS
  misc_feature: MA Experiment 20000264 PARAMETER Experiment Name: At_Open_Flower_P Parameter: Tissue Value: Open Flower vs. Whole Plant
  misc_feature: MA Experiment ID: 20000265 Result: Down-regulated in Transcription
  misc_feature: MA Experiment 20000265 PARAMETER Experiment Name: At_Open_Flower_P Parameter: Age (day) Value: 21
  misc_feature: MA Experiment 20000265 PARAMETER Experiment Name: At_Open_Flower_P Parameter: Plant Line Value: WS
  misc_feature: MA Experiment 20000265 PARAMETER Experiment Name: At_Open_Flower_P Parameter: Tissue Value: Closed Flower vs. Whole Plant
  misc_feature: MA Experiment ID: 20000286 Result: Down-regulated in Transcription
  misc_feature: MA Experiment 20000286 PARAMETER Experiment Name: At_Open_Flower_P Parameter: Age (day) Value: 21
  misc_feature: MA Experiment 20000286 PARAMETER Experiment Name: At_Open_Flower_P Parameter: Plant Line Value: WS
  misc_feature: MA Experiment 20000286 PARAMETER Experiment Name: At_Open_Flower_P Parameter: Tissue Value: Half Open vs. Whole Plant
  misc_feature: MA Experiment ID: 20000436 Result: Down-regulated in Transcription
  misc_feature: MA Experiment 20000436 PARAMETER Experiment Name: At_Drought_P Parameter: Age (day) Value: 7
  misc_feature: MA Experiment 20000436 PARAMETER Experiment Name: At_Drought_P Parameter: Organism Value: A. thaliana
  misc_feature: MA Experiment 20000436 PARAMETER Experiment Name: At_Drought_P Parameter: Plant Line Value: WS
  misc_feature: MA Experiment 20000436 PARAMETER Experiment Name: At_Drought_P Parameter: Timepoint (hr) Value: 12
  misc_feature: MA Experiment 20000436 PARAMETER Experiment Name: At_Drought_P Parameter: Tissue Value: Whole Plant
  misc_feature: MA Experiment 20000436 PARAMETER Experiment Name: At_Drought_P Parameter: Treatment Value: Drought vs. No Drought
  misc_feature: MA Experiment ID: 20000437 Result: Down-regulated in Transcription
  misc_feature: MA Experiment 20000437 PARAMETER Experiment Name: At_Drought_P Parameter: Age (day) Value: 8
  misc_feature: MA Experiment 20000437 PARAMETER Experiment Name: At_Drought_P Parameter: Organism Value: A. thaliana
  misc_feature: MA Experiment 20000437 PARAMETER Experiment Name: At_Drought_P Parameter: Plant Line Value: WS
  misc_feature: MA Experiment 20000437 PARAMETER Experiment Name: At_Drought_P Parameter: Timepoint (hr) Value: 24
  misc_feature: MA Experiment 20000437 PARAMETER Experiment Name: At_Drought_P Parameter: Tissue Value: Whole Plant
  misc_feature: MA Experiment 20000437 PARAMETER Experiment Name: At_Drought_P Parameter: Treatment Value: Drought vs. No Drought
  misc_feature: MA Experiment ID: 20000438 Result: Up-regulated in Transcription
  misc_feature: MA Experiment 20000438 PARAMETER Experiment Name: At_Shoots__P Parameter: Age (day) Value: 14
  misc_feature: MA Experiment 20000438 PARAMETER Experiment Name: At_Shoots__P Parameter: Tissue Value: Shoots vs. Whole Plant
  misc_feature: MA Experiment ID: 20000439 Result: Down-regulated in Transcription
  misc_feature: MA Experiment 20000439 PARAMETER Experiment Name: At_Roots__P Parameter: Age (day) Value: 14 vs. 21
  misc_feature: MA Experiment 20000439 PARAMETER Experiment Name: At_Roots__P Parameter: Organism Value: A. thaliana
  misc_feature: MA Experiment 20000439 PARAMETER Experiment Name: At_Roots__P Parameter: Tissue Value: Roots vs. Whole Plant
  misc_feature: MA Experiment ID: 20000441 Result: Up-regulated in Transcription
  misc_feature: MA Experiment 20000441 PARAMETER Experiment Name: At_1uM_BR-BRZ__P Parameter: Tissue Value: Shoot Apices
  misc_feature: MA Experiment 20000441 PARAMETER Experiment Name: At_1uM_BR-BRZ__P Parameter: Treatment Value: 1uM BR vs. No Treatment
  misc_feature: MA Experiment ID: 20000527 Result: Down-regulated in Transcription
  misc_feature: MA Experiment 20000527 PARAMETER Experiment Name: At_10percent_PEG_P Parameter: Age (day) Value: 20
  misc_feature: MA Experiment 20000527 PARAMETER Experiment Name: At_10percent_PEG_P Parameter: Organism Value: A. thaliana
  misc_feature: MA Experiment 20000527 PARAMETER Experiment Name: At_10percent_PEG_P Parameter: Plant Line Value: WS
  misc_feature: MA Experiment 20000527 PARAMETER Experiment Name: At_10percent_PEG_P Parameter: Timepoint (day) Value: 20
  misc_feature: MA Experiment 20000527 PARAMETER Experiment Name: At_10percent_PEG_P Parameter: Tissue Value: Whole Plant
  misc_feature: MA Experiment 20000527 PARAMETER Experiment Name: At_10percent_PEG_P Parameter: Treatment Value: 10percent PEG vs. No Treatment
  misc_feature: MA Experiment ID: 20001248 Result: Up-regulated in Transcription
  misc_feature: MA Experiment 20001248 PARAMETER Experiment Name: At_Far-red-induction_P Parameter: Age (day) Value: 7
  misc_feature: MA Experiment 20001248 PARAMETER Experiment Name: At_Far-red-induction_P Parameter: Light Value: Far-red vs. White
  misc_feature: MA Experiment 20001248 PARAMETER Experiment Name: At_Far-red-induction_P Parameter: Organism Value: A. thaliana
  misc_feature: MA Experiment 20001248 PARAMETER Experiment Name: At_Far-red-induction_P Parameter: Plant Line Value: Columbia
  misc_feature: MA Experiment 20001248 PARAMETER Experiment Name: At_Far-red-induction_P Parameter: Timepoint (hr) Value: 4
  misc_feature: MA Experiment 20001248 PARAMETER Experiment Name: At_Far-red-induction_P Parameter: Tissue Value: Whole Plant
  misc_feature: MA Experiment ID: 20001554 Result: Down-regulated in Transcription
  misc_feature: MA Experiment 20001554 PARAMETER Experiment Name: At_Drought_Soil_Dry_P Parameter: Age (day) Value: 21
  misc_feature: MA Experiment 20001554 PARAMETER Experiment Name: At_Drought_Soil_Dry_P Parameter: Organism Value: A. thaliana
  misc_feature: MA Experiment 20001554 PARAMETER Experiment Name: At_Drought_Soil_Dry_P Parameter: Plant Line Value: WS
  misc_feature: MA Experiment 20001554 PARAMETER Experiment Name: At_Drought_Soil_Dry_P Parameter: Post Timepoint (hr) Value: None
  misc_feature: MA Experiment 20001554 PARAMETER Experiment Name: At_Drought_Soil_Dry_P Parameter: Post-Treatment Value: None
  misc_feature: MA Experiment 20001554 PARAMETER Experiment Name: At_Drought_Soil_Dry_P Parameter: Timepoint (day) Value: 7
  misc_feature: MA Experiment 20001554 PARAMETER Experiment Name: At_Drought_Soil_Dry_P Parameter: Treatment Value: Drought vs. No Drought
  misc_feature: MA Experiment ID: 20001555 Result: Down-regulated in Transcription
  misc_feature: MA Experiment 20001555 PARAMETER Experiment Name: At_Drought_Soil_Dry_P Parameter: Age (day) Value: 24
  misc_feature: MA Experiment 20001555 PARAMETER Experiment Name: At_Drought_Soil_Dry_P Parameter: Organism Value: A. thaliana
  misc_feature: MA Experiment 20001555 PARAMETER Experiment Name: At_Drought_Soil_Dry_P Parameter: Plant Line Value: WS
  misc_feature: MA Experiment 20001555 PARAMETER Experiment Name: At_Drought_Soil_Dry_P Parameter: Post Timepoint (hr) Value: None
  misc_feature: MA Experiment 20001555 PARAMETER Experiment Name: At_Drought_Soil_Dry_P Parameter: Post-Treatment Value: None
  misc_feature: MA Experiment 20001555 PARAMETER Experiment Name: At_Drought_Soil_Dry_P Parameter: Timepoint (day) Value: 10
  misc_feature: MA Experiment 20001555 PARAMETER Experiment Name: At_Drought_Soil_Dry_P Parameter: Treatment Value: Drought vs. No Drought
  misc_feature: MA Experiment ID: 20001557 Result: Up-regulated in Transcription
  misc_feature: MA Experiment 20001557 PARAMETER Experiment Name: At_Drought_Soil_Dry_P Parameter: Age (day) Value: 27
  misc_feature: MA Experiment 20001557 PARAMETER Experiment Name: At_Drought_Soil_Dry_P Parameter: Organism Value: A. thaliana
  misc_feature: MA Experiment 20001557 PARAMETER Experiment Name: At_Drought_Soil_Dry_P Parameter: Plant Line Value: WS
  misc_feature: MA Experiment 20001557 PARAMETER Experiment Name: At_Drought_Soil_Dry_P Parameter: Post Timepoint (hr) Value: 3
  misc_feature: MA Experiment 20001557 PARAMETER Experiment Name: At_Drought_Soil_Dry_P Parameter: Post-Treatment Value: Re-Water vs. No Drought
  misc_feature: MA Experiment 20001557 PARAMETER Experiment Name: At_Drought_Soil_Dry_P Parameter: Timepoint (day) Value: 13
  misc_feature: MA Experiment 20001557 PARAMETER Experiment Name: At_Drought_Soil_Dry_P Parameter: Treatment Value: Drought vs. No Drought
  misc_feature: MA Experiment ID: 20001905 Result: Up-regulated in Transcription
  misc_feature: MA Experiment 20001905 PARAMETER Experiment Name: At_Drought_Reproduction_P Parameter: Age (day) Value: 40
  misc_feature: MA Experiment 20001905 PARAMETER Experiment Name: At_Drought_Reproduction_P Parameter: Organism Value: A. thaliana
  misc_feature: MA Experiment 20001905 PARAMETER Experiment Name: At_Drought_Reproduction_P Parameter: Plant Line Value: WS
  misc_feature: MA Experiment 20001905 PARAMETER Experiment Name: At_Drought_Reproduction_P Parameter: Timepoint (day) Value: 10
  misc_feature: MA Experiment 20001905 PARAMETER Experiment Name: At_Drought_Reproduction_P Parameter: Tissue Value: Rosettes
  misc_feature: MA Experiment 20001905 PARAMETER Experiment Name: At_Drought_Reproduction_P Parameter: Treatment Value: Drought vs. No Drought
  misc_feature: MA Experiment ID: 20001911 Result: Down-regulated in Transcription
  misc_feature: MA Experiment 20001911 PARAMETER Experiment Name: At_Drought_Reproduction_P Parameter: Age (day) Value: 40
  misc_feature: MA Experiment 20001911 PARAMETER Experiment Name: At_Drought_Reproduction_P Parameter: Organism Value: A. thaliana
  misc_feature: MA Experiment 20001911 PARAMETER Experiment Name: At_Drought_Reproduction_P Parameter: Plant Line Value: WS
  misc_feature: MA Experiment 20001911 PARAMETER Experiment Name: At_Drought_Reproduction_P Parameter: Timepoint (day) Value: 10
  misc_feature: MA Experiment 20001911 PARAMETER Experiment Name: At_Drought_Reproduction_P Parameter: Tissue Value: Flowers
  misc_feature: MA Experiment 20001911 PARAMETER Experiment Name: At_Drought_Reproduction_P Parameter: Treatment Value: Drought vs. No Drought
cgttgctgtcgaagttaggccaagaaacccatttaaaaaaaaagagagagagatggagagtttcccgatcatcaatctcgagaagcttaatggagaagagagagcaatcactatggagaagatcaaagacgcttgtgaaaactggggcttctttgagtgtgtgaaccatgggatttcactcgagcttttggacaaagtggagaagatgaccaaggaacattacaagaagtgcatggaagagagattcaaggaatcgattaagaacagaggtcttgactctcttcgctctgaagtcaacgacgttgactgggaatccactttctacctcaagcaccttcccgtctctaatatctccgatgtccctgatctcgacgacgattacagaacgttaatgaaagacttcgccggaaagatagagaagttgtcggaggagctactggatctgctgtgcgagaatctcggtttagagaagggttatttaaaaaaggtgttttacgggtcgaaaagaccgacttttggaaccaaagtcagcaattatccaccttgtcctaatccggacctagtcaagggtctccgagcccacaccgacgccggcggcatcatcctcctcttccaagacgacaaagtcagtggacttcagcttcttaaagacggcgagtgggtcgatgttcctccggttaagcattcaatcgtcgttaatctcggcgatcaacttgaggtgataaccaatgggaagtacaagagtgtggaacatagagtgctatctcagacagacggagaaggaagaatgtcgatcgcatcattctataatccgggaagcgactctgttatttttccggtgccggagctgatcggaaaagaagcagagaaggagaagaaagagaactatccgagatttgtgtttgaagattacatgaaactctactctgctgtcaagtttcaggccaaggaaccaaggtttgaagccatgaaagctatggagacaactgtggccaacaatgttggaccattggccactgcgtgaatgatatgtaactggttaataaatatatatatatatatatatatagtctttatataatgtcttagaaacttgattattcactatacgaataattttgttcatgttgttgtatgtttaagtggtgaatgtgttatatatgggaattaatgttttctgttcg

SEQ ID NO: 76632 - protein, 340 aa, Arabidopsis thaliana
  peptide (1)..(340): Ceres Seq. ID no. 7108673
  misc_feature (170)..(271): Pfam Name: 2OG-Fe(II) oxygenase superfamily Pfam Description: 2OG-Fe(II) oxygenase superfamily
  misc_feature (18)..(340): Homolog of NCBI NO: 541861 NR Description: ethylene-forming enzyme - Arabidopsis thaliana
  misc_feature (18)..(340): Homolog of NCBI NO: 15220386 NR Description: 1-aminocyclopropane-1-carboxylate oxidase; id: At1g05010.1, supported by cDNA: gi_13877784 [Arabidopsis
  misc_feature (18)..(340): Homolog of NCBI NO: 13877785 NR Description: putative 1-aminocyclopropane-1-carboxylate
  misc_feature (18)..(340): Homolog of NCBI NO: 27447954 NR Description: putative 1-aminocyclopropane-1-carboxylate
  misc_feature (18)..(340): Homolog of NCBI NO: 7576446 NR Description: 1-aminocyclopropane-1-carboxylate oxidase
  misc_feature (18)..(339): Homolog of NCBI NO: 14573463 NR Description: 1-aminocyclopropane-1-carboxylate oxidase
  misc_feature (18)..(339): Homolog of NCBI NO: 398994 NR Description: 1-aminocyclopropane-1-carboxylate oxidase (ACC
  misc_feature (18)..(340): Homolog of NCBI NO: 584711 NR Description: 1-aminocyclopropane-1-carboxylate oxidase 3 (ACC
  misc_feature (18)..(340): Homolog of NCBI NO: 532530 NR Description: 1-aminocyclopropane-1-carboxylate oxidase
  misc_feature (18)..(340): Homolog of NCBI NO: 1085595 NR Description: 1-aminocyclopropane-1-carboxylate oxidase
VAVEVRPRNPFKKKEREMESFPIINLEKLNGEERAITMEKIKDACENWGFFECVNHGISLELLDKVEKMTKEHYKKCMEERFKESIKNRGLDSLRSEVNDVDWESTFYLKHLPVSNISDVPDLDDDYRTLMKDFAGKIEKLSEELLDLLCENLGLEKGYLKKVFYGSKRPTFGTKVSNYPPCPNPDLVKGLRAHTDAGGIILLFQDDKVSGLQLLKDGEWVDVPPVKHSIVVNLGDQLEVITNGKYKSVEHRVLSQTDGEGRMSIASFYNPGSDSVIFPVPELIGKEAEKEKKENYPRFVFEDYMKLYSAVKFQAKEPRFEAMKAMETTVANNVGPLATA

SEQ ID NO: 76633 - protein, 323 aa, Arabidopsis thaliana
  peptide (1)..(323): Ceres Seq. ID no. 7108674
  misc_feature (153)..(254): Pfam Name: 2OG-Fe(II) oxygenase superfamily Pfam Description: 2OG-Fe(II) oxygenase superfamily
  misc_feature (1)..(323): Homolog of NCBI NO: 541861 NR Description: ethylene-forming enzyme - Arabidopsis thaliana
  misc_feature (1)..(323): Homolog of NCBI NO: 15220386 NR Description: 1-aminocyclopropane-1-carboxylate oxidase; id: At1g05010.1, supported by cDNA: gi_13877784 [Arabidopsis
  misc_feature (1)..(323): Homolog of NCBI NO: 13877785 NR Description: putative 1-aminocyclopropane-1-carboxylate
  misc_feature (1)..(323): Homolog of NCBI NO: 27447954 NR Description: putative 1-aminocyclopropane-1-carboxylate
  misc_feature (1)..(323): Homolog of NCBI NO: 7576446 NR Description: 1-aminocyclopropane-1-carboxylate oxidase
  misc_feature (1)..(322): Homolog of NCBI NO: 14573463 NR Description: 1-aminocyclopropane-1-carboxylate oxidase
  misc_feature (1)..(322): Homolog of NCBI NO: 398994 NR Description: 1-aminocyclopropane-1-carboxylate oxidase (ACC
  misc_feature (1)..(323): Homolog of NCBI NO: 584711 NR Description: 1-aminocyclopropane-1-carboxylate oxidase 3 (ACC
  misc_feature (1)..(323): Homolog of NCBI NO: 532530 NR Description: 1-aminocyclopropane-1-carboxylate oxidase
  misc_feature (1)..(323): Homolog of NCBI NO: 1085595 NR Description: 1-aminocyclopropane-1-carboxylate oxidase
MESFPIINLEKLNGEERAITMEKIKDACENWGFFECVNHGISLELLDKVEKMTKEHYKKCMEERFKESIKNRGLDSLRSEVNDVDWESTFYLKHLPVSNISDVPDLDDDYRTLMKDFAGKIEKLSEELLDLLCENLGLEKGYLKKVFYGSKRPTFGTKVSNYPPCPNPDLVKGLRAHTDAGGIILLFQDDKVSGLQLLKDGEWVDVPPVKHSIVVNLGDQLEVITNGKYKSVEHRVLSQTDGEGRMSIASFYNPGSDSVIFPVPELIGKEAEKEKKENYPRFVFEDYMKLYSAVKFQAKEPRFEAMKAMETTVANNVGPLATA

SEQ ID NO: 76634 - protein, 303 aa, Arabidopsis thaliana
  peptide (1)..(303): Ceres Seq. ID no. 7108675
  misc_feature (133)..(234): Pfam Name: 2OG-Fe(II) oxygenase superfamily Pfam Description: 2OG-Fe(II) oxygenase superfamily
  misc_feature (1)..(303): Homolog of NCBI NO: 541861 NR Description: ethylene-forming enzyme - Arabidopsis thaliana
  misc_feature (1)..(303): Homolog of NCBI NO: 15220386 NR Description: 1-aminocyclopropane-1-carboxylate oxidase; id: At1g05010.1, supported by cDNA: gi_13877784 [Arabidopsis
  misc_feature (1)..(303): Homolog of NCBI NO: 13877785 NR Description: putative 1-aminocyclopropane-1-carboxylate
  misc_feature (1)..(303): Homolog of NCBI NO: 27447954 NR Description: putative 1-aminocyclopropane-1-carboxylate
  misc_feature (1)..(303): Homolog of NCBI NO: 7576446 NR Description: 1-aminocyclopropane-1-carboxylate oxidase
  misc_feature (1)..(302): Homolog of NCBI NO: 14573463 NR Description: 1-aminocyclopropane-1-carboxylate oxidase
  misc_feature (1)..(302): Homolog of NCBI NO: 398994 NR Description: 1-aminocyclopropane-1-carboxylate oxidase (ACC
  misc_feature (1)..(303): Homolog of NCBI NO: 584711 NR Description: 1-aminocyclopropane-1-carboxylate oxidase 3 (ACC
  misc_feature (1)..(303): Homolog of NCBI NO: 532530 NR Description: 1-aminocyclopropane-1-carboxylate oxidase
  misc_feature (1)..(303): Homolog of NCBI NO: 1085595 NR Description: 1-aminocyclopropane-1-carboxylate oxidase
MEKIKDACENWGFFECVNHGISLELLDKVEKMTKEHYKKCMEERFKESIKNRGLDSLRSEVNDVDWESTFYLKHLPVSNISDVPDLDDDYRTLMKDFAGKIEKLSEELLDLLCENLGLEKGYLKKVFYGSKRPTFGTKVSNYPPCPNPDLVKGLRAHTDAGGIILLFQDDKVSGLQLLKDGEWVDVPPVKHSIVVNLGDQLEVITNGKYKSVEHRVLSQTDGEGRMSIASFYNPGSDSVIFPVPELIGKEAEKEKKENYPRFVFEDYMKLYSAVKFQAKEPRFEAMKAMETTVANNVGPLATA

SEQ ID NO: 76635 - DNA, 872 bp, Arabidopsis thaliana
  misc_feature (1)..(872): Ceres Seq. ID no. 7108678
  misc_feature: MA Experiment ID: 20000185 Result: Down-regulated in Transcription
  misc_feature: MA Experiment 20000185 PARAMETER Experiment Name: At_Roots__P Parameter: Age (day) Value: 7 vs. 21
  misc_feature: MA Experiment 20000185 PARAMETER Experiment Name: At_Roots__P Parameter: Organism Value: A. thaliana
  misc_feature: MA Experiment 20000185 PARAMETER Experiment Name: At_Roots__P Parameter: Tissue Value: Roots vs. Whole Plant
  misc_feature: MA Experiment ID: 20000439 Result: Down-regulated in Transcription
  misc_feature: MA Experiment 20000439 PARAMETER Experiment Name: At_Roots__P Parameter: Age (day) Value: 14 vs. 21
  misc_feature: MA Experiment 20000439 PARAMETER Experiment Name: At_Roots__P Parameter: Organism Value: A. thaliana
  misc_feature: MA Experiment 20000439 PARAMETER Experiment Name: At_Roots__P Parameter: Tissue Value: Roots vs. Whole Plant
  misc_feature: MA Experiment ID: 20000794 Result: Down-regulated in Transcription
  misc_feature: MA Experiment 20000794 PARAMETER Experiment Name: At_Petals_P Parameter: Age (day) Value: 23-25 days
  misc_feature: MA Experiment 20000794 PARAMETER Experiment Name: At_Petals_P Parameter: Plant Line Value: WS
  misc_feature: MA Experiment 20000794 PARAMETER Experiment Name: At_Petals_P Parameter: Tissue Value: Petals vs. Whole plant
  misc_feature: MA Experiment ID: 20001757 Result: Up-regulated in Transcription
  misc_feature: MA Experiment 20001757 PARAMETER Experiment Name: At_50mM_NH4NO3_L-to-H_P Parameter: Timepoint (hr) Value: 6
  misc_feature: MA Experiment 20001757 PARAMETER Experiment Name: At_50mM_NH4NO3_L-to-H_P Parameter: Tissue Value: Leaf
  misc_feature: MA Experiment 20001757 PARAMETER Experiment Name: At_50mM_NH4NO3_L-to-H_P Parameter: Treatment Value: 50mM NH4NO3 vs 100mM Mannitol
  misc_feature: MA Experiment ID: 20001906 Result: Down-regulated in Transcription
  misc_feature: MA Experiment 20001906 PARAMETER Experiment Name: At_Drought_Reproduction_P Parameter: Age (day) Value: 35
  misc_feature: MA Experiment 20001906 PARAMETER Experiment Name: At_Drought_Reproduction_P Parameter: Organism Value: A. thaliana
  misc_feature: MA Experiment 20001906 PARAMETER Experiment Name: At_Drought_Reproduction_P Parameter: Plant Line Value: WS
  misc_feature: MA Experiment 20001906 PARAMETER Experiment Name: At_Drought_Reproduction_P Parameter: Timepoint (day) Value: 5
  misc_feature: MA Experiment 20001906 PARAMETER Experiment Name: At_Drought_Reproduction_P Parameter: Tissue Value: Siliques
  misc_feature: MA Experiment 20001906 PARAMETER Experiment Name: At_Drought_Reproduction_P Parameter: Treatment Value: Drought vs. No Drought
gtctaatggatgagaaagaagaattcccggggaagcgtcgctgttgaggagaccgagaacagtttagagtcacaagatgtgagcgaaggagatgagagcgaaggagatgcgagcgaaggagatgtgagcgaaggagatgagagcgaaggagatgtgagcgaaggagctgtgagcgaaagagctgagttcccggagccatcggaagaagccaagcttttcgtcggaaatttggcttatgatgttaatagccaagctttggctatgctctttgagcaagccggtactgttgaaatcgccgaggttatatacaatagggaaactgaccagagtcgtgggtttggatttgtgacaatgagttctgtggacgaagctgagacagctgtggagaagttcaaccgttatgatcttaacggacgtctactaactgtaaacaaggcagctccaagaggatcacgtccagaacgtgcgcctcgggtatatgaacctgcattcagagtatatgtagggaatctaccatgggatgtggacaatggccgtctagaacagcttttcagtgagcatggtaaagttgtggaagctagggtggtttacgaccgtgagacaggtcgttcacgtggattcgggtttgtcacaatgtctgacgtggatgaactcaacgaagccatctctgccctcgatggacagaacttggagggtagagcaatcagagtgaatgtagcggaagagcgtcctccaaggcgtggatattaaagctgagatctagctgtgccctctctctctccctatcttgcattttgtttagacgagattcttacactcttcaacgattgtttttggctgaactctgaatgtgaaagttaagctgcttctaa

SEQ ID NO: 76636 - protein, 246 aa, Arabidopsis thaliana
  peptide (1)..(246): Ceres Seq. ID no. 7108679
  misc_feature (163)..(234): Pfam Name: RNA recognition motif. (a.k.a. RRM, RBD, or RNP domain) Pfam Description: RNA recognition motif. (a.k.a. RRM, RBD, or RNP
  misc_feature (1)..(246): Homolog of NCBI NO: 99684 NR Description: DNA-binding protein - Arabidopsis thaliana
  misc_feature (1)..(246): Homolog of NCBI NO: 475719 NR Description: RNA-binding protein 2
  misc_feature (1)..(246): Homolog of NCBI NO: 629557 NR Description: RNA-binding protein RNP-D precursor - Arabidopsis (fragment) >gi|510240|emb|CAA43420.1| RNA binding protein
  misc_feature (1)..(246): Homolog of NCBI NO: 15233980 NR Description: 31 kDa ribonucleoprotein, chloroplast precursor protein cp31); protein id: At4g24770.1, supported by cDNA: supported by cDNA: gi_387568 [Arabidopsis thaliana]
  misc_feature (1)..(246): Homolog of NCBI NO: 15294254 NR Description: AT4g24770/F22K18_30 [Arabidopsis thaliana]
  misc_feature (1)..(246): Homolog of NCBI NO: 681908 NR Description: cp31 [Arabidopsis thaliana]
  misc_feature (1)..(246): Homolog of NCBI NO: 1076305 NR Description: RNA-binding protein cp31 precursor - Arabidopsis
  misc_feature (85)..(246): Homolog of NCBI NO: 475720 NR Description: RNA-binding protein 3
  misc_feature (11)..(246): Homolog of NCBI NO: 19032260 NR Description: RNA-binding protein precursor [Persea americana]
  misc_feature (4)..(243): Homolog of NCBI NO: 15240641 NR Description: chloroplast RNA-binding protein cp31, putative; id: At5g50250.1, supported by cDNA: gi_14532487, supported by
MRKKNSRGSVAVEETENSLESQDVSEGDESEGDASEGDVSEGDESEGDVSEGAVSERAEFPEPSEEAKLFVGNLAYDVNSQALAMLFEQAGTVEIAEVIYNRETDQSRGFGFVTMSSVDEAETAVEKFNRYDLNGRLLTVNKAAPRGSRPERAPRVYEPAFRVYVGNLPWDVDNGRLEQLFSEHGKVVEARVVYDRETGRSRGFGFVTMSDVDELNEAISALDGQNLEGRAIRVNVAEERPPRRGY

SEQ ID NO: 76637 - protein, 162 aa, Arabidopsis thaliana; identical to SEQ ID NO: 76559
  peptide (1)..(162): Ceres Seq. ID no. 7108680
  misc_feature (79)..(150): Pfam Name: RNA recognition motif. (a.k.a. RRM, RBD, or RNP domain) Pfam Description: RNA recognition motif. (a.k.a. RRM, RBD, or RNP
  misc_feature (1)..(162): Homolog of NCBI NO: 99684 NR Description: DNA-binding protein - Arabidopsis thaliana
  misc_feature (1)..(162): Homolog of NCBI NO: 475719 NR Description: RNA-binding protein 2
  misc_feature (1)..(162): Homolog of NCBI NO: 629557 NR Description: RNA-binding protein RNP-D precursor - Arabidopsis (fragment) >gi|510240|emb|CAA43420.1| RNA binding protein
  misc_feature (1)..(162): Homolog of NCBI NO: 15233980 NR Description: 31 kDa ribonucleoprotein, chloroplast precursor protein cp31); protein id: At4g24770.1, supported by cDNA: supported by cDNA: gi_387568 [Arabidopsis thaliana]
  misc_feature (1)..(162): Homolog of NCBI NO: 15294254 NR Description: AT4g24770/F22K18_30 [Arabidopsis thaliana]
  misc_feature (1)..(162): Homolog of NCBI NO: 681908 NR Description: cp31 [Arabidopsis thaliana]
  misc_feature (1)..(162): Homolog of NCBI NO: 1076305 NR Description: RNA-binding protein cp31 precursor - Arabidopsis
  misc_feature (1)..(162): Homolog of NCBI NO: 475720 NR Description: RNA-binding protein 3
  misc_feature (1)..(162): Homolog of NCBI NO: 19032260 NR Description: RNA-binding protein precursor [Persea americana]
  misc_feature (1)..(159): Homolog of NCBI NO: 15240641 NR Description: chloroplast RNA-binding protein cp31, putative; id: At5g50250.1, supported by cDNA: gi_14532487, supported by

SEQ ID NO: 76638 - protein, 132 aa, Arabidopsis thaliana
  peptide (1)..(132): Ceres Seq. ID no. 7108681
  misc_feature (49)..(120): Pfam Name: RNA recognition motif. (a.k.a. RRM, RBD, or RNP domain) Pfam Description: RNA recognition motif. (a.k.a. RRM, RBD, or RNP
  misc_feature (1)..(132): Homolog of NCBI NO: 99684 NR Description: DNA-binding protein - Arabidopsis thaliana
  misc_feature (1)..(132): Homolog of NCBI NO: 475719 NR Description: RNA-binding protein 2
  misc_feature (1)..(132): Homolog of NCBI NO: 629557 NR Description: RNA-binding protein RNP-D precursor - Arabidopsis (fragment) >gi|510240|emb|CAA43420.1| RNA binding protein
  misc_feature (1)..(132): Homolog of NCBI NO: 15233980 NR Description: 31 kDa ribonucleoprotein, chloroplast precursor protein cp31); protein id: At4g24770.1, supported by cDNA: supported by cDNA: gi_387568 [Arabidopsis thaliana]
  misc_feature (1)..(132): Homolog of NCBI NO: 15294254 NR Description: AT4g24770/F22K18_30 [Arabidopsis thaliana]
  misc_feature (1)..(132): Homolog of NCBI NO: 681908 NR Description: cp31 [Arabidopsis thaliana]
  misc_feature (1)..(132): Homolog of NCBI NO: 1076305 NR Description: RNA-binding protein cp31 precursor - Arabidopsis
  misc_feature (1)..(132): Homolog of NCBI NO: 475720 NR Description: RNA-binding protein 3
  misc_feature (1)..(132): Homolog of NCBI NO: 19032260 NR Description: RNA-binding protein precursor [Persea americana]
  misc_feature (1)..(129): Homolog of NCBI NO: 15240641 NR Description: chloroplast RNA-binding protein cp31, putative; id: At5g50250.1, supported by cDNA: gi_14532487, supported by
MSSVDEAETAVEKFNRYDLNGRLLTVNKAAPRGSRPERAPRVYEPAFRVYVGNLPWDVDNGRLEQLFSEHGKVVEARVVYDRETGRSRGFGFVTMSDVDELNEAISALDGQNLEGRAIRVNVAEERPPRRGY

SEQ ID NO: 76639 - DNA, 1939 bp, Arabidopsis thaliana
  misc_feature (1)..(1939): Ceres Seq. ID no. 7108686
  misc_feature: MA Experiment ID: 20000179 Result: Up-regulated in Transcription
  misc_feature: MA Experiment 20000179 PARAMETER Experiment Name: At_Germinating_Seeds_P Parameter: Age (hr) Value: 6 vs. 0
  misc_feature: MA Experiment 20000179 PARAMETER Experiment Name: At_Germinating_Seeds_P Parameter: Tissue Value: Germinating Seeds
  misc_feature: MA Experiment ID: 20000794 Result: Up-regulated in Transcription
  misc_feature: MA Experiment 20000794 PARAMETER Experiment Name: At_Petals_P Parameter: Age (day) Value: 23-25 days
  misc_feature: MA Experiment 20000794 PARAMETER Experiment Name: At_Petals_P Parameter: Plant Line Value: WS
  misc_feature: MA Experiment 20000794 PARAMETER Experiment Name: At_Petals_P Parameter: Tissue Value: Petals vs. Whole plant
gcggccgccagtgtgagtaatttagcgaaaacgatgggttccatcgaagaagaagcaagacctctcatcgaagaaggtttaattttacaggaagtgaaattgtatgctgaagatggttcagtggactttaatggaaacccaccattgaaggagaaaacaggaaactggaaagcttgtccttttattcttggtaatgaatgttgtgagaggctagcttactatggtattgctgggaatttaatcacttacctcaccactaagcttcaccaaggaaatgtttctgctgctacaaacgttaccacatggcaagggacttgttatctcactcctctcattggagctgttctggctgatgcttactggggacgttactggaccatcgcttgtttctccgggatttatttcatcgggatgtctgcgttaactctttcagcttcagttccggcattgaagccagcggaatgtattggtgacttttgtccatctgcaacgccagctcagtatgcgatgttctttggtgggctttacctgatcgctcttggaactggaggtatcaaaccgtgtgtctcatccttcggtgccgatcagtttgatgacacggactctcgggaacgagttagaaaagcttcgttctttaactggttttacttctccatcaatattggagcacttgtgtcatctagtcttctagtttggattcaagagaatcgggggtggggtttagggtttgggataccaacagtgttcatgggactagccattgcaagtttcttctttggcacacctctttataggtttcagaaacctggaggaagccctataactcggatttcccaagtcgtggttgcttcgttccggaaatcgtctgtcaaagtccctgaagacgccacacttctgtatgaaactcaagacaagaactctgctattgctggaagtagaaaaatcgagcataccgatgattgccagtatcttgacaaagccgctgttatctcagaagaagaatcgaaatccggagattattccaactcgtggagactatgcacggttacgcaagtcgaagaactcaagattctgatccgaatgttcccaatctgggcttctggtatcattttctcagctgtatacgcacaaatgtccacaatgtttgttcaacaaggccgagccatgaactgcaaaattggatcattccagcttcctcctgcagcactcgggacattcgacacagcaagcgtcatcatctgggtgccgctctacgaccggttcatcgttcccttagcaagaaagttcacaggagtagacaaaggattcactgagatacaaagaatgggaattggtctgtttgtctctgttctctgtatggcagctgcagctatcgtcgaaatcatccgtctccatatggccaacgatcttggattagtcgagtcaggagccccagttcccatatccgtcttgtggcagattccacagtacttcattctcggtgcagccgaagtattctacttcatcggtcagctcgagttcttctacgaccaatctccagatgcaatgagaagcttgtgcagtgccttagctcttttgaccaatgcacttggtaactacttgagctcgttgatcctcacgctcgtgacttattttacaacaagaaatgggcaagaaggttggatttcggataatctcaattcaggtcatctcgattacttcttctggctcttggctggtcttagccttgtgaacatggcggtttacttcttctctgctgctaggtataagcaaaagaaagcttcgtcgtagtaatgctgttatctatctactttcattacatacaaaagtttgtttctttcaactgtaactgtctctgtatcaataacaacattgctgtgtacttttcctttcaatttcaaaagtttaagtcgcctaaattactcacactggcggccgc

SEQ ID NO: 76640 - protein, 596 aa, Arabidopsis thaliana
  peptide (1)..(596): Ceres Seq. ID no. 7108687
  misc_feature (124)..(528): Pfam Name: POT family Pfam Description: POT family
  misc_feature (12)..(596): Homolog of NCBI NO: 1076331 NR Description: histidine transport protein - Arabidopsis thaliana
  misc_feature (26)..(595): Homolog of NCBI NO: 4102839 NR Description: LeOPT1 [Lycopersicon esculentum]
  misc_feature (11)..(595): Homolog of NCBI NO: 15076661 NR Description: peptide transporter [Oryza sativa (japonica >gi|15076663|dbj|BAB62327.1| peptide transporter [Oryza sativa
  misc_feature (12)..(567): Homolog of NCBI NO: 6635838 NR Description: amino acid/peptide transporter [Prunus dulcis]
  misc_feature (37)..(594): Homolog of NCBI NO: 25404366 NR Description: hypothetical protein F19K23.13 [imported] - thaliana >gi|2160144|gb|AAB60766.1| Strong similarity to
  misc_feature (12)..(297): Homolog of NCBI NO: 15226856 NR Description: putative peptide/amino acid transporter; protein At2g02020.1 [Arabidopsis thaliana] >gi|25410951|pir||A84432
  misc_feature (330)..(593): Homolog of NCBI NO: 15226856 NR Description: putative peptide/amino acid transporter; protein At2g02020.1 [Arabidopsis thaliana] >gi|25410951|pir||A84432
  misc_feature (29)..(594): Homolog of NCBI NO: 15232435 NR Description: peptide transport - like protein; protein id: supported by cDNA: 117581., supported by cDNA: gi_13430485,
  misc_feature (34)..(595): Homolog of NCBI NO: 34895718 NR Description: putative peptide transport protein [Oryza sativa
  misc_feature (12)..(595): Homolog of NCBI NO: 37530506 NR Description: putative LeOPT1 - oligopeptide transporter [Oryza
AAASVSNLAKTMGSIEEEARPLIEEGLILQEVKLYAEDGSVDFNGNPPLKEKTGNWKACPFILGNECCERLAYYGIAGNLITYLTTKLHQGNVSAATNVTTWQGTCYLTPLIGAVLADAYWGRYWTIACFSGIYFIGMSALTLSASVPALKPAECIGDFCPSATPAQYAMFFGGLYLIALGTGGIKPCVSSFGADQFDDTDSRERVRKASFFNWFYFSINIGALVSSSLLVWIQENRGWGLGFGIPTVFMGLAIASFFFGTPLYRFQKPGGSPITRISQVVVASFRKSSVKVPEDATLLYETQDKNSAIAGSRKIEHTDDCQYLDKAAVISEEESKSGDYSNSWRLCTVTQVEELKILIRMFPIWASGIIFSAVYAQMSTMFVQQGRAMNCKIGSFQLPPAALGTFDTASVIIWVPLYDRFIVPLARKFTGVDKGFTEIQRMGIGLFVSVLCMAAAAIVEIIRLHMANDLGLVESGAPVPISVLWQIPQYFILGAAEVFYFIGQLEFFYDQSPDAMRSLCSALALLTNALGNYLSSLILTLVTYFTTRNGQEGWISDNLNSGHLDYFFWLLAGLSLVNMAVYFFSAARYKQKKASS

SEQ ID NO: 76641 - protein, 585 aa, Arabidopsis thaliana; identical to SEQ ID NO: 23352
  peptide (1)..(585): Ceres Seq. ID no. 7108688
  misc_feature (113)..(517): Pfam Name: POT family Pfam Description: POT family
  misc_feature (1)..(585): Homolog of NCBI NO: 1076331 NR Description: histidine transport protein - Arabidopsis thaliana
  misc_feature (15)..(584): Homolog of NCBI NO: 4102839 NR Description: LeOPT1 [Lycopersicon esculentum]
  misc_feature (1)..(584): Homolog of NCBI NO: 15076661 NR Description: peptide transporter [Oryza sativa (japonica >gi|15076663|dbj|BAB62327.1| peptide transporter [Oryza sativa
  misc_feature (1)..(556): Homolog of NCBI NO: 6635838 NR Description: amino acid/peptide transporter [Prunus dulcis]
  misc_feature (26)..(583): Homolog of NCBI NO: 25404366 NR Description: hypothetical protein F19K23.13 [imported] - thaliana >gi|2160144|gb|AAB60766.1| Strong similarity to
  misc_feature (1)..(286): Homolog of NCBI NO: 15226856 NR Description: putative peptide/amino acid transporter; protein At2g02020.1 [Arabidopsis thaliana] >gi|25410951|pir||A84432
  misc_feature (319)..(582): Homolog of NCBI NO: 15226856 NR Description: putative peptide/amino acid transporter; protein At2g02020.1 [Arabidopsis thaliana] >gi|25410951|pir||A84432
  misc_feature (18)..(583): Homolog of NCBI NO: 15232435 NR Description: peptide transport - like protein; protein id: supported by cDNA: 117581., supported by cDNA: gi_13430485,
  misc_feature (23)..(584): Homolog of NCBI NO: 34895718 NR Description: putative peptide transport protein [Oryza sativa
  misc_feature (1)..(584): Homolog of NCBI NO: 37530506 NR Description: putative LeOPT1 - oligopeptide transporter [Oryza

SEQ ID NO: 76642 - protein, 459 aa, Arabidopsis thaliana; identical to SEQ ID NO: 23353
  peptide (1)..(459): Ceres Seq. ID no. 7108689
  misc_feature (1)..(391): Pfam Name: POT family Pfam Description: POT family
  misc_feature (1)..(459): Homolog of NCBI NO: 1076331 NR Description: histidine transport protein - Arabidopsis thaliana
  misc_feature (1)..(458): Homolog of NCBI NO: 4102839 NR Description: LeOPT1 [Lycopersicon esculentum]
  misc_feature (1)..(458): Homolog of NCBI NO: 15076661 NR Description: peptide transporter [Oryza sativa (japonica >gi|15076663|dbj|BAB62327.1| peptide transporter [Oryza sativa
  misc_feature (1)..(430): Homolog of NCBI NO: 6635838 NR Description: amino acid/peptide transporter [Prunus dulcis]
  misc_feature (1)..(457): Homolog of NCBI NO: 25404366 NR Description: hypothetical protein F19K23.13 [imported] - thaliana >gi|2160144|gb|AAB60766.1| Strong similarity to
  misc_feature (1)..(160): Homolog of NCBI NO: 15226856 NR Description: putative peptide/amino acid transporter; protein At2g02020.1 [Arabidopsis thaliana] >gi|25410951|pir||A84432
  misc_feature (193)..(456): Homolog of NCBI NO: 15226856 NR Description: putative peptide/amino acid transporter; protein At2g02020.1 [Arabidopsis thaliana] >gi|25410951|pir||A84432
  misc_feature (1)..(457): Homolog of NCBI NO: 15232435 NR Description: peptide transport - like protein; protein id: supported by cDNA: 117581., supported by cDNA: gi_13430485,
  misc_feature (1)..(458): Homolog of NCBI NO: 34895718 NR Description: putative peptide transport protein [Oryza sativa
  misc_feature (1)..(458): Homolog of NCBI NO: 37530506 NR Description: putative LeOPT1 - oligopeptide transporter [Oryza

SEQ ID NO: 76643 - DNA, 1302 bp, Arabidopsis thaliana
  misc_feature (1)..(1302): Ceres Seq. ID no. 7108708
  misc_feature: MA Experiment ID: 108434 Result: Down-regulated in Transcription
  misc_feature: MA Experiment 108434 PARAMETER Experiment Name: At_Root_Tips_cDNA_P Parameter: Tissue Value: Root Tips
  misc_feature: MA Experiment ID: 108461 Result: Down-regulated in Transcription
  misc_feature: MA Experiment 108461 PARAMETER Experiment Name: At_Germinating_Seeds_cDNA_P Parameter: Age (day) Value: 1 vs. 0
  misc_feature: MA Experiment 108461 PARAMETER Experiment Name: At_Germinating_Seeds_cDNA_P Parameter: Tissue Value: Germinating Seeds
  misc_feature: MA Experiment ID: 108462 Result: Up-regulated in Transcription
  misc_feature: MA Experiment 108462 PARAMETER Experiment Name: At_Germinating_Seeds_cDNA_P Parameter: Age (day) Value: 2 vs. 0
  misc_feature: MA Experiment 108462 PARAMETER Experiment Name: At_Germinating_Seeds_cDNA_P Parameter: Tissue Value: Germinating Seeds
  misc_feature: MA Experiment ID: 108463 Result: Up-regulated in Transcription
  misc_feature: MA Experiment 108463 PARAMETER Experiment Name: At_Germinating_Seeds_cDNA_P Parameter: Age (day) Value: 3 vs. 0
  misc_feature: MA Experiment 108463 PARAMETER Experiment Name: At_Germinating_Seeds_cDNA_P Parameter: Tissue Value: Germinating Seeds
  misc_feature: MA Experiment ID: 108464 Result: Up-regulated in Transcription
  misc_feature: MA Experiment 108464 PARAMETER Experiment Name: At_Germinating_Seeds_cDNA_P Parameter: Age (day) Value: 4 vs. 0
  misc_feature: MA Experiment 108464 PARAMETER Experiment Name: At_Germinating_Seeds_cDNA_P Parameter: Tissue Value: Germinating Seeds
  misc_feature: MA Experiment ID: 108488 Result: Down-regulated in Transcription
  misc_feature: MA Experiment ID: 108501 Result: Down-regulated in Transcription
  misc_feature: MA Experiment 108501 PARAMETER Experiment Name: At_ap2_floral_buds_cDNA_P Parameter: Plant Line Value: ap2 (Ler.)
  misc_feature: MA Experiment 108501 PARAMETER Experiment Name: At_ap2_floral_buds_cDNA_P Parameter: Tissue Value: Closed Flower
  misc_feature: MA Experiment ID: 108569 Result: Up-regulated in Transcription
  misc_feature: MA Experiment 108569 PARAMETER Experiment Name: At_0.001%_MeJA__cDNA_P Parameter: Timepoint (hr) Value: 6
  misc_feature: MA Experiment 108569 PARAMETER Experiment Name: At_0.001%_MeJA__cDNA_P Parameter: Tissue Value: Aerial
  misc_feature: MA Experiment 108569 PARAMETER Experiment Name: At_0.001%_MeJA__cDNA_P Parameter: Treatment Value: 0.001% MeJA vs. No Treatment
  misc_feature: MA Experiment ID: 108573 Result: Up-regulated in Transcription
  misc_feature: MA Experiment 108573 PARAMETER Experiment Name: At_Drought_cDNA_P Parameter: Timepoint (hr) Value: 6
  misc_feature: MA Experiment 108573 PARAMETER Experiment Name: At_Drought_cDNA_P Parameter: Tissue Value: Aerial
  misc_feature: MA Experiment 108573 PARAMETER Experiment Name: At_Drought_cDNA_P Parameter: Treatment Value: Drought vs. No Drought
  misc_feature: MA Experiment ID: 108577 Result: Up-regulated in Transcription
  misc_feature: MA Experiment 108577 PARAMETER Experiment Name: At_42deg_Heat_cDNA_P Parameter: Temperature (deg C) Value: 42 vs. 22
  misc_feature: MA Experiment 108577 PARAMETER Experiment Name: At_42deg_Heat_cDNA_P Parameter: Timepoint (hr) Value: 6
  misc_feature: MA Experiment 108577 PARAMETER Experiment Name: At_42deg_Heat_cDNA_P Parameter: Tissue Value: Aerial
  misc_feature: MA Experiment ID: 108594 Result: Down-regulated in Transcription
  misc_feature: MA Experiment 108594 PARAMETER Experiment Name: At_Ler-rhl_Root_cDNA_P Parameter: Plant Line Value: null
  misc_feature: MA Experiment ID: 108595 Result: Up-regulated in Transcription
  misc_feature: MA Experiment 108595 PARAMETER Experiment Name: At_Ler-pi_Ovule_cDNA_P Parameter: Plant Line Value: null
  misc_feature: MA Experiment ID: 108609 Result: Up-regulated in Transcription
  misc_feature: MA Experiment 108609 PARAMETER Experiment Name: At_100uM_ABA_cDNA_P Parameter: Timepoint (hr) Value: 24
  misc_feature: MA Experiment 108609 PARAMETER Experiment Name: At_100uM_ABA_cDNA_P Parameter: Tissue Value: Aerial
  misc_feature: MA Experiment 108609 PARAMETER Experiment Name: At_100uM_ABA_cDNA_P Parameter: Treatment Value: 100uM ABA vs. No Treatment
  misc_feature: MA Experiment ID: 20000069 Result: Up-regulated in Transcription
  misc_feature: MA Experiment 20000069 PARAMETER Experiment Name: At_100uM_ABA_Mutants_cDNA_P Parameter: Plant Line Value: CS23
  misc_feature: MA Experiment 20000069 PARAMETER Experiment Name: At_100uM_ABA_Mutants_cDNA_P Parameter: Timepoint (hr) Value: 6
  misc_feature: MA Experiment 20000069 PARAMETER Experiment Name: At_100uM_ABA_Mutants_cDNA_P Parameter: Tissue Value: Aerial
  misc_feature: MA Experiment 20000069 PARAMETER Experiment Name: At_100uM_ABA_Mutants_cDNA_P Parameter: Treatment Value: 100uM ABA vs. No Treatment
  misc_feature: MA Experiment ID: 20000070 Result: Up-regulated in Transcription
  misc_feature: MA Experiment 20000070 PARAMETER Experiment Name: At_100uM_ABA_Mutants_cDNA_P Parameter: Plant Line Value: CS24
  misc_feature: MA Experiment 20000070 PARAMETER Experiment Name: At_100uM_ABA_Mutants_cDNA_P Parameter: Timepoint (hr) Value: 6
  misc_feature: MA Experiment 20000070 PARAMETER Experiment Name: At_100uM_ABA_Mutants_cDNA_P Parameter: Tissue Value: Aerial
  misc_feature: MA Experiment 20000070 PARAMETER Experiment Name: At_100uM_ABA_Mutants_cDNA_P Parameter: Treatment Value: 100uM ABA vs. No Treatment
  misc_feature: MA Experiment ID: 20000071 Result: Up-regulated in Transcription
  misc_feature: MA Experiment 20000071 PARAMETER Experiment Name: At_100uM_ABA_Mutants_cDNA_P Parameter: Plant Line Value: CS8104
  misc_feature: MA Experiment 20000071 PARAMETER Experiment Name: At_100uM_ABA_Mutants_cDNA_P Parameter: Timepoint (hr) Value: 6
  misc_feature: MA Experiment 20000071 PARAMETER Experiment Name: At_100uM_ABA_Mutants_cDNA_P Parameter: Tissue Value: Aerial
  misc_feature: MA Experiment 20000071 PARAMETER Experiment Name: At_100uM_ABA_Mutants_cDNA_P Parameter: Treatment Value: 100uM ABA vs. No Treatment
  misc_feature: MA Experiment ID: 20000072 Result: Up-regulated in Transcription
  misc_feature: MA Experiment 20000072 PARAMETER Experiment Name: At_100uM_ABA_Mutants_cDNA_P Parameter: Plant Line Value: CS8105
  misc_feature: MA Experiment 20000072 PARAMETER Experiment Name: At_100uM_ABA_Mutants_cDNA_P Parameter: Timepoint (hr) Value: 6
  misc_feature: MA Experiment 20000072 PARAMETER Experiment Name: At_100uM_ABA_Mutants_cDNA_P Parameter: Tissue Value: Aerial
  misc_feature: MA Experiment 20000072 PARAMETER Experiment Name: At_100uM_ABA_Mutants_cDNA_P Parameter: Treatment Value: 100uM ABA vs. No Treatment
  misc_feature: MA Experiment ID: 20000086 Result: Up-regulated in Transcription
  misc_feature: MA Experiment 20000086 PARAMETER Experiment Name: At_100uM_ABA_Mutants_cDNA_P Parameter: Plant Line Value: CS22
  misc_feature: MA Experiment 20000086 PARAMETER Experiment Name: At_100uM_ABA_Mutants_cDNA_P Parameter: Timepoint (hr) Value: 6
  misc_feature: MA Experiment 20000086 PARAMETER Experiment Name: At_100uM_ABA_Mutants_cDNA_P Parameter: Tissue Value: Aerial
  misc_feature: MA Experiment 20000086 PARAMETER Experiment Name: At_100uM_ABA_Mutants_cDNA_P Parameter: Treatment Value: 100uM ABA vs. No Treatment
  misc_feature: MA Experiment ID: 20000087 Result: Up-regulated in Transcription
  misc_feature: MA Experiment 20000087 PARAMETER Experiment Name: At_100uM_ABA_Mutants_cDNA_P Parameter: Plant Line Value: WS
  misc_feature: MA Experiment 20000087 PARAMETER Experiment Name: At_100uM_ABA_Mutants_cDNA_P Parameter: Timepoint (hr) Value: 6
  misc_feature: MA Experiment 20000087 PARAMETER Experiment Name: At_100uM_ABA_Mutants_cDNA_P Parameter: Tissue Value: Aerial
  misc_feature: MA Experiment 20000087 PARAMETER Experiment Name: At_100uM_ABA_Mutants_cDNA_P Parameter: Treatment Value: 100uM ABA vs. No Treatment
  misc_feature: MA Experiment ID: 20000088 Result: Up-regulated in Transcription
  misc_feature: MA Experiment 20000088 PARAMETER Experiment Name: At_100uM_ABA_Mutants_cDNA_P Parameter: Plant Line Value: Landsberg
  misc_feature: MA Experiment 20000088 PARAMETER Experiment Name: At_100uM_ABA_Mutants_cDNA_P Parameter: Timepoint (hr) Value: 6
  misc_feature: MA Experiment 20000088 PARAMETER Experiment Name: At_100uM_ABA_Mutants_cDNA_P Parameter: Tissue Value: Aerial
  misc_feature: MA Experiment 20000088 PARAMETER Experiment Name: At_100uM_ABA_Mutants_cDNA_P Parameter: Treatment Value: 100uM ABA vs. No Treatment
  misc_feature: MA Experiment ID: 20000112 Result: Up-regulated in Transcription
  misc_feature: MA Experiment 20000112 PARAMETER Experiment Name: At_42deg_Heat_cDNA_P Parameter: Temperature (deg C) Value: 42 vs. 22
  misc_feature: MA Experiment 20000112 PARAMETER Experiment Name: At_42deg_Heat_cDNA_P Parameter: Timepoint (hr) Value: 2
  misc_feature: MA Experiment 20000112 PARAMETER Experiment Name: At_42deg_Heat_cDNA_P Parameter: Tissue Value: Aerial
  misc_feature: MA Experiment ID: 20000113 Result: Up-regulated in Transcription
  misc_feature: MA Experiment 20000113 PARAMETER Experiment Name: At_42deg_Heat_cDNA_P Parameter: Temperature (deg C) Value: 42 vs. 22
  misc_feature: MA Experiment 20000113 PARAMETER Experiment Name: At_42deg_Heat_cDNA_P Parameter: Timepoint (hr) Value: 8
  misc_feature: MA Experiment 20000113 PARAMETER Experiment Name: At_42deg_Heat_cDNA_P Parameter: Tissue Value: Aerial
  misc_feature: MA Experiment ID: 20000117 Result: Up-regulated in Transcription
  misc_feature: MA Experiment 20000117 PARAMETER Experiment Name: At_100uM_ABA_Mutants_cDNA_P Parameter: Plant Line Value: Columbia
  misc_feature: MA Experiment 20000117 PARAMETER Experiment Name: At_100uM_ABA_Mutants_cDNA_P Parameter: Timepoint (hr) Value: 6
  misc_feature: MA Experiment 20000117 PARAMETER Experiment Name: At_100uM_ABA_Mutants_cDNA_P Parameter: Tissue Value: Aerial
  misc_feature: MA Experiment 20000117 PARAMETER Experiment Name: At_100uM_ABA_Mutants_cDNA_P Parameter: Treatment Value: 100uM ABA vs. No Treatment
  misc_feature: MA Experiment ID: 20000306 Result: Down-regulated in Transcription
  misc_feature: MA Experiment 20000306 PARAMETER Experiment Name: At_Germinating_Seeds_Sub_P Parameter: Age (hr) Value: 6 vs. 0
  misc_feature: MA Experiment 20000306 PARAMETER Experiment Name: At_Germinating_Seeds_Sub_P Parameter: Organism Value: A. thaliana
  misc_feature: MA Experiment 20000306 PARAMETER Experiment Name: At_Germinating_Seeds_Sub_P Parameter: Plant Line Value: WS
  misc_feature: MA Experiment 20000306 PARAMETER Experiment Name: At_Germinating_Seeds_Sub_P Parameter: Tissue Value: Germinating Seeds
  misc_feature: MA Experiment ID: 20000307 Result: Down-regulated in Transcription
  misc_feature: MA Experiment 20000307 PARAMETER Experiment Name: At_Germinating_Seeds_Sub_P Parameter: Age (hr) Value: 24 vs. 0
  misc_feature: MA Experiment 20000307 PARAMETER Experiment Name: At_Germinating_Seeds_Sub_P Parameter: Organism Value: A. thaliana
  misc_feature: MA Experiment 20000307 PARAMETER Experiment Name: At_Germinating_Seeds_Sub_P Parameter: Plant Line Value: WS
  misc_feature: MA Experiment 20000307 PARAMETER Experiment Name: At_Germinating_Seeds_Sub_P Parameter: Tissue Value: Germinating Seeds
  misc_feature: MA Experiment ID: 20000329 Result: Up-regulated in Transcription
  misc_feature: MA Experiment 20000329 PARAMETER Experiment Name: At_4deg_Cold_Sub_P Parameter: Age (day) Value: 14
  misc_feature: MA Experiment 20000329 PARAMETER Experiment Name: At_4deg_Cold_Sub_P Parameter: Organism Value: A. thaliana
  misc_feature: MA Experiment 20000329 PARAMETER Experiment Name: At_4deg_Cold_Sub_P Parameter: Plant Line Value: WS
  misc_feature: MA Experiment 20000329 PARAMETER Experiment Name: At_4deg_Cold_Sub_P Parameter: Temperature (deg C) Value: 4 vs. 22
  misc_feature: MA Experiment 20000329 PARAMETER Experiment Name: At_4deg_Cold_Sub_P Parameter: Timepoint (hr) Value: 6
  misc_feature: MA Experiment 20000329 PARAMETER Experiment Name: At_4deg_Cold_Sub_P Parameter: Tissue Value: Aerial
  misc_feature: MA Experiment ID: 20000332 Result: Up-regulated in Transcription
  misc_feature: MA Experiment 20000332 PARAMETER Experiment Name: At_4deg_Cold_Sub_P Parameter: Age (day) Value: 14
  misc_feature: MA Experiment 20000332 PARAMETER Experiment Name: At_4deg_Cold_Sub_P Parameter: Organism Value: A. thaliana
  misc_feature: MA Experiment 20000332 PARAMETER Experiment Name: At_4deg_Cold_Sub_P Parameter: Plant Line Value: WS
  misc_feature: MA Experiment 20000332 PARAMETER Experiment Name: At_4deg_Cold_Sub_P Parameter: Temperature (deg C) Value: 4 vs. 22
  misc_feature: MA Experiment 20000332 PARAMETER Experiment Name: At_4deg_Cold_Sub_P Parameter: Timepoint (hr) Value: 2
  misc_feature: MA Experiment 20000332 PARAMETER Experiment Name: At_4deg_Cold_Sub_P Parameter: Tissue Value: Aerial
  misc_feature: MA Experiment ID: 20000355 Result: Down-regulated in Transcription
  misc_feature: MA Experiment 20000355 PARAMETER Experiment Name: At_Siliques_Sub_P Parameter: Age (day) Value: 21
  misc_feature: MA Experiment 20000355 PARAMETER Experiment Name: At_Siliques_Sub_P Parameter: Organism Value: A. thaliana
  misc_feature: MA Experiment 20000355 PARAMETER Experiment Name: At_Siliques_Sub_P Parameter: Plant Line Value: WS
  misc_feature: MA Experiment 20000355 PARAMETER Experiment Name: At_Siliques_Sub_P Parameter: Tissue Value: Less Than 5mm Siliques vs. Whole Plant
  misc_feature: MA Experiment ID: 20000440 Result: Down-regulated in Transcription
  misc_feature: MA Experiment 20000440 PARAMETER Experiment Name: At_Closed-Flower__Sub_P Parameter: Tissue Value: Closed Flower vs. Whole Plant
tgagttctcctacaattttcctaaattcttggatttgagatttcactttttccgatttgaaacaatgatgataactcgcggtggagccaaggcggcgaaatcgctgttagtggcggctggaccacgtttgttctcgacggtccgtacggtttcgtctcacgaggctttatcagcaagccatattttgaagcctggtgttacatctgcttggatatggacactagagctccgacgattggaggtatgagattcgctagcacgattactctgggagagaaaactccgatgaaggaggaggacgcgaatcagaagaaaacagagaacgaatccaccggtggagacgccgccggaggtaataacaagggagataaaggaatcgcgagctattggggtgttgaacctaataagattactaaagaagatggttctgaatggaagtggaactgtttcaggccatgggaaacgtataaagctgatataacgatagatctgaagaagcatcatgttccaacgacgtttcttgatagaatagcttattggactgttaaatctcttcgctggcctaccgatttgttcttccagaggagatatggatgtcgagctatgatgcttgaaactgtagcagcagtacctggaatggttggaggaatgttactacactgcaaatcgcttcgacgttttgagcaaagtggaggatggattaaggctcttcttgaggaagcagagaatgagagaatgcatcttatgacattcatggaagtcgcgaaaccgaaatggtacgagagagcgctcgtgatcactgtgcaaggagtcttcttcaacgcttatttccttggttacttaatctctcccaagtttgctcatcgtatggttgggtaccttgaagaagaagcgatccattcttatactgagtttctcaaggaacttgacaaaggtaacattgagaatgttcctgctccggctattgctattgattactggaggcttcctgctgatgcgacacttcgtgatgttgtgatggttgttcgtgctgacgaggctcatcaccgtgatgtaaaccattttgcatctgatattcactaccaaggtcgtgaactaaaggaagctccagctccaattgggtatcattgattcgattaaaagaagagctttttctcaagtttaaaactttgttctaaacaatttgactgatatacatcatcacctctgcttaagccatacttggattcggctttctttgaatgttgcatacgaatgttctgatttcttctttacttttcctgtcaatggggcttttgggct

SEQ ID NO: 76644 - protein, 305 aa, Arabidopsis thaliana
  peptide (1)..(305): Ceres Seq. ID no. 7108709
  misc_feature (26)..(303): Pfam Name: Alternative oxidase Pfam Description: Alternative oxidase
  misc_feature (1)..(305): Homolog of NCBI NO: 15228734 NR Description: alternative oxidase 1a precursor; protein id: supported by cDNA: 116257., supported by cDNA: gi_13877806, by cDNA: gi_16323479 [Arabidopsis thaliana]
  misc_feature (1)..(305): Homolog of NCBI NO: 11278947 NR Description: alternative respiratory pathway oxidase (EC
  misc_feature (1)..(305): Homolog of NCBI NO: 421824 NR Description: alternative respiratory pathway oxidase (EC
  misc_feature (19)..(305): Homolog of NCBI NO: 1872517 NR Description: alternative oxidase [Arabidopsis thaliana]
  misc_feature (4)..(305): Homolog of NCBI NO: 15228729 NR Description: alternative oxidase 1b precursor; protein id: [Arabidopsis thaliana] >gi|3913143|sp|O23913|AX1B_ARATH oxidase 1b, mitochondrial precursor >gi|2506082|dbj|BAA22624.1|
  misc_feature (1)..(305): Homolog of NCBI NO: 6634501 NR Description: alternative oxidase [Populus tremula x Populus
  misc_feature (4)..(305): Homolog of NCBI NO: 15232222 NR Description: alternative oxidase 1c precursor; protein id: [Arabidopsis thaliana] >gi|3913142|sp|O22048|AX1C_ARATH oxidase 1c, mitochondrial precursor >gi|2506049|dbj|BAA22635.1|
  misc_feature (10)..(305): Homolog of NCBI NO: 3913066 NR Description: Alternative oxidase 2, mitochondrial precursor
  misc_feature (10)..(305): Homolog of NCBI NO: 1076618 NR Description: alternative respiratory pathway oxidase (EC - common tobacco >gi|633600|emb|CAA56163.1| alternative oxidase
  misc_feature (10)..(305): Homolog of NCBI NO: 3023316 NR Description: Alternative oxidase 1, mitochondrial precursor
MDTRAPTIGGMRFASTITLGEKTPMKEEDANQKKTENESTGGDAAGGNNKGDKGIASYWGVEPNKITKEDGSEWKWNCFRPWETYKADITIDLKKHHVPTTFLDRIAYWTVKSLRWPTDLFFQRRYGCRAMMLETVAAVPGMVGGMLLHCKSLRRFEQSGGWIKALLEEAENERMHLMTFMEVAKPKWYERALVITVQGVFFNAYFLGYLISPKFAHRMVGYLEEEAIHSYTEFLKELDKGNIENVPAPAIAIDYWRLPADATLRDVVMVVRADEAHHRDVNHFASDIHYQGRELKEAPAPIGYH

SEQ ID NO: 76645 - protein, 295 aa, Arabidopsis thaliana; identical to SEQ ID NO: 40787
  peptide (1)..(295): Ceres Seq. ID no. 7108710
  misc_feature (16)..(293): Pfam Name: Alternative oxidase Pfam Description: Alternative oxidase
  misc_feature (1)..(295): Homolog of NCBI NO: 15228734 NR Description: alternative oxidase 1a precursor; protein id: supported by cDNA: 116257., supported by cDNA: gi_13877806, by cDNA: gi_16323479 [Arabidopsis thaliana]
  misc_feature (1)..(295): Homolog of NCBI NO: 11278947 NR Description: alternative respiratory pathway oxidase (EC
  misc_feature (1)..(295): Homolog of NCBI NO: 421824 NR Description: alternative respiratory pathway oxidase (EC
  misc_feature (9)..(295): Homolog of NCBI NO: 1872517 NR Description: alternative oxidase [Arabidopsis thaliana]
  misc_feature (1)..(295): Homolog of NCBI NO: 15228729 NR Description: alternative oxidase 1b precursor; protein id: [Arabidopsis thaliana] >gi|3913143|sp|O23913|AX1B_ARATH oxidase 1b, mitochondrial precursor >gi|2506082|dbj|BAA22624.1|
  misc_feature (1)..(295): Homolog of NCBI NO: 6634501 NR Description: alternative oxidase [Populus tremula x Populus
  misc_feature (1)..(295): Homolog of NCBI NO: 15232222 NR Description: alternative oxidase 1c precursor; protein id: [Arabidopsis thaliana] >gi|3913142|sp|O22048|AX1C_ARATH oxidase 1c, mitochondrial precursor >gi|2506049|dbj|BAA22635.1|
  misc_feature (1)..(295): Homolog of NCBI NO: 3913066 NR Description: Alternative oxidase 2, mitochondrial precursor
  misc_feature (1)..(295): Homolog of NCBI NO: 1076618 NR Description: alternative respiratory pathway oxidase (EC - common tobacco >gi|633600|emb|CAA56163.1| alternative oxidase
  misc_feature (1)..(295): Homolog of NCBI NO: 3023316 NR Description: Alternative oxidase 1, mitochondrial precursor

SEQ ID NO: 76646 - protein, 281 aa, Arabidopsis thaliana
  peptide (1)..(281): Ceres Seq. ID no. 7108711
  misc_feature (2)..(279): Pfam Name: Alternative oxidase Pfam Description: Alternative oxidase
  misc_feature (1)..(281): Homolog of NCBI NO: 15228734 NR Description: alternative oxidase 1a precursor; protein id: supported by cDNA: 116257., supported by cDNA: gi_13877806, by cDNA: gi_16323479 [Arabidopsis thaliana]
  misc_feature (1)..(281): Homolog of NCBI NO: 11278947 NR Description: alternative respiratory pathway oxidase (EC
  misc_feature (1)..(281): Homolog of NCBI NO: 421824 NR Description: alternative respiratory pathway oxidase (EC
  misc_feature (1)..(281): Homolog of NCBI NO: 1872517 NR Description: alternative oxidase [Arabidopsis thaliana]
  misc_feature (1)..(281): Homolog of NCBI NO: 15228729 NR Description: alternative oxidase 1b precursor; protein id: [Arabidopsis thaliana] >gi|3913143|sp|O23913|AX1B_ARATH oxidase 1b, mitochondrial precursor >gi|2506082|dbj|BAA22624.1|
  misc_feature (1)..(281): Homolog of NCBI NO: 6634501 NR Description: alternative oxidase [Populus tremula x Populus
  misc_feature (1)..(281): Homolog of NCBI NO: 15232222 NR Description: alternative oxidase 1c precursor; protein id: [Arabidopsis thaliana] >gi|3913142|sp|O22048|AX1C_ARATH oxidase 1c, mitochondrial precursor >gi|2506049|dbj|BAA22635.1|
  misc_feature (1)..(281): Homolog of NCBI NO: 3913066 NR Description: Alternative oxidase 2, mitochondrial precursor
  misc_feature (1)..(281): Homolog of NCBI NO: 1076618 NR Description: alternative respiratory pathway oxidase (EC - common tobacco >gi|633600|emb|CAA56163.1| alternative oxidase
  misc_feature (1)..(281): Homolog of NCBI NO: 3023316 NR Description: Alternative oxidase 1, mitochondrial precursor
MKEEDANQKKTENESTGGDAAGGNNKGDKGIASYWGVEPNKITKEDGSEWKWNCFRPWETYKADITIDLKKHHVPTTFLDRIAYWTVKSLRWPTDLFFQRRYGCRAMMLETVAAVPGMVGGMLLHCKSLRRFEQSGGWIKALLEEAENERMHLMTFMEVAKPKWYERALVITVQGVFFNAYFLGYLISPKFAHRMVGYLEEEAIHSYTEFLKELDKGNIENVPAPAIAIDYWRLPADATLRDVVMVVRADEAHHRDVNHFASDIHYQGRELKEAPAPIGYH

SEQ ID NO: 76647 - DNA, 963 bp, Arabidopsis thaliana
  misc_feature (1)..(963): Ceres Seq. ID no. 7108712
  misc_feature: MA Experiment ID: 20000171 Result: Down-regulated in Transcription
  misc_feature: MA Experiment 20000171 PARAMETER Experiment Name: At_42deg_Heat_P Parameter: Age (day) Value: 14
  misc_feature: MA Experiment 20000171 PARAMETER Experiment Name: At_42deg_Heat_P Parameter: Organism Value: A. thaliana
  misc_feature: MA Experiment 20000171 PARAMETER Experiment Name: At_42deg_Heat_P Parameter: Plant Line Value: WS
  misc_feature: MA Experiment 20000171 PARAMETER Experiment Name: At_42deg_Heat_P Parameter: Temperature (deg C) Value: 42 vs. 22
  misc_feature: MA Experiment 20000171 PARAMETER Experiment Name: At_42deg_Heat_P Parameter: Timepoint (hr) Value: 1
  misc_feature: MA Experiment 20000171 PARAMETER Experiment Name: At_42deg_Heat_P Parameter: Tissue Value: Aerial
  misc_feature: MA Experiment ID: 20000173 Result: Down-regulated in Transcription
  misc_feature: MA Experiment 20000173 PARAMETER Experiment Name: At_42deg_Heat_P Parameter: Age (day) Value: 14
  misc_feature: MA Experiment 20000173 PARAMETER Experiment Name: At_42deg_Heat_P Parameter: Organism Value: A. thaliana
  misc_feature: MA Experiment 20000173 PARAMETER Experiment Name: At_42deg_Heat_P Parameter: Plant Line Value: WS
  misc_feature: MA Experiment 20000173 PARAMETER Experiment Name: At_42deg_Heat_P Parameter: Temperature (deg C) Value: 42 vs. 22
  misc_feature: MA Experiment 20000173 PARAMETER Experiment Name: At_42deg_Heat_P Parameter: Timepoint (hr) Value: 6
  misc_feature: MA Experiment 20000173 PARAMETER Experiment Name: At_42deg_Heat_P Parameter: Tissue Value: Aerial
  misc_feature: MA Experiment ID: 20000182 Result: Up-regulated in Transcription
  misc_feature: MA Experiment 20000182 PARAMETER Experiment Name: At_2mM_SA_P Parameter: Age (day) Value: 14
  misc_feature: MA Experiment 20000182 PARAMETER Experiment Name: At_2mM_SA_P Parameter: Organism Value: A. thaliana
  misc_feature: MA Experiment 20000182 PARAMETER Experiment Name: At_2mM_SA_P Parameter: Plant Line Value: WS
  misc_feature: MA Experiment 20000182 PARAMETER Experiment Name: At_2mM_SA_P Parameter: Timepoint (hr) Value: 6
  misc_feature: MA Experiment 20000182 PARAMETER Experiment Name: At_2mM_SA_P Parameter: Tissue Value: Aerial
  misc_feature: MA Experiment 20000182 PARAMETER Experiment Name: At_2mM_SA_P Parameter: Treatment Value: 2mM SA vs. No Treatment
  misc_feature: MA Experiment ID: 20000184 Result: Down-regulated in Transcription
  misc_feature: MA Experiment 20000184 PARAMETER Experiment Name: At_Shoots__P Parameter: Age (day) Value: 7
  misc_feature: MA Experiment 20000184 PARAMETER Experiment Name: At_Shoots__P Parameter: Tissue Value: Shoots vs. Whole Plant
  misc_feature: MA Experiment ID: 20000185 Result: Down-regulated in Transcription
  misc_feature: MA Experiment 20000185 PARAMETER Experiment Name: At_Roots__P Parameter: Age (day) Value: 7 vs. 21
  misc_feature: MA Experiment 20000185 PARAMETER Experiment Name: At_Roots__P Parameter: Organism Value: A. thaliana
  misc_feature: MA Experiment 20000185 PARAMETER Experiment Name: At_Roots__P Parameter: Tissue Value: Roots vs. Whole Plant
  misc_feature: MA Experiment ID: 20000234 Result: Down-regulated in Transcription
  misc_feature: MA Experiment 20000234 PARAMETER Experiment Name: At_Siliques_P Parameter: Age (day) Value: 21
  misc_feature: MA Experiment 20000234 PARAMETER Experiment Name: At_Siliques_P Parameter: Organism Value: A. thaliana
  misc_feature: MA Experiment 20000234 PARAMETER Experiment Name: At_Siliques_P Parameter: Plant Line Value: WS
  misc_feature: MA Experiment 20000234 PARAMETER Experiment Name: At_Siliques_P Parameter: Tissue Value: Less Than 5mm Siliques vs. Whole Plant
  misc_feature: MA Experiment ID: 20000264 Result: Down-regulated in Transcription
  misc_feature: MA Experiment 20000264 PARAMETER Experiment Name: At_Open_Flower_P Parameter: Age (day) Value: 21
  misc_feature: MA Experiment 20000264 PARAMETER Experiment Name: At_Open_Flower_P Parameter: Plant Line Value: WS
  misc_feature: MA Experiment 20000264 PARAMETER Experiment Name: At_Open_Flower_P Parameter: Tissue Value: Open Flower vs. Whole Plant
  misc_feature: MA Experiment ID: 20000265 Result: Down-regulated in Transcription
  misc_feature: MA Experiment 20000265 PARAMETER Experiment Name: At_Open_Flower_P Parameter: Age (day) Value: 21
  misc_feature: MA Experiment 20000265 PARAMETER Experiment Name: At_Open_Flower_P Parameter: Plant Line Value: WS
  misc_feature: MA Experiment 20000265 PARAMETER Experiment Name: At_Open_Flower_P Parameter: Tissue Value: Closed Flower vs. Whole Plant
  misc_feature: MA Experiment ID: 20000286 Result: Down-regulated in Transcription
  misc_feature: MA Experiment 20000286 PARAMETER Experiment Name: At_Open_Flower_P Parameter: Age (day) Value: 21
  misc_feature: MA Experiment 20000286 PARAMETER Experiment Name: At_Open_Flower_P Parameter: Plant Line Value: WS
  misc_feature: MA Experiment 20000286 PARAMETER Experiment Name: At_Open_Flower_P Parameter: Tissue Value: Half Open vs. Whole Plant
  misc_feature: MA Experiment ID: 20000438 Result: Down-regulated in Transcription
  misc_feature: MA Experiment 20000438 PARAMETER Experiment Name: At_Shoots__P Parameter: Age (day) Value: 14
  misc_feature: MA Experiment 20000438 PARAMETER Experiment Name: At_Shoots__P Parameter: Tissue Value: Shoots vs. Whole Plant
  misc_feature: MA Experiment ID: 20000439 Result: Down-regulated in Transcription
  misc_feature: MA Experiment 20000439 PARAMETER Experiment Name: At_Roots__P Parameter: Age (day) Value: 14 vs. 21
  misc_feature: MA Experiment 20000439 PARAMETER Experiment Name: At_Roots__P Parameter: Organism Value: A. thaliana
  misc_feature: MA Experiment 20000439 PARAMETER Experiment Name: At_Roots__P Parameter: Tissue Value: Roots vs. Whole Plant
  misc_feature: MA Experiment ID: 20000453 Result: Down-regulated in Transcription
  misc_feature: MA Experiment 20000453 PARAMETER Experiment Name: At_100uM_ABA_P Parameter: Age (day) Value: 15
  misc_feature: MA Experiment 20000453 PARAMETER Experiment Name: At_100uM_ABA_P Parameter: Organism Value: A. thaliana
  misc_feature: MA Experiment 20000453 PARAMETER Experiment Name: At_100uM_ABA_P Parameter: Plant Line Value: WS
  misc_feature: MA Experiment 20000453 PARAMETER Experiment Name: At_100uM_ABA_P Parameter: Timepoint (hr) Value: 24
  misc_feature: MA Experiment 20000453 PARAMETER Experiment Name: At_100uM_ABA_P Parameter: Tissue Value: Aerial
  misc_feature: MA Experiment 20000453 PARAMETER Experiment Name: At_100uM_ABA_P Parameter: Treatment Value: 100uM ABA vs. No Treatment
  misc_feature: MA Experiment ID: 20000455 Result: Down-regulated in Transcription
  misc_feature: MA Experiment 20000455 PARAMETER Experiment Name: At_100uM_ABA_P Parameter: Age (day) Value: 16
  misc_feature: MA Experiment 20000455 PARAMETER Experiment Name: At_100uM_ABA_P Parameter: Organism Value: A. thaliana
  misc_feature: MA Experiment 20000455 PARAMETER Experiment Name: At_100uM_ABA_P Parameter: Plant Line Value: WS
  misc_feature: MA Experiment 20000455 PARAMETER Experiment Name: At_100uM_ABA_P Parameter: Timepoint (hr) Value: 48
  misc_feature: MA Experiment 20000455 PARAMETER Experiment Name: At_100uM_ABA_P Parameter: Tissue Value: Aerial
  misc_feature: MA Experiment 20000455 PARAMETER Experiment Name: At_100uM_ABA_P Parameter: Treatment Value: 100uM ABA vs. No Treatment
  misc_feature: MA Experiment ID: 20000527 Result: Down-regulated in Transcription
  misc_feature: MA Experiment 20000527 PARAMETER Experiment Name: At_10percent_PEG_P Parameter: Age (day) Value: 20
  misc_feature: MA Experiment 20000527 PARAMETER Experiment Name: At_10percent_PEG_P Parameter: Organism Value: A. thaliana
  misc_feature: MA Experiment 20000527 PARAMETER Experiment Name: At_10percent_PEG_P Parameter: Plant Line Value: WS
  misc_feature: MA Experiment 20000527 PARAMETER Experiment Name: At_10percent_PEG_P Parameter: Timepoint (day) Value: 20
  misc_feature: MA Experiment 20000527 PARAMETER Experiment Name: At_10percent_PEG_P Parameter: Tissue Value: Whole Plant
  misc_feature: MA Experiment 20000527 PARAMETER Experiment Name: At_10percent_PEG_P Parameter: Treatment Value: 10percent PEG vs. No Treatment
  misc_feature: MA Experiment ID: 20000573 Result: Up-regulated in Transcription
  misc_feature: MA Experiment 20000573 PARAMETER Experiment Name: At_100uM_ABA_Mutants__P Parameter: Organism Value: A. thaliana
  misc_feature: MA Experiment 20000573 PARAMETER Experiment Name: At_100uM_ABA_Mutants__P Parameter: Plant Line Value: CS22 vs. Ler wt
  misc_feature: MA Experiment 20000573 PARAMETER Experiment Name: At_100uM_ABA_Mutants__P Parameter: Timepoint (hr) Value: N/A
  misc_feature: MA Experiment 20000573 PARAMETER Experiment Name: At_100uM_ABA_Mutants__P Parameter: Tissue Value: Whole Plant
  misc_feature: MA Experiment 20000573 PARAMETER Experiment Name: At_100uM_ABA_Mutants__P Parameter: Treatment Value: None
  misc_feature: MA Experiment ID: 20000574 Result: Up-regulated in Transcription
  misc_feature: MA Experiment 20000574 PARAMETER Experiment Name: At_100uM_ABA_Mutants__P Parameter: Organism Value: A. thaliana
  misc_feature: MA Experiment 20000574 PARAMETER Experiment Name: At_100uM_ABA_Mutants__P Parameter: Plant Line Value: CS23 vs. Ler wt
  misc_feature: MA Experiment 20000574 PARAMETER Experiment Name: At_100uM_ABA_Mutants__P Parameter: Timepoint (hr) Value: N/A
  misc_feature: MA Experiment 20000574 PARAMETER Experiment Name: At_100uM_ABA_Mutants__P Parameter: Tissue Value: Whole Plant
  misc_feature: MA Experiment 20000574 PARAMETER Experiment Name: At_100uM_ABA_Mutants__P Parameter: Treatment Value: None
  misc_feature: MA Experiment ID: 20000576 Result: Down-regulated in Transcription
  misc_feature: MA Experiment 20000576 PARAMETER Experiment Name: At_100uM_ABA_Mutants__P Parameter: Organism Value: A. thaliana
  misc_feature: MA Experiment 20000576 PARAMETER Experiment Name: At_100uM_ABA_Mutants__P Parameter: Plant Line Value: CS23
  misc_feature: MA Experiment 20000576 PARAMETER Experiment Name: At_100uM_ABA_Mutants__P Parameter: Timepoint (hr) Value: 6
  misc_feature: MA Experiment 20000576 PARAMETER Experiment Name: At_100uM_ABA_Mutants__P Parameter: Tissue Value: Whole Plant
  misc_feature: MA Experiment 20000576 PARAMETER Experiment Name: At_100uM_ABA_Mutants__P Parameter: Treatment Value: 1uM ABA vs. No Treatment
  misc_feature: MA Experiment ID: 20000606 Result: Up-regulated in Transcription
  misc_feature: MA Experiment 20000606 PARAMETER Experiment Name: At_CS8548_Mutant_P Parameter: Age (day) Value: 14
  misc_feature: MA Experiment 20000606 PARAMETER Experiment Name: At_CS8548_Mutant_P Parameter: Plant Line Value: CS8548 vs. wt
  misc_feature: MA Experiment 20000606 PARAMETER Experiment Name: At_CS8548_Mutant_P Parameter: Tissue Value: Whole Plant
  misc_feature: MA Experiment ID: 20000709 Result: Down-regulated in Transcription
  misc_feature: MA Experiment 20000709 PARAMETER Experiment Name: At_15mM_NH4NO3_L-to-H_P Parameter: Age (hr) Value: 14
  misc_feature: MA Experiment 20000709 PARAMETER Experiment Name: At_15mM_NH4NO3_L-to-H_P Parameter: Organism Value: A. thaliana
  misc_feature: MA Experiment 20000709 PARAMETER Experiment Name: At_15mM_NH4NO3_L-to-H_P Parameter: Plant Line Value: WS
  misc_feature: MA Experiment 20000709 PARAMETER Experiment Name: At_15mM_NH4NO3_L-to-H_P Parameter: Timepoint (hr) Value: 4
  misc_feature: MA Experiment 20000709 PARAMETER Experiment Name: At_15mM_NH4NO3_L-to-H_P Parameter: Tissue Value: Aerial
  misc_feature: MA Experiment 20000709 PARAMETER Experiment Name: At_15mM_NH4NO3_L-to-H_P Parameter: Treatment Value: 15mM NH4NO3 vs. 30mM Mannitol
  misc_feature: MA Experiment ID: 20000794 Result: Down-regulated in Transcription
  misc_feature: MA Experiment 20000794 PARAMETER Experiment Name: At_Petals_P Parameter: Age (day) Value: 23-25 days
  misc_feature: MA Experiment 20000794 PARAMETER Experiment Name: At_Petals_P Parameter: Plant Line Value: WS
  misc_feature: MA Experiment 20000794 PARAMETER Experiment Name: At_Petals_P Parameter: Tissue Value: Petals vs. Whole plant
  misc_feature: MA Experiment ID: 20001554 Result: Down-regulated in Transcription
  misc_feature: MA Experiment 20001554 PARAMETER Experiment Name: At_Drought_Soil_Dry_P Parameter: Age (day) Value: 21
  misc_feature: MA Experiment 20001554 PARAMETER Experiment Name: At_Drought_Soil_Dry_P Parameter: Organism Value: A. thaliana
  misc_feature: MA Experiment 20001554 PARAMETER Experiment Name: At_Drought_Soil_Dry_P Parameter: Plant Line Value: WS
  misc_feature: MA Experiment 20001554 PARAMETER Experiment Name: At_Drought_Soil_Dry_P Parameter: Post Timepoint (hr) Value: None
  misc_feature: MA Experiment 20001554 PARAMETER Experiment Name: At_Drought_Soil_Dry_P Parameter: Post-Treatment Value: None
  misc_feature: MA Experiment 20001554 PARAMETER Experiment Name: At_Drought_Soil_Dry_P Parameter: Timepoint (day) Value: 7
  misc_feature: MA Experiment 20001554 PARAMETER Experiment Name: At_Drought_Soil_Dry_P Parameter: Treatment Value: Drought vs. No Drought
  misc_feature: MA Experiment ID: 20001555 Result: Down-regulated in Transcription
  misc_feature: MA Experiment 20001555 PARAMETER Experiment Name: At_Drought_Soil_Dry_P Parameter: Age (day) Value: 24
  misc_feature: MA Experiment 20001555 PARAMETER Experiment Name: At_Drought_Soil_Dry_P Parameter: Organism Value: A. thaliana
  misc_feature: MA Experiment 20001555 PARAMETER Experiment Name: At_Drought_Soil_Dry_P Parameter: Plant Line Value: WS
  misc_feature: MA Experiment 20001555 PARAMETER Experiment Name: At_Drought_Soil_Dry_P Parameter: Post Timepoint (hr) Value: None
  misc_feature: MA Experiment 20001555 PARAMETER Experiment Name: At_Drought_Soil_Dry_P Parameter: Post-Treatment Value: None
  misc_feature: MA Experiment 20001555 PARAMETER Experiment Name: At_Drought_Soil_Dry_P Parameter: Timepoint (day) Value: 10
  misc_feature: MA Experiment 20001555 PARAMETER Experiment Name: At_Drought_Soil_Dry_P Parameter: Treatment Value: Drought vs. No Drought
  misc_feature: MA Experiment ID: 20001556 Result: Down-regulated in Transcription
  misc_feature: MA Experiment 20001556 PARAMETER Experiment Name: At_Drought_Soil_Dry_P Parameter: Age (day) Value: 26
  misc_feature: MA Experiment 20001556 PARAMETER Experiment Name: At_Drought_Soil_Dry_P Parameter: Organism Value: A. thaliana
  misc_feature: MA Experiment 20001556 PARAMETER Experiment Name: At_Drought_Soil_Dry_P Parameter: Plant Line Value: WS
  misc_feature: MA Experiment 20001556 PARAMETER Experiment Name: At_Drought_Soil_Dry_P Parameter: Post Timepoint (hr) Value: None
  misc_feature: MA Experiment 20001556 PARAMETER Experiment Name: At_Drought_Soil_Dry_P Parameter: Post-Treatment Value: None
  misc_feature: MA Experiment 20001556 PARAMETER Experiment Name: At_Drought_Soil_Dry_P Parameter: Timepoint (day) Value: 12
  misc_feature: MA Experiment 20001556 PARAMETER Experiment Name: At_Drought_Soil_Dry_P Parameter: Treatment Value: Drought vs. No Drought
  misc_feature: MA Experiment ID: 20001557 Result: Down-regulated in Transcription
  misc_feature: MA Experiment 20001557 PARAMETER Experiment Name: At_Drought_Soil_Dry_P Parameter: Age (day) Value: 27
  misc_feature: MA Experiment 20001557 PARAMETER Experiment Name: At_Drought_Soil_Dry_P Parameter: Organism Value: A. thaliana
  misc_feature: MA Experiment 20001557 PARAMETER Experiment Name: At_Drought_Soil_Dry_P Parameter: Plant Line Value: WS
  misc_feature: MA Experiment 20001557 PARAMETER Experiment Name: At_Drought_Soil_Dry_P Parameter: Post Timepoint (hr) Value: 3
  misc_feature: MA Experiment 20001557 PARAMETER Experiment Name: At_Drought_Soil_Dry_P Parameter: Post-Treatment Value: Re-Water vs. No Drought
  misc_feature: MA Experiment 20001557 PARAMETER Experiment Name: At_Drought_Soil_Dry_P Parameter: Timepoint (day) Value: 13
  misc_feature: MA Experiment 20001557 PARAMETER Experiment Name: At_Drought_Soil_Dry_P Parameter: Treatment Value: Drought vs. No Drought
  misc_feature: MA Experiment ID: 20001558 Result: Down-regulated in Transcription
  misc_feature: MA Experiment 20001558 PARAMETER Experiment Name: At_Drought_Soil_Dry_P Parameter: Age (day) Value: 27
  misc_feature: MA Experiment 20001558 PARAMETER Experiment Name: At_Drought_Soil_Dry_P Parameter: Organism Value: A. thaliana
  misc_feature: MA Experiment 20001558 PARAMETER Experiment Name: At_Drought_Soil_Dry_P Parameter: Plant Line Value: WS
  misc_feature: MA Experiment 20001558 PARAMETER Experiment Name: At_Drought_Soil_Dry_P Parameter: Post Timepoint (hr) Value: 6
  misc_feature: MA Experiment 20001558 PARAMETER Experiment Name: At_Drought_Soil_Dry_P Parameter: Post-Treatment Value: Re-Water vs. No Drought
  misc_feature: MA Experiment 20001558 PARAMETER Experiment Name: At_Drought_Soil_Dry_P Parameter: Timepoint (day) Value: 13
  misc_feature: MA Experiment 20001558 PARAMETER Experiment Name: At_Drought_Soil_Dry_P Parameter: Treatment Value: Drought vs. No Drought
  misc_feature: MA Experiment ID: 20001560 Result: Down-regulated in Transcription
  misc_feature: MA Experiment 20001560 PARAMETER Experiment Name: At_Drought_Soil_Dry_P Parameter: Age (day) Value: 28
  misc_feature: MA Experiment 20001560 PARAMETER Experiment Name: At_Drought_Soil_Dry_P Parameter: Organism Value: A. thaliana
  misc_feature: MA Experiment 20001560 PARAMETER Experiment Name: At_Drought_Soil_Dry_P Parameter: Plant Line Value: WS
  misc_feature: MA Experiment 20001560 PARAMETER Experiment Name: At_Drought_Soil_Dry_P Parameter: Post Timepoint (hr) Value: None
  misc_feature: MA Experiment 20001560 PARAMETER Experiment Name: At_Drought_Soil_Dry_P Parameter: Post-Treatment Value: None
  misc_feature: MA Experiment 20001560 PARAMETER Experiment Name: At_Drought_Soil_Dry_P Parameter: Timepoint (day) Value: 14
  misc_feature: MA Experiment 20001560 PARAMETER Experiment Name: At_Drought_Soil_Dry_P Parameter: Treatment Value: Drought vs. No Drought
  misc_feature: MA Experiment ID: 20001773 Result: Down-regulated in Transcription
  misc_feature: MA Experiment 20001773 PARAMETER Experiment Name: At_Far-red-enriched-adult_P Parameter: Age (day) Value: 30
  misc_feature: MA Experiment 20001773 PARAMETER Experiment Name: At_Far-red-enriched-adult_P Parameter: Light Value: Far-red enriched vs. White
  misc_feature: MA Experiment 20001773 PARAMETER Experiment Name: At_Far-red-enriched-adult_P Parameter: Organism Value: A. thaliana
  misc_feature: MA Experiment 20001773 PARAMETER Experiment Name: At_Far-red-enriched-adult_P Parameter: Plant Line Value: Columbia
  misc_feature: MA Experiment 20001773 PARAMETER Experiment Name: At_Far-red-enriched-adult_P Parameter: Timepoint (hr) Value: 48
  misc_feature: MA Experiment 20001773 PARAMETER Experiment Name: At_Far-red-enriched-adult_P Parameter: Tissue Value: Aerial
  misc_feature: MA Experiment ID: 20001904 Result: Down-regulated in Transcription
  misc_feature: MA Experiment 20001904 PARAMETER Experiment Name: At_Drought_Reproduction_P Parameter: Age (day) Value: 37
  misc_feature: MA Experiment 20001904 PARAMETER Experiment Name: At_Drought_Reproduction_P Parameter: Organism Value: A. thaliana
  misc_feature: MA Experiment 20001904 PARAMETER Experiment Name: At_Drought_Reproduction_P Parameter: Plant Line Value: WS
  misc_feature: MA Experiment 20001904 PARAMETER Experiment Name: At_Drought_Reproduction_P Parameter: Timepoint (day) Value: 7
  misc_feature: MA Experiment 20001904 PARAMETER Experiment Name: At_Drought_Reproduction_P Parameter: Tissue Value: Rosettes
  misc_feature: MA Experiment 20001904 PARAMETER Experiment Name: At_Drought_Reproduction_P Parameter: Treatment Value: Drought vs. No Drought
  misc_feature: MA Experiment ID: 20001905 Result: Down-regulated in Transcription
  misc_feature: MA Experiment 20001905 PARAMETER Experiment Name: At_Drought_Reproduction_P Parameter: Age (day) Value: 40
  misc_feature: MA Experiment 20001905 PARAMETER Experiment Name: At_Drought_Reproduction_P Parameter: Organism Value: A. thaliana
  misc_feature: MA Experiment 20001905 PARAMETER Experiment Name: At_Drought_Reproduction_P Parameter: Plant Line Value: WS
  misc_feature: MA Experiment 20001905 PARAMETER Experiment Name: At_Drought_Reproduction_P Parameter: Timepoint (day) Value: 10
  misc_feature: MA Experiment 20001905 PARAMETER Experiment Name: At_Drought_Reproduction_P Parameter: Tissue Value: Rosettes
  misc_feature: MA Experiment 20001905 PARAMETER Experiment Name: At_Drought_Reproduction_P Parameter: Treatment Value: Drought vs. No Drought
ggcacgagctcgtgcaattcggccgaattcggcacgagaaaatatggcaaatatctccagtattcacattctcttcctcgtgttcatcacaagcggcattgctgttatggccacagacttcactctaaggaacaattgccctaccaccgtctgggccggaactctcgccggtcaaggacccaagctcggcgatggaggatttgaattgactccaggtgcttcccgacagctcacggctcctgcaggatggtcaggccggttctgggctcgtacaggctgcaactttgacgcctccggaaacggtagatgtgtaaccggagactgtggcggtctaagatgtaacggcggcggagttcctcccgtcactctggctgaattcactctagtaggcgatggcggcaaagatttctacgatgtgagcctcgtagatggttacaatgtcaagctggggataagaccatccggaggatcgggagattgcaaatacgcaggctgtgtctctgacctcaacgcggcttgccccgacatgcttaaggtcatggatcagaacaatgtcgtggcctgcaagagtgcctgtgagaggtttaatacggatcaatattgctgccgtggagctaacgataagccggaaacttgtcctcccacggactactcgaggattttcaagaacgcttgccctgacgcctatagctacgcttatgacgacgaaacgagcaccttcacttgtaccggagctaactacgaaatcactttctgcccttaaaaaccgaagcttcgagttagatacagtcgggtttaattatctctcacgtttcttttgcttattatgtacggaaagataaataaggaaagctgatgactatgaatcatcgtcttccacttttaagcttttttagtgagtattagtcagttgttacactcagctgatttgtttacaaagaaataaaacaaaatgattgatct

SEQ ID NO: 76648 - protein, 253 aa, Arabidopsis thaliana
  peptide (1)..(253): Ceres Seq. ID no. 7108713
  misc_feature (44)..(253): Pfam Name: Thaumatin family Pfam Description: Thaumatin family
  misc_feature (15)..(253): Homolog of NCBI NO: 15222089 NR Description: thaumatin-like protein; protein id: At1g75040.1, by cDNA: gi_14334527, supported by cDNA: gi_1448918, supported by
  misc_feature (15)..(253): Homolog of NCBI NO: 15222090 NR Description: thaumatin-like protein; protein id: At1g75050.1
  misc_feature (15)..(253): Homolog of NCBI NO: 15222088 NR Description: thaumatin-like protein (PR-5); protein id: supported by cDNA: gi_2435405 [Arabidopsis thaliana]
  misc_feature (15)..(253): Homolog of NCBI NO: 2435406 NR Description: thaumatin-like protein [Arabidopsis thaliana]
  misc_feature (35)..(253): Homolog of NCBI NO: 6273385 NR Description: SCUTL2 [Vitis vinifera]
  misc_feature (15)..(252): Homolog of NCBI NO: 30686314 NR Description: thaumatin family [Arabidopsis thaliana]
  misc_feature (15)..(252): Homolog of NCBI NO: 28973703 NR Description: putative pathogenesis-related protein 5 precursor
  misc_feature (24)..(253): Homolog of NCBI NO: 25091401 NR Description: Thaumatin-like protein 1 precursor
  misc_feature (34)..(253): Homolog of NCBI NO: 20330768 NR Description: Putative thaumatin-like protein [Oryza sativa
  misc_feature (24)..(253): Homolog of NCBI NO: 32140539 NR Description: thaumatin/PR5-like protein [Pyrus pyrifolia]
ARARAIRPNSARENMANISSIHILFLVFITSGIAVMATDFTLRNNCPTTVWAGTLAGQGPKLGDGGFELTPGASRQLTAPAGWSGRFWARTGCNFDASGNGRCVTGDCGGLRCNGGGVPPVTLAEFTLVGDGGKDFYDVSLVDGYNVKLGIRPSGGSGDCKYAGCVSDLNAACPDMLKVMDQNNVVACKSACERFNTDQYCCRGANDKPETCPPTDYSRIFKNACPDAYSYAYDDETSTFTCTGANYEITFCP

SEQ ID NO: 76649 - protein, 239 aa, Arabidopsis thaliana; identical to SEQ ID NO: 43814
  peptide (1)..(239): Ceres Seq. ID no. 7108714
  misc_feature (30)..(239): Pfam Name: Thaumatin family Pfam Description: Thaumatin family
  misc_feature (1)..(239): Homolog of NCBI NO: 15222089 NR Description: thaumatin-like protein; protein id: At1g75040.1, by cDNA: gi_14334527, supported by cDNA: gi_1448918, supported by
  misc_feature (1)..(239): Homolog of NCBI NO: 15222090 NR Description: thaumatin-like protein; protein id: At1g75050.1
  misc_feature (1)..(239): Homolog of NCBI NO: 15222088 NR Description: thaumatin-like protein (PR-5); protein id: supported by cDNA: gi_2435405 [Arabidopsis thaliana]
  misc_feature (1)..(239): Homolog of NCBI NO: 2435406 NR Description: thaumatin-like protein [Arabidopsis thaliana]
  misc_feature (21)..(239): Homolog of NCBI NO: 6273385 NR Description: SCUTL2 [Vitis vinifera]
  misc_feature (1)..(238): Homolog of NCBI NO: 30686314 NR Description: thaumatin family [Arabidopsis thaliana]
  misc_feature (1)..(238): Homolog of NCBI NO: 28973703 NR Description: putative pathogenesis-related protein 5 precursor
  misc_feature (10)..(239): Homolog of NCBI NO: 25091401 NR Description: Thaumatin-like protein 1 precursor
  misc_feature (20)..(239): Homolog of NCBI NO: 20330768 NR Description: Putative thaumatin-like protein [Oryza sativa
  misc_feature (10)..(239): Homolog of NCBI NO: 32140539 NR Description: thaumatin/PR5-like protein [Pyrus pyrifolia]

SEQ ID NO: 76650 - protein, 218 aa, Arabidopsis thaliana; identical to SEQ ID NO: 43815
  peptide (1)..(218): Ceres Seq. ID no. 7108715
  misc_feature (9)..(218): Pfam Name: Thaumatin family Pfam Description: Thaumatin family
  misc_feature (1)..(218): Homolog of NCBI NO: 15222089 NR Description: thaumatin-like protein; protein id: At1g75040.1, by cDNA: gi_14334527, supported by cDNA: gi_1448918, supported by
  misc_feature (1)..(218): Homolog of NCBI NO: 15222090 NR Description: thaumatin-like protein; protein id: At1g75050.1
  misc_feature (1)..(218): Homolog of NCBI NO: 15222088 NR Description: thaumatin-like protein (PR-5); protein id: supported by cDNA: gi_2435405 [Arabidopsis thaliana]
  misc_feature (1)..(218): Homolog of NCBI NO: 2435406 NR Description: thaumatin-like protein [Arabidopsis thaliana]
  misc_feature (1)..(218): Homolog of NCBI NO: 6273385 NR Description: SCUTL2 [Vitis vinifera]
  misc_feature (1)..(217): Homolog of NCBI NO: 30686314 NR Description: thaumatin family [Arabidopsis thaliana]
  misc_feature (1)..(217): Homolog of NCBI NO: 28973703 NR Description: putative pathogenesis-related protein 5 precursor
  misc_feature (1)..(218): Homolog of NCBI NO: 25091401 NR Description: Thaumatin-like protein 1 precursor
  misc_feature (1)..(218): Homolog of NCBI NO: 20330768 NR Description: Putative thaumatin-like protein [Oryza sativa
  misc_feature (1)..(218): Homolog of NCBI NO: 32140539 NR Description: thaumatin/PR5-like protein [Pyrus pyrifolia]

SEQ ID NO: 76651 - DNA, 1819 bp, Arabidopsis thaliana
  misc_feature (1)..(1819): Ceres Seq. ID no. 7108716
  misc_feature: MA Experiment ID: 20000173 Result: Down-regulated in Transcription
  misc_feature: MA Experiment 20000173 PARAMETER Experiment Name: At_42deg_Heat_P Parameter: Age (day) Value: 14
  misc_feature: MA Experiment 20000173 PARAMETER Experiment Name: At_42deg_Heat_P Parameter: Organism Value: A. thaliana
  misc_feature: MA Experiment 20000173 PARAMETER Experiment Name: At_42deg_Heat_P Parameter: Plant Line Value: WS
  misc_feature: MA Experiment 20000173 PARAMETER Experiment Name: At_42deg_Heat_P Parameter: Temperature (deg C) Value: 42 vs. 22
  misc_feature: MA Experiment 20000173 PARAMETER Experiment Name: At_42deg_Heat_P Parameter: Timepoint (hr) Value: 6
  misc_feature: MA Experiment 20000173 PARAMETER Experiment Name: At_42deg_Heat_P Parameter: Tissue Value: Aerial
  misc_feature: MA Experiment ID: 20000180 Result: Up-regulated in Transcription
  misc_feature: MA Experiment 20000180 PARAMETER Experiment Name: At_Germinating_Seeds_P Parameter: Age (hr) Value: 24 vs. 0
  misc_feature: MA Experiment 20000180 PARAMETER Experiment Name: At_Germinating_Seeds_P Parameter: Tissue Value: Germinating Seeds
  misc_feature: MA Experiment ID: 20000185 Result: Down-regulated in Transcription
  misc_feature: MA Experiment 20000185 PARAMETER Experiment Name: At_Roots__P Parameter: Age (day) Value: 7 vs. 21
  misc_feature: MA Experiment 20000185 PARAMETER Experiment Name: At_Roots__P Parameter: Organism Value: A. thaliana
  misc_feature: MA Experiment 20000185 PARAMETER Experiment Name: At_Roots__P Parameter: Tissue Value: Roots vs. Whole Plant
  misc_feature: MA Experiment ID: 20000234 Result: Down-regulated in Transcription
  misc_feature: MA Experiment 20000234 PARAMETER Experiment Name: At_Siliques_P Parameter: Age (day) Value: 21
  misc_feature: MA Experiment 20000234 PARAMETER Experiment Name: At_Siliques_P Parameter: Organism Value: A. thaliana
  misc_feature: MA Experiment 20000234 PARAMETER Experiment Name: At_Siliques_P Parameter: Plant Line Value: WS
  misc_feature: MA Experiment 20000234 PARAMETER Experiment Name: At_Siliques_P Parameter: Tissue Value: Less Than 5mm Siliques vs. Whole Plant
  misc_feature: MA Experiment ID: 20000235 Result: Down-regulated in Transcription
  misc_feature: MA Experiment 20000235 PARAMETER Experiment Name: At_Siliques_P Parameter: Age (day) Value: 21
  misc_feature: MA Experiment 20000235 PARAMETER Experiment Name: At_Siliques_P Parameter: Organism Value: A. thaliana
  misc_feature: MA Experiment 20000235 PARAMETER Experiment Name: At_Siliques_P Parameter: Plant Line Value: WS
  misc_feature: MA Experiment 20000235 PARAMETER Experiment Name: At_Siliques_P Parameter: Tissue Value: 5-10mm Siliques vs. Whole Plant
  misc_feature: MA Experiment ID: 20000264 Result: Down-regulated in Transcription
  misc_feature: MA Experiment 20000264 PARAMETER Experiment Name: At_Open_Flower_P Parameter: Age (day) Value: 21
  misc_feature: MA Experiment 20000264 PARAMETER Experiment Name: At_Open_Flower_P Parameter: Plant Line Value: WS
  misc_feature: MA Experiment 20000264 PARAMETER Experiment Name: At_Open_Flower_P Parameter: Tissue Value: Open Flower vs. Whole Plant
  misc_feature: MA Experiment ID: 20000265 Result: Down-regulated in Transcription
  misc_feature: MA Experiment 20000265 PARAMETER Experiment Name: At_Open_Flower_P Parameter: Age (day) Value: 21
  misc_feature: MA Experiment 20000265 PARAMETER Experiment Name: At_Open_Flower_P Parameter: Plant Line Value: WS
  misc_feature: MA Experiment 20000265 PARAMETER Experiment Name: At_Open_Flower_P Parameter: Tissue Value: Closed Flower vs. Whole Plant
  misc_feature: MA Experiment ID: 20000286 Result: Down-regulated in Transcription
  misc_feature: MA Experiment 20000286 PARAMETER Experiment Name: At_Open_Flower_P Parameter: Age (day) Value: 21
  misc_feature: MA Experiment 20000286 PARAMETER Experiment Name: At_Open_Flower_P Parameter: Plant Line Value: WS
  misc_feature: MA Experiment 20000286 PARAMETER Experiment Name: At_Open_Flower_P Parameter: Tissue Value: Half Open vs. Whole Plant
  misc_feature: MA Experiment ID: 20000439 Result: Down-regulated in Transcription
  misc_feature: MA Experiment 20000439 PARAMETER Experiment Name: At_Roots__P Parameter: Age (day) Value: 14 vs. 21
  misc_feature: MA Experiment 20000439 PARAMETER Experiment Name: At_Roots__P Parameter: Organism Value: A. thaliana
  misc_feature: MA Experiment 20000439 PARAMETER Experiment Name: At_Roots__P Parameter: Tissue Value: Roots vs. Whole Plant
  misc_feature: MA Experiment ID: 20000496 Result: Up-regulated in Transcription
  misc_feature: MA Experiment 20000496 PARAMETER Experiment Name: At_Guard_Cells_P Parameter: Harvest Date Value: 7/19/2002
  misc_feature: MA Experiment 20000496 PARAMETER Experiment Name: At_Guard_Cells_P Parameter: Organism Value: Canola
  misc_feature: MA Experiment 20000496 PARAMETER Experiment Name: At_Guard_Cells_P Parameter: Tissue Value: Guard Cells vs. Leaves
  misc_feature: MA Experiment ID: 20000794 Result: Down-regulated in Transcription
  misc_feature: MA Experiment 20000794 PARAMETER Experiment Name: At_Petals_P Parameter: Age (day) Value: 23-25 days
  misc_feature: MA Experiment 20000794 PARAMETER Experiment Name: At_Petals_P Parameter: Plant Line Value: WS
  misc_feature: MA Experiment 20000794 PARAMETER Experiment Name: At_Petals_P Parameter: Tissue Value: Petals vs. Whole plant
  misc_feature: MA Experiment ID: 20001554 Result: Down-regulated in Transcription
  misc_feature: MA Experiment 20001554 PARAMETER Experiment Name: At_Drought_Soil_Dry_P Parameter: Age (day) Value: 21
  misc_feature: MA Experiment 20001554 PARAMETER Experiment Name: At_Drought_Soil_Dry_P Parameter: Organism Value: A. thaliana
  misc_feature: MA Experiment 20001554 PARAMETER Experiment Name: At_Drought_Soil_Dry_P Parameter: Plant Line Value: WS
  misc_feature: MA Experiment 20001554 PARAMETER Experiment Name: At_Drought_Soil_Dry_P Parameter: Post Timepoint (hr) Value: None
  misc_feature: MA Experiment 20001554 PARAMETER Experiment Name: At_Drought_Soil_Dry_P Parameter: Post-Treatment Value: None
  misc_feature: MA Experiment 20001554 PARAMETER Experiment Name: At_Drought_Soil_Dry_P Parameter: Timepoint (day) Value: 7
  misc_feature: MA Experiment 20001554 PARAMETER Experiment Name: At_Drought_Soil_Dry_P Parameter: Treatment Value: Drought vs. No Drought
  misc_feature: MA Experiment ID: 20001555 Result: Down-regulated in Transcription
  misc_feature: MA Experiment 20001555 PARAMETER Experiment Name: At_Drought_Soil_Dry_P Parameter: Age (day) Value: 24
  misc_feature: MA Experiment 20001555 PARAMETER Experiment Name: At_Drought_Soil_Dry_P Parameter: Organism Value: A. thaliana
  misc_feature: MA Experiment 20001555 PARAMETER Experiment Name: At_Drought_Soil_Dry_P Parameter: Plant Line Value: WS
  misc_feature: MA Experiment 20001555 PARAMETER Experiment Name: At_Drought_Soil_Dry_P Parameter: Post Timepoint (hr) Value: None
  misc_feature: MA Experiment 20001555 PARAMETER Experiment Name: At_Drought_Soil_Dry_P Parameter: Post-Treatment Value: None
  misc_feature: MA Experiment 20001555 PARAMETER Experiment Name: At_Drought_Soil_Dry_P Parameter: Timepoint (day) Value: 10
  misc_feature: MA Experiment 20001555 PARAMETER Experiment Name: At_Drought_Soil_Dry_P Parameter: Treatment Value: Drought vs. No Drought
  misc_feature: MA Experiment ID: 20001556 Result: Down-regulated in Transcription
  misc_feature: MA Experiment 20001556 PARAMETER Experiment Name: At_Drought_Soil_Dry_P Parameter: Age (day) Value: 26
  misc_feature: MA Experiment 20001556 PARAMETER Experiment Name: At_Drought_Soil_Dry_P Parameter: Organism Value: A. thaliana
  misc_feature: MA Experiment 20001556 PARAMETER Experiment Name: At_Drought_Soil_Dry_P Parameter: Plant Line Value: WS
  misc_feature: MA Experiment 20001556 PARAMETER Experiment Name: At_Drought_Soil_Dry_P Parameter: Post Timepoint (hr) Value: None
  misc_feature: MA Experiment 20001556 PARAMETER Experiment Name: At_Drought_Soil_Dry_P Parameter: Post-Treatment Value: None
  misc_feature: MA Experiment 20001556 PARAMETER Experiment Name: At_Drought_Soil_Dry_P Parameter: Timepoint (day) Value: 12
  misc_feature: MA Experiment 20001556 PARAMETER Experiment Name: At_Drought_Soil_Dry_P Parameter: Treatment Value: Drought vs. No Drought
  misc_feature: MA Experiment ID: 20001557 Result: Down-regulated in Transcription
  misc_feature: MA Experiment 20001557 PARAMETER Experiment Name: At_Drought_Soil_Dry_P Parameter: Age (day) Value: 27
  misc_feature: MA Experiment 20001557 PARAMETER Experiment Name: At_Drought_Soil_Dry_P Parameter: Organism Value: A. thaliana
  misc_feature: MA Experiment 20001557 PARAMETER Experiment Name: At_Drought_Soil_Dry_P Parameter: Plant Line Value: WS
  misc_feature: MA Experiment 20001557 PARAMETER Experiment Name: At_Drought_Soil_Dry_P Parameter: Post Timepoint (hr) Value: 3
  misc_feature: MA Experiment 20001557 PARAMETER Experiment Name: At_Drought_Soil_Dry_P Parameter: Post-Treatment Value: Re-Water vs. No Drought
  misc_feature: MA Experiment 20001557 PARAMETER Experiment Name: At_Drought_Soil_Dry_P Parameter: Timepoint (day) Value: 13
  misc_feature: MA Experiment 20001557 PARAMETER Experiment Name: At_Drought_Soil_Dry_P Parameter: Treatment Value: Drought vs. No Drought
  misc_feature: MA Experiment ID: 20001559 Result: Down-regulated in Transcription
  misc_feature: MA Experiment 20001559 PARAMETER Experiment Name: At_Drought_Soil_Dry_P Parameter: Age (day) Value: 28
  misc_feature: MA Experiment 20001559 PARAMETER Experiment Name: At_Drought_Soil_Dry_P Parameter: Organism Value: A. thaliana
  misc_feature: MA Experiment 20001559 PARAMETER Experiment Name: At_Drought_Soil_Dry_P Parameter: Plant Line Value: WS
  misc_feature: MA Experiment 20001559 PARAMETER Experiment Name: At_Drought_Soil_Dry_P Parameter: Post Timepoint (hr) Value: 29
  misc_feature: MA Experiment 20001559 PARAMETER Experiment Name: At_Drought_Soil_Dry_P Parameter: Post-Treatment Value: Re-Water vs. No Drought
  misc_feature: MA Experiment 20001559 PARAMETER Experiment Name: At_Drought_Soil_Dry_P Parameter: Timepoint (day) Value: 14
  misc_feature: MA Experiment 20001559 PARAMETER Experiment Name: At_Drought_Soil_Dry_P Parameter: Treatment Value: Drought vs. No Drought
  misc_feature: MA Experiment ID: 20001757 Result: Up-regulated in Transcription
  misc_feature: MA Experiment 20001757 PARAMETER Experiment Name: At_50mM_NH4NO3_L-to-H_P Parameter: Timepoint (hr) Value: 6
  misc_feature: MA Experiment 20001757 PARAMETER Experiment Name: At_50mM_NH4NO3_L-to-H_P Parameter: Tissue Value: Leaf
  misc_feature: MA Experiment 20001757 PARAMETER Experiment Name: At_50mM_NH4NO3_L-to-H_P Parameter: Treatment Value: 50mM NH4NO3 vs 100mM Mannitol
  misc_feature: MA Experiment ID: 20001904 Result: Down-regulated in Transcription
  misc_feature: MA Experiment 20001904 PARAMETER Experiment Name: At_Drought_Reproduction_P Parameter: Age (day) Value: 37
  misc_feature: MA Experiment 20001904 PARAMETER Experiment Name: At_Drought_Reproduction_P Parameter: Organism Value: A. thaliana
  misc_feature: MA Experiment 20001904 PARAMETER Experiment Name: At_Drought_Reproduction_P Parameter: Plant Line Value: WS
  misc_feature: MA Experiment 20001904 PARAMETER Experiment Name: At_Drought_Reproduction_P Parameter: Timepoint (day) Value: 7
  misc_feature: MA Experiment 20001904 PARAMETER Experiment Name: At_Drought_Reproduction_P Parameter: Tissue Value: Rosettes
  misc_feature: MA Experiment 20001904 PARAMETER Experiment Name: At_Drought_Reproduction_P Parameter: Treatment Value: Drought vs. No Drought
  misc_feature: MA Experiment ID: 20001905 Result: Up-regulated in Transcription
  misc_feature: MA Experiment 20001905 PARAMETER Experiment Name: At_Drought_Reproduction_P Parameter: Age (day) Value: 40
  misc_feature: MA Experiment 20001905 PARAMETER Experiment Name: At_Drought_Reproduction_P Parameter: Organism Value: A. thaliana
  misc_feature: MA Experiment 20001905 PARAMETER Experiment Name: At_Drought_Reproduction_P Parameter: Plant Line Value: WS
  misc_feature: MA Experiment 20001905 PARAMETER Experiment Name: At_Drought_Reproduction_P Parameter: Timepoint (day) Value: 10
  misc_feature: MA Experiment 20001905 PARAMETER Experiment Name: At_Drought_Reproduction_P Parameter: Tissue Value: Rosettes
  misc_feature: MA Experiment 20001905 PARAMETER Experiment Name: At_Drought_Reproduction_P Parameter: Treatment Value: Drought vs. No Drought
aacgatacgtccctataaattagcaatgtcgctggttcgaacagtgacgatcgttctttttataatcgcgtttctgcaaaacctgcggctcagaaaagacagcaaagtattgttaagtctcgcggtgcttgcgacagatgatggacggtgttctgttatcgggatgcgtgttcttcgtgaaggaggaaacgcgattgatgcgtctgtggctgctgctctgtgtttgggcgttgtaagtcccgcgtctggactaggcggtggagcgtttacagtggttaagatagctggtgggaaagaaattgcttatgattctagagaaaccgctcctctaagagccactgagaatatgtatggaggtaatgttgacctaaagaagaaaggagccttatcagtaggcgttcccggggaagtcgcaggtctattcacggcttggaaacaacatgggaagctaccgtggaagcgttcagtgactcctgcagagaaacttgcagagggattcaagatttccaagtatctttatatgcagatgaacgcgactagaagcgatatcttagcagacaaaggtctctctgacctatttgtttcaaatggagagctcaagaggccagggacgatttgccataacccaaaattggctttaaccttgaagctaattggagagtacggtccaaaagcattttacaatggcacagttggggttaacctagcgagagatatcaaaaaatctggaggaataataactttgaaagatctgcaaagttatagagttaagattaaagaaccgttgtctgcagaacttcttggatatagagtccttggtatgcctcctccttcatctggtggcgctgcaatgatgcttgttttgaacatctttctcaatatgggatcatcagtgttcaggcctctcggtgttcatcgactaatcgaggctctgaaacatgcattcgcagttagaatgaacctcggggatccagatttcactgatgttaccaaggttgtttcggatatgttgtcgccaaagtttgcaaaagacttgaagagcaagataaacgaccaaaaaacttttgatccaaaatattacgggggcatgtggaatcagatcgacgaccacgggacaagtcatttatcgatcatagaccgcgagaggaacgctgtgtctatgactagtacaataaatggttactttggggcattgatgctatctccgagcacaggaatagttctgaacaacgaaatggacgatttctcaatccctatgaaatctaacggtaacttagatgttccaccaccagcaccagctaacttcatccgtcctggaaaacgacctttgtcctctatgtcacccaccattgtactcaaggacggtaaagtgaaagccgctgtgggtgcgagcggaggagccaacattattgccgggacaacggaagtttacttgaatcattttttcctcaagatggatcctctttcttccgtcttagctccaagaatctaccatcagctgataccaaacagagcttcgtacgagaactggacaacagtattcaatgatcatttcgagattcctaaagcaacaagagttgtgttggagaagaaaggtcatgtcctatctcctattgccggagggacgattgctcagttcatagttcaagaatccggtgagaactccggtggaagaagtgagcttgtggcagttagtgatcctcgaaaaggagggttcccttcaggatattgagaattttagatcgagatttattttatgtttttattgtttctttgattattgaaccgaactttgtgatcaatataattttatttcact

SEQ ID NO: 76652 - protein, 576 aa, Arabidopsis thaliana
  peptide (1)..(576): Ceres Seq. ID no. 7108717
  misc_feature (55)..(571): Pfam Name: Gamma-glutamyltranspeptidase Pfam Description: Gamma-glutamyltranspeptidase
  misc_feature (9)..(576): Homolog of NCBI NO: 2129587 NR Description: gamma-glutamyltransferase (EC 2.3.2.2) -
  misc_feature (9)..(576): Homolog of NCBI NO: 22329258 NR Description: putative gamma-glutamyltransferase; protein id: supported by cDNA: gi_17978921 [Arabidopsis thaliana] AT4g39640/T19P19_30 [Arabidopsis thaliana]
  misc_feature (9)..(576): Homolog of NCBI NO: 7433816 NR Description: probable gamma-glutamyltransferase (EC 2.3.2.2)
  misc_feature (8)..(576): Homolog of NCBI NO: 28208262 NR Description: gamma-glutamyl transferase [Raphanus sativus]
  misc_feature (9)..(576): Homolog of NCBI NO: 15235951 NR Description: putative gamma-glutamyltransferase; protein id:
  misc_feature (14)..(576): Homolog of NCBI NO: 27348118 NR Description: gamma-glutamyl transferase [Raphanus sativus]
  misc_feature (3)..(576): Homolog of NCBI NO: 38567882 NR Description: OSJNBa0036B21.10 [Oryza sativa (japonica
  misc_feature (42)..(574): Homolog of NCBI NO: 15233493 NR Description: gamma-glutamyltransferase-like protein; protein
  misc_feature (35)..(550): Homolog of NCBI NO: 34895870 NR Description: putative gamma-glutamyltransferase [Oryza sativa
  misc_feature (35)..(417): Homolog of NCBI NO: 34895872 NR Description: putative gamma-glutamyltransferase [Oryza sativa
TIRPYKLAMSLVRTVTIVLFIIAFLQNLRLRKDSKVLLSLAVLATDDGRCSVIGMRVLREGGNAIDASVAAALCLGVVSPASGLGGGAFTVVKIAGGKEIAYDSRETAPLRATENMYGGNVDLKKKGALSVGVPGEVAGLFTAWKQHGKLPWKRSVTPAEKLAEGFKISKYLYMQMNATRSDILADKGLSDLFVSNGELKRPGTICHNPKLALTLKLIGEYGPKAFYNGTVGVNLARDIKKSGGIITLKDLQSYRVKIKEPLSAELLGYRVLGMPPPSSGGAAMMLVLNIFLNMGSSVFRPLGVHRLIEALKHAFAVRMNLGDPDFTDVTKVVSDMLSPKFAKDLKSKINDQKTFDPKYYGGMWNQIDDHGTSHLSIIDRERNAVSMTSTINGYFGALMLSPSTGIVLNNEMDDFSIPMKSNGNLDVPPPAPANFIRPGKRPLSSMSPTIVLKDGKVKAAVGASGGANIIAGTTEVYLNHFFLKMDPLSSVLAPRIYHQLIPNRASYENWTTVFNDHFEIPKATRVVLEKKGHVLSPIAGGTIAQFIVQESGENSGGRSELVAVSDPRKGGFPSGY

SEQ ID NO: 76653 - protein, 568 aa, Arabidopsis thaliana
  peptide (1)..(568): Ceres Seq. ID no. 7108718
  misc_feature (47)..(563): Pfam Name: Gamma-glutamyltranspeptidase Pfam Description: Gamma-glutamyltranspeptidase
  misc_feature (1)..(568): Homolog of NCBI NO: 2129587 NR Description: gamma-glutamyltransferase (EC 2.3.2.2) -
  misc_feature (1)..(568): Homolog of NCBI NO: 22329258 NR Description: putative gamma-glutamyltransferase; protein id: supported by cDNA: gi_17978921 [Arabidopsis thaliana] AT4g39640/T19P19_30 [Arabidopsis thaliana]
  misc_feature (1)..(568): Homolog of NCBI NO: 7433816 NR Description: probable gamma-glutamyltransferase (EC 2.3.2.2)
  misc_feature (1)..(568): Homolog of NCBI NO: 28208262 NR Description: gamma-glutamyl transferase [Raphanus sativus]
  misc_feature (1)..(568): Homolog of NCBI NO: 15235951 NR Description: putative gamma-glutamyltransferase; protein id:
  misc_feature (6)..(568): Homolog of NCBI NO: 27348118 NR Description: gamma-glutamyl transferase [Raphanus sativus]
  misc_feature (1)..(568): Homolog of NCBI NO: 38567882 NR Description: OSJNBa0036B21.10 [Oryza sativa (japonica
  misc_feature (34)..(566): Homolog of NCBI NO: 15233493 NR Description: gamma-glutamyltransferase-like protein; protein
  misc_feature (27)..(542): Homolog of NCBI NO: 34895870 NR Description: putative gamma-glutamyltransferase [Oryza sativa
  misc_feature (27)..(409): Homolog of NCBI NO: 34895872 NR Description: putative gamma-glutamyltransferase [Oryza sativa
MSLVRTVTIVLFIIAFLQNLRLRKDSKVLLSLAVLATDDGRCSVIGMRVLREGGNAIDASVAAALCLGVVSPASGLGGGAFTVVKIAGGKEIAYDSRETAPLRATENMYGGNVDLKKKGALSVGVPGEVAGLFTAWKQHGKLPWKRSVTPAEKLAEGFKISKYLYMQMNATRSDILADKGLSDLFVSNGELKRPGTICHNPKLALTLKLIGEYGPKAFYNGTVGVNLARDIKKSGGIITLKDLQSYRVKIKEPLSAELLGYRVLGMPPPSSGGAAMMLVLNIFLNMGSSVFRPLGVHRLIEALKHAFAVRMNLGDPDFTDVTKVVSDMLSPKFAKDLKSKINDQKTFDPKYYGGMWNQIDDHGTSHLSIIDRERNAVSMTSTINGYFGALMLSPSTGIVLNNEMDDFSIPMKSNGNLDVPPPAPANFIRPGKRPLSSMSPTIVLKDGKVKAAVGASGGANIIAGTTEVYLNHFFLKMDPLSSVLAPRIYHQLIPNRASYENWTTVFNDHFEIPKATRVVLEKKGHVLSPIAGGTIAQFIVQESGENSGGRSELVAVSDPRKGGFPSGY

SEQ ID NO: 76654 - protein, 522 aa, Arabidopsis thaliana
  peptide (1)..(522): Ceres Seq. ID no. 7108719
  misc_feature (1)..(517): Pfam Name: Gamma-glutamyltranspeptidase Pfam Description: Gamma-glutamyltranspeptidase
  misc_feature (1)..(522): Homolog of NCBI NO: 2129587 NR Description: gamma-glutamyltransferase (EC 2.3.2.2) -
  misc_feature (1)..(522): Homolog of NCBI NO: 22329258 NR Description: putative gamma-glutamyltransferase; protein id: supported by cDNA: gi_17978921 [Arabidopsis thaliana] AT4g39640/T19P19_30 [Arabidopsis thaliana]
  misc_feature (1)..(522): Homolog of NCBI NO: 7433816 NR Description: probable gamma-glutamyltransferase (EC 2.3.2.2)
  misc_feature (1)..(522): Homolog of NCBI NO: 28208262 NR Description: gamma-glutamyl transferase [Raphanus sativus]
  misc_feature (1)..(522): Homolog of NCBI NO: 15235951 NR Description: putative gamma-glutamyltransferase; protein id:
  misc_feature (1)..(522): Homolog of NCBI NO: 27348118 NR Description: gamma-glutamyl transferase [Raphanus sativus]
  misc_feature (1)..(522): Homolog of NCBI NO: 38567882 NR Description: OSJNBa0036B21.10 [Oryza sativa (japonica
  misc_feature (1)..(520): Homolog of NCBI NO: 15233493 NR Description: gamma-glutamyltransferase-like protein; protein
  misc_feature (1)..(496): Homolog of NCBI NO: 34895870 NR Description: putative gamma-glutamyltransferase [Oryza sativa
  misc_feature (1)..(363): Homolog of NCBI NO: 34895872 NR Description: putative gamma-glutamyltransferase [Oryza sativa
MRVLREGGNAIDASVAAALCLGVVSPASGLGGGAFTVVKIAGGKEIAYDSRETAPLRATENMYGGNVDLKKKGALSVGVPGEVAGLFTAWKQHGKLPWKRSVTPAEKLAEGFKISKYLYMQMNATRSDILADKGLSDLFVSNGELKRPGTICHNPKLALTLKLIGEYGPKAFYNGTVGVNLARDIKKSGGIITLKDLQSYRVKIKEPLSAELLGYRVLGMPPPSSGGAAMMLVLNIFLNMGSSVFRPLGVHRLIEALKHAFAVRMNLGDPDFTDVTKVVSDMLSPKFAKDLKSKINDQKTFDPKYYGGMWNQIDDHGTSHLSIIDRERNAVSMTSTINGYFGALMLSPSTGIVLNNEMDDFSIPMKSNGNLDVPPPAPANFIRPGKRPLSSMSPTIVLKDGKVKAAVGASGGANIIAGTTEVYLNHFFLKMDPLSSVLAPRIYHQLIPNRASYENWTTVFNDHFEIPKATRVVLEKKGHVLSPIAGGTIAQFIVQESGENSGGRSELVAVSDPRKGGFPSGY

SEQ ID NO: 76655 - DNA, 1081 bp, Arabidopsis thaliana
  misc_feature (1)..(1081): Ceres Seq. ID no. 7108736
  misc_feature: MA Experiment ID: 108462 Result: Down-regulated in Transcription
  misc_feature: MA Experiment 108462 PARAMETER Experiment Name: At_Germinating_Seeds_cDNA_P Parameter: Age (day) Value: 2 vs. 0
  misc_feature: MA Experiment 108462 PARAMETER Experiment Name: At_Germinating_Seeds_cDNA_P Parameter: Tissue Value: Germinating Seeds
  misc_feature: MA Experiment ID: 108463 Result: Down-regulated in Transcription
  misc_feature: MA Experiment 108463 PARAMETER Experiment Name: At_Germinating_Seeds_cDNA_P Parameter: Age (day) Value: 3 vs. 0
  misc_feature: MA Experiment 108463 PARAMETER Experiment Name: At_Germinating_Seeds_cDNA_P Parameter: Tissue Value: Germinating Seeds
  misc_feature: MA Experiment ID: 108464 Result: Down-regulated in Transcription
  misc_feature: MA Experiment 108464 PARAMETER Experiment Name: At_Germinating_Seeds_cDNA_P Parameter: Age (day) Value: 4 vs. 0
  misc_feature: MA Experiment 108464 PARAMETER Experiment Name: At_Germinating_Seeds_cDNA_P Parameter: Tissue Value: Germinating Seeds
  misc_feature: MA Experiment ID: 20000113 Result: Up-regulated in Transcription
  misc_feature: MA Experiment 20000113 PARAMETER Experiment Name: At_42deg_Heat_cDNA_P Parameter: Temperature (deg C) Value: 42 vs. 22
  misc_feature: MA Experiment 20000113 PARAMETER Experiment Name: At_42deg_Heat_cDNA_P Parameter: Timepoint (hr) Value: 8
  misc_feature: MA Experiment 20000113 PARAMETER Experiment Name: At_42deg_Heat_cDNA_P Parameter: Tissue Value: Aerial
  misc_feature: MA Experiment ID: 20000144 Result: Up-regulated in Transcription
  misc_feature: MA Experiment 20000144 PARAMETER Experiment Name: At_42deg_Heat_cDNA_P Parameter: Temperature (deg C) Value: 42 vs. 22
  misc_feature: MA Experiment 20000144 PARAMETER Experiment Name: At_42deg_Heat_cDNA_P Parameter: Timepoint (hr) Value: 1
  misc_feature: MA Experiment 20000144 PARAMETER Experiment Name: At_42deg_Heat_cDNA_P Parameter: Tissue Value: Aerial
  misc_feature: MA Experiment ID: 20000171 Result: Up-regulated in Transcription
  misc_feature: MA Experiment 20000171 PARAMETER Experiment Name: At_42deg_Heat_P Parameter: Age (day) Value: 14
  misc_feature: MA Experiment 20000171 PARAMETER Experiment Name: At_42deg_Heat_P Parameter: Organism Value: A. thaliana
  misc_feature: MA Experiment 20000171 PARAMETER Experiment Name: At_42deg_Heat_P Parameter: Plant Line Value: WS
  misc_feature: MA Experiment 20000171 PARAMETER Experiment Name: At_42deg_Heat_P Parameter: Temperature (deg C) Value: 42 vs. 22
  misc_feature: MA Experiment 20000171 PARAMETER Experiment Name: At_42deg_Heat_P Parameter: Timepoint (hr) Value: 1
  misc_feature: MA Experiment 20000171 PARAMETER Experiment Name: At_42deg_Heat_P Parameter: Tissue Value: Aerial
  misc_feature: MA Experiment ID: 20000173 Result: Up-regulated in Transcription
  misc_feature: MA Experiment 20000173 PARAMETER Experiment Name: At_42deg_Heat_P Parameter: Age (day) Value: 14
  misc_feature: MA Experiment 20000173 PARAMETER Experiment Name: At_42deg_Heat_P Parameter: Organism Value: A. thaliana
  misc_feature: MA Experiment 20000173 PARAMETER Experiment Name: At_42deg_Heat_P Parameter: Plant Line Value: WS
  misc_feature: MA Experiment 20000173 PARAMETER Experiment Name: At_42deg_Heat_P Parameter: Temperature (deg C) Value: 42 vs. 22
  misc_feature: MA Experiment 20000173 PARAMETER Experiment Name: At_42deg_Heat_P Parameter: Timepoint (hr) Value: 6
  misc_feature: MA Experiment 20000173 PARAMETER Experiment Name: At_42deg_Heat_P Parameter: Tissue Value: Aerial
  misc_feature: MA Experiment ID: 20000224 Result: Down-regulated in Transcription
  misc_feature: MA Experiment ID: 20000794 Result: Down-regulated in Transcription
  misc_feature: MA Experiment 20000794 PARAMETER Experiment Name: At_Petals_P Parameter: Age (day) Value: 23-25 days
  misc_feature: MA Experiment 20000794 PARAMETER Experiment Name: At_Petals_P Parameter: Plant Line Value: WS
  misc_feature: MA Experiment 20000794 PARAMETER Experiment Name: At_Petals_P Parameter: Tissue Value: Petals vs. Whole plant
  misc_feature: MA Experiment ID: 20001560 Result: Up-regulated in Transcription
  misc_feature: MA Experiment 20001560 PARAMETER Experiment Name: At_Drought_Soil_Dry_P Parameter: Age (day) Value: 28
  misc_feature: MA Experiment 20001560 PARAMETER Experiment Name: At_Drought_Soil_Dry_P Parameter: Organism Value: A. thaliana
  misc_feature: MA Experiment 20001560 PARAMETER Experiment Name: At_Drought_Soil_Dry_P Parameter: Plant Line Value: WS
  misc_feature: MA Experiment 20001560 PARAMETER Experiment Name: At_Drought_Soil_Dry_P Parameter: Post Timepoint (hr) Value: None
  misc_feature: MA Experiment 20001560 PARAMETER Experiment Name: At_Drought_Soil_Dry_P Parameter: Post-Treatment Value: None
  misc_feature: MA Experiment 20001560 PARAMETER Experiment Name: At_Drought_Soil_Dry_P Parameter: Timepoint (day) Value: 14
  misc_feature: MA Experiment 20001560 PARAMETER Experiment Name: At_Drought_Soil_Dry_P Parameter: Treatment Value: Drought vs. No Drought
agatatcaaaaccgaatattcttttattcctcacacacacataggaacacacctgaatggtgcatcacacgggataacaacaacacacattcaacacaaacatgacgaaattaaagacaataaaccaaaccaaacattcagagagacacaacacaaccacatcatcacacgtttctctctctctctttcctctccgtcgtctctctctctctagccaccaccaaaatccttaaaacctagacttttctcttccatcgatggcggctaataacagatccgatcatgggtcagacgaaaacacaagactttacaatccttaccaaaactacgaagtcccaatcaacaaatctcagtacctttacaagcttcctacctcccctgagtttctcttcacggaggaggctttaaggcaacgtagatcttggggtgagaatctcactttctacaccggaacagcttacctcggtggctccgttgccggagcttctgttggagtcatcactggagtcaaaagcttcgaatctggcgacactactaagctcaaaatcaacaggatcttgaactcttctggtcaaactggtcgaacttggggtaatcggattggtatcattggattggtttacgcagggatcgagagtggtattgtggctgccacggatagagatgatgtttggaccagtgtggtggctggtcttggaaccggagctgtttgtagagcggcgagaggagtgagatctgcagctgtagctggtgctcttggtggacttgcggctggagctgttgtagctgggaagcaaattgtgaagcggtatgtgcccatttgaagactgcaagagtctaattggcagactctttttcgggtcgttgttgaaatttttgataggggaaatggtgagaatttgataggtttggtatgtcttggaatcataaaaatgaaaactttatttggtttctagaggtacaacaagtctgtatgtcaagtcataatgcagtttcactttgaagaataacctgcaaacctttttcttatattcatactgattaaatgttttgccgattggtaatttaaaaacccgaattc

SEQ ID NO: 76656 - protein, 188 aa, Arabidopsis thaliana; identical to SEQ ID NO: 27627
  peptide (1)..(188): Ceres Seq. ID no. 7108737
  misc_feature (49)..(182): Pfam Name: Tim17/Tim22/Tim23 family Pfam Description: Tim17/Tim22/Tim23 family
  misc_feature (1)..(188): Homolog of NCBI NO: 15218593 NR Description: inner mitochondrial membrane protein; protein id: supported by cDNA: 6793., supported by cDNA: gi_14596208, by cDNA: gi_18377493, supported by cDNA: gi_603055 [Arabidopsis
  misc_feature (1)..(188): Homolog of NCBI NO: 18394498 NR Description: inner mitochondrial membrane protein, putative; id: At1g17530.1, supported by cDNA: gi_13641345, supported by gi_15010569, supported by cDNA: gi_20147386 [Arabidopsis
  misc_feature (1)..(188): Homolog of NCBI NO: 13641346 NR Description: translocase of inner mitochondrial membrane TIM23
  misc_feature (1)..(187): Homolog of NCBI NO: 34902184 NR Description: Putative mitochondrial inner membrane protein
  misc_feature (2)..(187): Homolog of NCBI NO: 37536126 NR Description: putaive mitochondrial inner membrane protein
  misc_feature (4)..(188): Homolog of NCBI NO: 15229350 NR Description: putative inner mitochondrial membrane protein; id: At3g04800.1 [Arabidopsis thaliana] putative inner mitochondrial membrane protein [Arabidopsis
  misc_feature (1)..(184): Homolog of NCBI NO: 19075496 NR Description: putative mitochondrial import inner membrane subunit [Schizosaccharomyces pombe] Probable mitochondrial import inner membrane translocase subunit
  misc_feature (88)..(187): Homolog of NCBI NO: 34394286 NR Description: hypothetical protein [Oryza sativa (japonica
  misc_feature (1)..(96): Homolog of NCBI NO: 38344267 NR Description: OSJNBa0005N02.5 [Oryza sativa (japonica
  misc_feature (124)..(187): Homolog of NCBI NO: 12039278 NR Description: putative inner mitochondrial membrane protein

SEQ ID NO: 76657 - DNA, 1617 bp, Arabidopsis thaliana
  misc_feature (1)..(1617): Ceres Seq. ID no. 7108738
  misc_feature: MA Experiment ID: 20000179 Result: Up-regulated in Transcription
  misc_feature: MA Experiment 20000179 PARAMETER Experiment Name: At_Germinating_Seeds_P Parameter: Age (hr) Value: 6 vs. 0
  misc_feature: MA Experiment 20000179 PARAMETER Experiment Name: At_Germinating_Seeds_P Parameter: Tissue Value: Germinating Seeds
  misc_feature: MA Experiment ID: 20001451 Result: Down-regulated in Transcription
  misc_feature: MA Experiment 20001451 PARAMETER Experiment Name: At_Far-red-induction_P Parameter: Age (day) Value: 7
  misc_feature: MA Experiment 20001451 PARAMETER Experiment Name: At_Far-red-induction_P Parameter: Light Value: Far-red vs. White
  misc_feature: MA Experiment 20001451 PARAMETER Experiment Name: At_Far-red-induction_P Parameter: Organism Value: A. thaliana
  misc_feature: MA Experiment 20001451 PARAMETER Experiment Name: At_Far-red-induction_P Parameter: Plant Line Value: Columbia
  misc_feature: MA Experiment 20001451 PARAMETER Experiment Name: At_Far-red-induction_P Parameter: Timepoint (hr) Value: 24
  misc_feature: MA Experiment 20001451 PARAMETER Experiment Name: At_Far-red-induction_P Parameter: Tissue Value: Whole Plant
gtcgacccacgcgtccgcaccatttctctatctttctctctcgctgcttctcgaatcttctgtatcatcttcttcttcttcaagtgaaaaatggccgatggtgaggatattcagccacttgtctgtgacaatggaactggaatggtgaaggctggttttgctggtgatgatgccccgagagcagtgttcccaagtattgttggtcgtcctaggcacactggtgtcatggttggtatgggtcagaaagatgcttacgttggtgatgaagctcagtccaagagaggtatcctcactctgaagtatccaatcgaacatggtattgtaagtaactgggatgacatggaaaagatatggcatcacactttctacaacgagcttcgtgttgcccctgaggagcacccagttctactcacagaggcacctcttaaccctaaagctaacagggagaagatgactcagatcatgtttgagacattcaatgtccctgccatgtatgttgccattcaggccgttctttctctctatgccagtggtcgtacaaccggtattgtgctcgattctggtgatggtgtgtctcacactgtgccaatctacgaggggtatgctcttcctcatgctatccttcgtcttgatcttgcgggtcgggatctcacagactcactcatgaagattctcactgagagaggttacatgttcaccactaccgcagaacgggaaattgtccgtgacataaaggagaaacttgcttatgtcgctcttgactacgagcaagagctagagacagccaagagcagttcttcagtggagaagaactacgagcttcctgatggacaagtcataaccatcggagctgagagattccgttgtcctgaggttctgttccagccatcgctcatcggaatggaagctcctggaatccatgaaacaacttacaactccatcatgaaatgtgatgtcgatatcaggaaggatctctatggaaacatcgttctcagtggtggttccaccatgttcccaggaattgctgaccgtatgagcaaagagatcaccgctcttgcacctagcagcatgaagatcaaggtggttgcaccgccagagagaaaatacagtgtctggatcggaggatcaatccttgcatccctcagcaccttccaacagatgtggatttcaaagagtgagtacgatgagtcaggtccatcgattgttcacaggaaatgtttctaagtgtgtcttgtcttatctggttcgtggtggtgagtttgttacaaaaaaatctattttttctagttgagatgggaattgaactatctgttgttatgtggattttattttcttttttctctttagaaccttatggttgtgtcaagaagtcttgtgtactttagttttatatctctgttttatctcttctattttctttaggatgcttgtgatgatgctgtttttttttgtccctaagcaaaaaatatcatattatatttggtccttggttcatttttttggtttttttttgtcttcacatataaatattgtttgaatgtcttcaatcttttatttgtatgagacaattatttaagtatcgggtgacaatgcagctattatgtattgtcgattgtt

SEQ ID NO: 76658 - protein, 377 aa, Arabidopsis thaliana; identical to SEQ ID NO: 41654
  peptide (1)..(377): Ceres Seq. ID no. 7108739
  misc_feature (1)..(377): Pfam Name: Actin Pfam Description: Actin
  misc_feature (1)..(377): Homolog of NCBI NO: 15242516 NR Description: ACTIN 2/7 (sp|P53492); protein id: At5g09810.1, by cDNA: gi_1049306, supported by cDNA: gi_17065251, supported by gi_17381047, supported by cDNA: gi_20465864 [Arabidopsis
  misc_feature (1)..(377): Homolog of NCBI NO: 11276972 NR Description: actin [imported] - rape
  misc_feature (1)..(377): Homolog of NCBI NO: 11276970 NR Description: actin [imported] - Malva pusilla
  misc_feature (1)..(377): Homolog of NCBI NO: 32186906 NR Description: actin [Gossypium hirsutum]
  misc_feature (1)..(377): Homolog of NCBI NO: 32186890 NR Description: actin [Gossypium hirsutum]
  misc_feature (1)..(377): Homolog of NCBI NO: 23955912 NR Description: actin [Stevia rebaudiana]
  misc_feature (1)..(377): Homolog of NCBI NO: 32186894 NR Description: actin [Gossypium hirsutum]
  misc_feature (1)..(377): Homolog of NCBI NO: 32186892 NR Description: actin [Gossypium hirsutum]
  misc_feature (1)..(377): Homolog of NCBI NO: 9965319 NR Description: actin [Setaria italica]
  misc_feature (1)..(377): Homolog of NCBI NO: 11276971 NR Description: actin isoform B [imported] - Mimosa pudica

SEQ ID NO: 76659 - protein, 360 aa, Arabidopsis thaliana; identical to SEQ ID NO: 41655
  peptide (1)..(360): Ceres Seq. ID no. 7108740
  misc_feature (1)..(360): Pfam Name: Actin Pfam Description: Actin
  misc_feature (1)..(360): Homolog of NCBI NO: 15242516 NR Description: ACTIN 2/7 (sp|P53492); protein id: At5g09810.1, by cDNA: gi_1049306, supported by cDNA: gi_17065251, supported by gi_17381047, supported by cDNA: gi_20465864 [Arabidopsis
  misc_feature (1)..(360): Homolog of NCBI NO: 11276972 NR Description: actin [imported] - rape
  misc_feature (1)..(360): Homolog of NCBI NO: 11276970 NR Description: actin [imported] - Malva pusilla
  misc_feature (1)..(360): Homolog of NCBI NO: 32186906 NR Description: actin [Gossypium hirsutum]
  misc_feature (1)..(360): Homolog of NCBI NO: 32186890 NR Description: actin [Gossypium hirsutum]
  misc_feature (1)..(360): Homolog of NCBI NO: 23955912 NR Description: actin [Stevia rebaudiana]
  misc_feature (1)..(360): Homolog of NCBI NO: 32186894 NR Description: actin [Gossypium hirsutum]
  misc_feature (1)..(360): Homolog of NCBI NO: 32186892 NR Description: actin [Gossypium hirsutum]
  misc_feature (1)..(360): Homolog of NCBI NO: 9965319 NR Description: actin [Setaria italica]
  misc_feature (1)..(360): Homolog of NCBI NO: 11276971 NR Description: actin isoform B [imported] - Mimosa pudica

SEQ ID NO: 76660 - protein, 332 aa, Arabidopsis thaliana; identical to SEQ ID NO: 41656
  peptide (1)..(332): Ceres Seq. ID no. 7108741
  misc_feature (1)..(332): Pfam Name: Actin Pfam Description: Actin
  misc_feature (1)..(332): Homolog of NCBI NO: 15242516 NR Description: ACTIN 2/7 (sp|P53492); protein id: At5g09810.1, by cDNA: gi_1049306, supported by cDNA: gi_17065251, supported by gi_17381047, supported by cDNA: gi_20465864 [Arabidopsis
  misc_feature (1)..(332): Homolog of NCBI NO: 11276972 NR Description: actin [imported] - rape
  misc_feature (1)..(332): Homolog of NCBI NO: 11276970 NR Description: actin [imported] - Malva pusilla
  misc_feature (1)..(332): Homolog of NCBI NO: 32186906 NR Description: actin [Gossypium hirsutum]
  misc_feature (1)..(332): Homolog of NCBI NO: 32186890 NR Description: actin [Gossypium hirsutum]
  misc_feature (1)..(332): Homolog of NCBI NO: 23955912 NR Description: actin [Stevia rebaudiana]
  misc_feature (1)..(332): Homolog of NCBI NO: 32186894 NR Description: actin [Gossypium hirsutum]
  misc_feature (1)..(332): Homolog of NCBI NO: 32186892 NR Description: actin [Gossypium hirsutum]
  misc_feature (1)..(332): Homolog of NCBI NO: 9965319 NR Description: actin [Setaria italica]
  misc_feature (1)..(332): Homolog of NCBI NO: 11276971 NR Description: actin isoform B [imported] - Mimosa pudica

SEQ ID NO: 76661 - DNA, 1196 bp, Arabidopsis thaliana
  misc_feature (1)..(1196): Ceres Seq. ID no. 7108744
  misc_feature: MA Experiment ID: 20000327 Result: Down-regulated in Transcription
  misc_feature: MA Experiment 20000327 PARAMETER Experiment Name: At_42deg_Heat_Sub_P Parameter: Age (day) Value: 14
  misc_feature: MA Experiment 20000327 PARAMETER Experiment Name: At_42deg_Heat_Sub_P Parameter: Organism Value: A. thaliana
  misc_feature: MA Experiment 20000327 PARAMETER Experiment Name: At_42deg_Heat_Sub_P Parameter: Plant Line Value: WS
  misc_feature: MA Experiment 20000327 PARAMETER Experiment Name: At_42deg_Heat_Sub_P Parameter: Temperature (deg C) Value: 42 vs. 22
  misc_feature: MA Experiment 20000327 PARAMETER Experiment Name: At_42deg_Heat_Sub_P Parameter: Timepoint (hr) Value: 1
  misc_feature: MA Experiment 20000327 PARAMETER Experiment Name: At_42deg_Heat_Sub_P Parameter: Tissue Value: Aerial
  misc_feature: MA Experiment ID: 20000346 Result: Up-regulated in Transcription
  misc_feature: MA Experiment 20000346 PARAMETER Experiment Name: At_2mM_SA_Sub_P Parameter: Age (day) Value: 14
  misc_feature: MA Experiment 20000346 PARAMETER Experiment Name: At_2mM_SA_Sub_P Parameter: Organism Value: A. thaliana
  misc_feature: MA Experiment 20000346 PARAMETER Experiment Name: At_2mM_SA_Sub_P Parameter: Plant Line Value: WS
  misc_feature: MA Experiment 20000346 PARAMETER Experiment Name: At_2mM_SA_Sub_P Parameter: Timepoint (hr) Value: 1
  misc_feature: MA Experiment 20000346 PARAMETER Experiment Name: At_2mM_SA_Sub_P Parameter: Tissue Value: Aerial
  misc_feature: MA Experiment 20000346 PARAMETER Experiment Name: At_2mM_SA_Sub_P Parameter: Treatment Value: 2mM SA vs. No Treatment
  misc_feature: MA Experiment ID: 20000355 Result: Down-regulated in Transcription
  misc_feature: MA Experiment 20000355 PARAMETER Experiment Name: At_Siliques_Sub_P Parameter: Age (day) Value: 21
  misc_feature: MA Experiment 20000355 PARAMETER Experiment Name: At_Siliques_Sub_P Parameter: Organism Value: A. thaliana
  misc_feature: MA Experiment 20000355 PARAMETER Experiment Name: At_Siliques_Sub_P Parameter: Plant Line Value: WS
  misc_feature: MA Experiment 20000355 PARAMETER Experiment Name: At_Siliques_Sub_P Parameter: Tissue Value: Less Than 5mm Siliques vs. Whole Plant
  misc_feature: MA Experiment ID: 20000440 Result: Down-regulated in Transcription
  misc_feature: MA Experiment 20000440 PARAMETER Experiment Name: At_Closed-Flower__Sub_P Parameter: Tissue Value: Closed Flower vs. Whole Plant
  misc_feature: Pfam Name: SATase_N Pfam Description: Serine acetyltransferase, N-terminal
tcgacccacgcgtccgtccaaattcaaacaccatactttatctcctcctccttctcctcctcctcctcctcctatggctgcgtgcatcgacacctgccgcactggtaaaccccagatttctcctcgcgattcttctaaacaccacgacgatgaatctggctttcgttacatgaactacttccgttatcctgatcgatcttccttcaatggaacccagaccaaaaccctccatactcgtcctttgcttgaagatctcgatcgcgacgctgaagtcgatgatgtttgggccaaaatccgagaagaggctaaatctgatatcgccaaagaacctattgtttccgcttattatcacgcttcgattgtttctcagcgttcgttggaagctgcgttggcgaatactttatctgttaaactcagcaatttgaatcttccaagcaacacgcttttcgatttgttctctggtgttcttcaaggaaacccagatattgttgaatctgtcaagctagatcttttagctgttaaggagagagatcctgcttgtataagctacgttcattgtttccttcactttaaaggcttcctcgcttgtcaagcgcatcgtattgctcatgagctttggactcaggacagaaaaatcctagctttgttgatccagaacagagtctctgaagctttcgctgttgatttccaccctggagctaaaatcggtaccgggattttgctagaccatgctacggctattgtgatcggtgagacggcggttgtggggaacaatgtttcgattctccataacgttacgcttggaggaacggggaaacagtgtggagataggcacccgaagattggcgatggggttttgattggagctgggacttgtattttggggaatatcacgattggtgaaggagctaagattggtgcggggtcggtggtgttgaaagacgtgccgccgcgtacgacggctgttggaaatccggcgaggttgcttggtggtaaagataatccgaaaacgcatgacaagattcctggtttgactatggaccagacgtcgcatatatccgagtggtcggattatgtaatttgaaaaagtctttgtttttggttgttgttgttgtttatggcttttcattgttctctcggcttcttctgttattgaagctggtgaagtatatgatatgcgatgatgctgtttccat

SEQ ID NO: 76662 - protein, 360 aa, Arabidopsis thaliana
  peptide (1)..(360): Ceres Seq. ID no. 7108745
  misc_feature: Pfam Name: SATase_N Pfam Description: Serine acetyltransferase, N-terminal
  misc_feature (6)..(360): Homolog of NCBI NO: 15231152 NR Description: serine acetyltransferase (Sat-1); protein id: supported by cDNA: gi_1184047 [Arabidopsis thaliana]
  misc_feature (25)..(360): Homolog of NCBI NO: 1107505 NR Description: serine O-acetyltransferase [Arabidopsis thaliana]
  misc_feature (25)..(360): Homolog of NCBI NO: 1369758 NR Description: serine acetyltransferase
  misc_feature (49)..(360): Homolog of NCBI NO: 897678 NR Description: serine O-acetyltransferase [Arabidopsis thaliana]
  misc_feature (57)..(360): Homolog of NCBI NO: 2129731 NR Description: serine O-acetyltransferase (EC 2.3.1.30) satA -
  misc_feature (49)..(360): Homolog of NCBI NO: 15222799 NR Description: serine acetyltransferase; protein id:
  misc_feature (49)..(360): Homolog of NCBI NO: 2146775 NR Description: serine O-acetyltransferase (EC 2.3.1.30) SAT1
  misc_feature (23)..(360): Homolog of NCBI NO: 38350581 NR Description: serine acetyltransferase [Nicotiana
  misc_feature (27)..(360): Homolog of NCBI NO: 23343581 NR Description: serine acetyltransferase 1 [Nicotiana tabacum]
  misc_feature (37)..(360): Homolog of NCBI NO: 23343583 NR Description: serine acetyltransferase 4 [Nicotiana tabacum]
RPTRPSKFKHHTLSPPPSPPPPPPMAACIDTCRTGKPQISPRDSSKHHDDESGFRYMNYFRYPDRSSFNGTQTKTLHTRPLLEDLDRDAEVDDVWAKIREEAKSDIAKEPIVSAYYHASIVSQRSLEAALANTLSVKLSNLNLPSNTLFDLFSGVLQGNPDIVESVKLDLLAVKERDPACISYVHCFLHFKGFLACQAHRIAHELWTQDRKILALLIQNRVSEAFAVDFHPGAKIGTGILLDHATAIVIGETAVVGNNVSILHNVTLGGTGKQCGDRHPKIGDGVLIGAGTCILGNITIGEGAKIGAGSVVLKDVPPRTTAVGNPARLLGGKDNPKTHDKIPGLTMDQTSHISEWSDYVI

SEQ ID NO: 76663 - protein, 336 aa, Arabidopsis thaliana
  peptide (1)..(336): Ceres Seq. ID no. 7108746
  misc_feature: Pfam Name: SATase_N Pfam Description: Serine acetyltransferase, N-terminal
  misc_feature (1)..(336): Homolog of NCBI NO: 15231152 NR Description: serine acetyltransferase (Sat-1); protein id: supported by cDNA: gi_1184047 [Arabidopsis thaliana]
  misc_feature (1)..(336): Homolog of NCBI NO: 1107505 NR Description: serine O-acetyltransferase [Arabidopsis thaliana]
  misc_feature (1)..(336): Homolog of NCBI NO: 1369758 NR Description: serine acetyltransferase
  misc_feature (25)..(336): Homolog of NCBI NO: 897678 NR Description: serine O-acetyltransferase [Arabidopsis thaliana]
  misc_feature (33)..(336): Homolog of NCBI NO: 2129731 NR Description: serine O-acetyltransferase (EC 2.3.1.30) satA -
  misc_feature (25)..(336): Homolog of NCBI NO: 15222799 NR Description: serine acetyltransferase; protein id:
  misc_feature (25)..(336): Homolog of NCBI NO: 2146775 NR Description: serine O-acetyltransferase (EC 2.3.1.30) SAT1
  misc_feature (1)..(336): Homolog of NCBI NO: 38350581 NR Description: serine acetyltransferase [Nicotiana
  misc_feature (3)..(336): Homolog of NCBI NO: 23343581 NR Description: serine acetyltransferase 1 [Nicotiana tabacum]
  misc_feature (13)..(336): Homolog of NCBI NO: 23343583 NR Description: serine acetyltransferase 4 [Nicotiana tabacum]
MAACIDTCRTGKPQISPRDSSKHHDDESGFRYMNYFRYPDRSSFNGTQTKTLHTRPLLEDLDRDAEVDDVWAKIREEAKSDIAKEPIVSAYYHASIVSQRSLEAALANTLSVKLSNLNLPSNTLFDLFSGVLQGNPDIVESVKLDLLAVKERDPACISYVHCFLHFKGFLACQAHRIAHELWTQDRKILALLIQNRVSEAFAVDFHPGAKIGTGILLDHATAIVIGETAVVGNNVSILHNVTLGGTGKQCGDRHPKIGDGVLIGAGTCILGNITIGEGAKIGAGSVVLKDVPPRTTAVGNPARLLGGKDNPKTHDKIPGLTMDQTSHISEWSDYVI

SEQ ID NO: 76664 - protein, 304 aa, Arabidopsis thaliana
  peptide (1)..(304): Ceres Seq. ID no. 7108747
  misc_feature: Pfam Name: SATase_N Pfam Description: Serine acetyltransferase, N-terminal
  misc_feature (1)..(304): Homolog of NCBI NO: 15231152 NR Description: serine acetyltransferase (Sat-1); protein id: supported by cDNA: gi_1184047 [Arabidopsis thaliana]
  misc_feature (1)..(304): Homolog of NCBI NO: 1107505 NR Description: serine O-acetyltransferase [Arabidopsis thaliana]
  misc_feature (1)..(304): Homolog of NCBI NO: 1369758 NR Description: serine acetyltransferase
  misc_feature (1)..(304): Homolog of NCBI NO: 897678 NR Description: serine O-acetyltransferase [Arabidopsis thaliana]
  misc_feature (1)..(304): Homolog of NCBI NO: 2129731 NR Description: serine O-acetyltransferase (EC 2.3.1.30) satA -
  misc_feature (1)..(304): Homolog of NCBI NO: 15222799 NR Description: serine acetyltransferase; protein id:
  misc_feature (1)..(304): Homolog of NCBI NO: 2146775 NR Description: serine O-acetyltransferase (EC 2.3.1.30) SAT1
  misc_feature (1)..(304): Homolog of NCBI NO: 38350581 NR Description: serine acetyltransferase [Nicotiana
  misc_feature (1)..(304): Homolog of NCBI NO: 23343581 NR Description: serine acetyltransferase 1 [Nicotiana tabacum]
  misc_feature (1)..(304): Homolog of NCBI NO: 23343583 NR Description: serine acetyltransferase 4 [Nicotiana tabacum]
MNYFRYPDRSSFNGTQTKTLHTRPLLEDLDRDAEVDDVWAKIREEAKSDIAKEPIVSAYYHASIVSQRSLEAALANTLSVKLSNLNLPSNTLFDLFSGVLQGNPDIVESVKLDLLAVKERDPACISYVHCFLHFKGFLACQAHRIAHELWTQDRKILALLIQNRVSEAFAVDFHPGAKIGTGILLDHATAIVIGETAVVGNNVSILHNVTLGGTGKQCGDRHPKIGDGVLIGAGTCILGNITIGEGAKIGAGSVVLKDVPPRTTAVGNPARLLGGKDNPKTHDKIPGLTMDQTSHISEWSDYVI

SEQ ID NO: 76665 - DNA, 1211 bp, Arabidopsis thaliana
  misc_feature (1)..(1211): Ceres Seq. ID no. 7108782
  misc_feature: MA Experiment ID: 20000314 Result: Down-regulated in Transcription
  misc_feature: MA Experiment 20000314 PARAMETER Experiment Name: At_14day_Shoots-Roots_Sub_P Parameter: Age (day) Value: 14
  misc_feature: MA Experiment 20000314 PARAMETER Experiment Name: At_14day_Shoots-Roots_Sub_P Parameter: Organism Value: A. thaliana
  misc_feature: MA Experiment 20000314 PARAMETER Experiment Name: At_14day_Shoots-Roots_Sub_P Parameter: Plant Line Value: WS
  misc_feature: MA Experiment 20000314 PARAMETER Experiment Name: At_14day_Shoots-Roots_Sub_P Parameter: Tissue Value: Roots vs. Whole Plant
  misc_feature: MA Experiment ID: 20000346 Result: Up-regulated in Transcription
  misc_feature: MA Experiment 20000346 PARAMETER Experiment Name: At_2mM_SA_Sub_P Parameter: Age (day) Value: 14
  misc_feature: MA Experiment 20000346 PARAMETER Experiment Name: At_2mM_SA_Sub_P Parameter: Organism Value: A. thaliana
  misc_feature: MA Experiment 20000346 PARAMETER Experiment Name: At_2mM_SA_Sub_P Parameter: Plant Line Value: WS
  misc_feature: MA Experiment 20000346 PARAMETER Experiment Name: At_2mM_SA_Sub_P Parameter: Timepoint (hr) Value: 1
  misc_feature: MA Experiment 20000346 PARAMETER Experiment Name: At_2mM_SA_Sub_P Parameter: Tissue Value: Aerial
  misc_feature: MA Experiment 20000346 PARAMETER Experiment Name: At_2mM_SA_Sub_P Parameter: Treatment Value: 2mM SA vs. No Treatment
  misc_feature: MA Experiment ID: 20000355 Result: Down-regulated in Transcription
  misc_feature: MA Experiment 20000355 PARAMETER Experiment Name: At_Siliques_Sub_P Parameter: Age (day) Value: 21
  misc_feature: MA Experiment 20000355 PARAMETER Experiment Name: At_Siliques_Sub_P Parameter: Organism Value: A. thaliana
  misc_feature: MA Experiment 20000355 PARAMETER Experiment Name: At_Siliques_Sub_P Parameter: Plant Line Value: WS
  misc_feature: MA Experiment 20000355 PARAMETER Experiment Name: At_Siliques_Sub_P Parameter: Tissue Value: Less Than 5mm Siliques vs. Whole Plant
acaacaaatataaaaccagcggccgccagtgtgagtaatttaggcagtaacaaatttggtgaagtcacgagaatcaacgatgacggcgacgaacaagcaagtcatattgaaagactacgtgagtggtttccctacggaatccgatttcgatttcactaccaccaccgtcgaacttagggttccggaaggtactaactctgttctagtgaagaatctctacttgtcatgcgatccttacatgagaattcgcatggggaaacctgatccttccactgctgctcttgctcaagcttacactcccggccagccaatccaagggtatggagtgtctagaataatagaatctggacatccagattacaagaaaggagacttactctggggtatagttgcatgggaggagtacagtgttatcactccaatgactcacgcgcatttcaagatccaacatactgatgttccattatcttattacactggacttttaggtatgcctggtatgactgcctatgctgggttttatgaagtttgttctccaaaggaaggagagacagtttatgtgtcagctgcatctggtgctgttggtcagcttgtgggacaacttgctaagatgatgggctgttatgttgttggaagcgctggaagtaaagagaaggttgatcttctgaagaccaagtttgggtttgatgatgcatttaactacaaggaagaatctgaccttactgctgccctaaaaaggtgtttccctaatggcattgacatatactttgagaatgtaggaggcaaaatgctagatgcagtgcttgtgaacatgaacatgcacgggcgtatcgctgtctgtggaatgatctcacagtacaatcttgagaaccaggaaggtgtacacaacctatccaacataatctacaaaagaatccgcattcaaggctttgtagtgtctgatttctacgacaaatactcaaagttcttggagtttgtgcttccccacattagagaagggaagataacgtacgtggaagatgtagctgatgggcttgagaaagctcccgaagctcttgtgggactcttccatggtaagaatgttgggaaacaagttgttgttgttgctcgtgagtgaaactatgtttgatacttgtactttatccaattagagtttgtgtgggtggtttttgttttatggataaagataatgtttgttatggtttcgaatc

SEQ ID NO: 76666 - protein, 345 aa, Arabidopsis thaliana
  peptide (1)..(345): Ceres Seq. ID no. 7108783
  misc_feature (134)..(342): Pfam Name: Zinc-binding dehydrogenase Pfam Description: Zinc-binding dehydrogenase
  misc_feature (1)..(345): Homolog of NCBI NO: 15237888 NR Description: quinone oxidoreductase -like protein; protein id:
  misc_feature (1)..(345): Homolog of NCBI NO: 21539447 NR Description: quinone oxidoreductase-like protein [Arabidopsis
  misc_feature (1)..(345): Homolog of NCBI NO: 22326861 NR Description: quinone oxidoreductase - like protein; protein At5g17000.1, supported by cDNA: gi_16604343, supported by cDNA: [Arabidopsis thaliana] >gi|16604344|gb|AAL24178.1|
  misc_feature (1)..(345): Homolog of NCBI NO: 17529140 NR Description: putative quinone oxidoreductase [Arabidopsis
  misc_feature (1)..(345): Homolog of NCBI NO: 15237890 NR Description: quinone oxidoreductase - like protein; protein At5g16990.1, supported by cDNA: gi_17529037, supported by cDNA:
  misc_feature (1)..(345): Homolog of NCBI NO: 21554121 NR Description: quinone oxidoreductase-like protein [Arabidopsis
  misc_feature (1)..(345): Homolog of NCBI NO: 1362014 NR Description: probable NADPH2:quinone reductase (EC 1.6.5.5) P2
  misc_feature (1)..(345): Homolog of NCBI NO: 11358742 NR Description: quinone oxidoreductase-like protein - Arabidopsis
  misc_feature (2)..(345): Homolog of NCBI NO: 15228456 NR Description: putative NADP-dependent oxidoreductase; protein At3g03080.1 [Arabidopsis thaliana]
  misc_feature (2)..(340): Homolog of NCBI NO: 11357163 NR Description: allyl alcohol dehydrogenase-like protein -
MTATNKQVILKDYVSGFPTESDFDFTTTTVELRVPEGTNSVLVKNLYLSCDPYMRIRMGKPDPSTAALAQAYTPGQPIQGYGVSRIIESGHPDYKKGDLLWGIVAWEEYSVITPMTHAHFKIQHTDVPLSYYTGLLGMPGMTAYAGFYEVCSPKEGETVYVSAASGAVGQLVGQLAKMMGCYVVGSAGSKEKVDLLKTKFGFDDAFNYKEESDLTAALKRCFPNGIDIYFENVGGKMLDAVLVNMNMHGRIAVCGMISQYNLENQEGVHNLSNIIYKRIRIQGFVVSDFYDKYSKFLEFVLPHIREGKITYVEDVADGLEKAPEALVGLFHGKNVGKQVVVVARE

SEQ ID NO: 76667 - protein, 292 aa, Arabidopsis thaliana
  peptide (1)..(292): Ceres Seq. ID no. 7108784
  misc_feature (81)..(289): Pfam Name: Zinc-binding dehydrogenase Pfam Description: Zinc-binding dehydrogenase
  misc_feature (1)..(292): Homolog of NCBI NO: 15237888 NR Description: quinone oxidoreductase -like protein; protein id:
  misc_feature (1)..(292): Homolog of NCBI NO: 21539447 NR Description: quinone oxidoreductase-like protein [Arabidopsis
  misc_feature (1)..(292): Homolog of NCBI NO: 22326861 NR Description: quinone oxidoreductase - like protein; protein At5g17000.1, supported by cDNA: gi_16604343, supported by cDNA: [Arabidopsis thaliana] >gi|16604344|gb|AAL24178.1|
  misc_feature (1)..(292): Homolog of NCBI NO: 17529140 NR Description: putative quinone oxidoreductase [Arabidopsis
  misc_feature (1)..(292): Homolog of NCBI NO: 15237890 NR Description: quinone oxidoreductase - like protein; protein At5g16990.1, supported by cDNA: gi_17529037, supported by cDNA:
  misc_feature (1)..(292): Homolog of NCBI NO: 21554121 NR Description: quinone oxidoreductase-like protein [Arabidopsis
  misc_feature (1)..(292): Homolog of NCBI NO: 1362014 NR Description: probable NADPH2:quinone reductase (EC 1.6.5.5) P2
  misc_feature (1)..(292): Homolog of NCBI NO: 11358742 NR Description: quinone oxidoreductase-like protein - Arabidopsis
  misc_feature (1)..(292): Homolog of NCBI NO: 15228456 NR Description: putative NADP-dependent oxidoreductase; protein At3g03080.1 [Arabidopsis thaliana]
  misc_feature (1)..(287): Homolog of NCBI NO: 11357163 NR Description: allyl alcohol dehydrogenase-like protein -
MRIRMGKPDPSTAALAQAYTPGQPIQGYGVSRIIESGHPDYKKGDLLWGIVAWEEYSVITPMTHAHFKIQHTDVPLSYYTGLLGMPGMTAYAGFYEVCSPKEGETVYVSAASGAVGQLVGQLAKMMGCYVVGSAGSKEKVDLLKTKFGFDDAFNYKEESDLTAALKRCFPNGIDIYFENVGGKMLDAVLVNMNMHGRIAVCGMISQYNLENQEGVHNLSNIIYKRIRIQGFVVSDFYDKYSKFLEFVLPHIREGKITYVEDVADGLEKAPEALVGLFHGKNVGKQVVVVARE

SEQ ID NO: 76668 - protein, 288 aa, Arabidopsis thaliana
  peptide (1)..(288): Ceres Seq. ID no. 7108785
  misc_feature (77)..(285): Pfam Name: Zinc-binding dehydrogenase Pfam Description: Zinc-binding dehydrogenase
  misc_feature (1)..(288): Homolog of NCBI NO: 15237888 NR Description: quinone oxidoreductase -like protein; protein id:
  misc_feature (1)..(288): Homolog of NCBI NO: 21539447 NR Description: quinone oxidoreductase-like protein [Arabidopsis
  misc_feature (1)..(288): Homolog of NCBI NO: 22326861 NR Description: quinone oxidoreductase - like protein; protein At5g17000.1, supported by cDNA: gi_16604343, supported by cDNA: [Arabidopsis thaliana] >gi|16604344|gb|AAL24178.1|
  misc_feature (1)..(288): Homolog of NCBI NO: 17529140 NR Description: putative quinone oxidoreductase [Arabidopsis
  misc_feature (1)..(288): Homolog of NCBI NO: 15237890 NR Description: quinone oxidoreductase - like protein; protein At5g16990.1, supported by cDNA: gi_17529037, supported by cDNA:
  misc_feature (1)..(288): Homolog of NCBI NO: 21554121 NR Description: quinone oxidoreductase-like protein [Arabidopsis
  misc_feature (1)..(288): Homolog of NCBI NO: 1362014 NR Description: probable NADPH2:quinone reductase (EC 1.6.5.5) P2
  misc_feature (1)..(288): Homolog of NCBI NO: 11358742 NR Description: quinone oxidoreductase-like protein - Arabidopsis
  misc_feature (1)..(288): Homolog of NCBI NO: 15228456 NR Description: putative NADP-dependent oxidoreductase; protein At3g03080.1 [Arabidopsis thaliana]
  misc_feature (1)..(283): Homolog of NCBI NO: 11357163 NR Description: allyl alcohol dehydrogenase-like protein -
MGKPDPSTAALAQAYTPGQPIQGYGVSRIIESGHPDYKKGDLLWGIVAWEEYSVITPMTHAHFKIQHTDVPLSYYTGLLGMPGMTAYAGFYEVCSPKEGETVYVSAASGAVGQLVGQLAKMMGCYVVGSAGSKEKVDLLKTKFGFDDAFNYKEESDLTAALKRCFPNGIDIYFENVGGKMLDAVLVNMNMHGRIAVCGMISQYNLENQEGVHNLSNIIYKRIRIQGFVVSDFYDKYSKFLEFVLPHIREGKITYVEDVADGLEKAPEALVGLFHGKNVGKQVVVVARE

SEQ ID NO: 76669 - DNA, 1093 bp, Arabidopsis thaliana
  misc_feature (1)..(1093): Ceres Seq. ID no. 7108793
  misc_feature: MA Experiment ID: 20000495 Result: Down-regulated in Transcription
  misc_feature: MA Experiment 20000495 PARAMETER Experiment Name: At_Guard_Cells_P Parameter: Harvest Date Value: 8/2/2002
  misc_feature: MA Experiment 20000495 PARAMETER Experiment Name: At_Guard_Cells_P Parameter: Organism Value: A. thaliana
  misc_feature: MA Experiment 20000495 PARAMETER Experiment Name: At_Guard_Cells_P Parameter: Tissue Value: Guard Cells vs. Leaves
gcggccgcgtcgacgaaggaagaagaagaagaagaagaagaaaaaactatggagaatgagagggaaaagcaggtttacttggctaagctctccgagcaaaccgaaagatacgatgaaatggtggaggcgatgaagaaagttgctcagcttgatgtggagctaactgtggaagagaggaatcttgtatctgtagggtacaagaatgtgattggtgcaaggagagcatcatggagaatactatcttccattgagcagaaggaagagtccaagggaaatgatgaaaatgtcaagaggcttaagaattatcgtaagagagttgaagatgagcttgctaaagtttgtaatgacatcttgtctgtcattgataagcatctcattccatcgtctaacgctgtggagtcaactgtctttttctacaaaatgaaaggagattactatcgctatcttgcggagttcagttctggtgctgaacgcaaggaagctgcagatcagtctcttgaagcatataaggctgctgttgctgctgcagagaatggtttggcacccacacatccagttagacttggcttggcgttgaacttttcagttttctactatgagatcttgaactctcccgaaagcgcatgccaattggctaagcaagcattcgatgatgcaattgctgaacttgacagcctcaacgaggaatcatacaaagacagcactcttattatgcagctacttagagacaatctcaccttgtggacttcagaccttaatgaggaaggagatgagagaaccaaaggtgctgatgagcctcaagatgagaactaaatcctctgtgagaagagaaacgactcttgctgcatcctgaatcttgaagtgaagacagtaagtgtcgttgtttgttactcgaatgtgtaatttttaatctatgtctttcttgatggtgttttccagattcttgaacttttcacaacacaacactgcgttgcgtatcttcaaccctcttatgatgtggttgaattctgttttacgcttagtttgcttcttttgttgttgaattgagccagcaggcatgatttgggtttttgtttatcagaatattaggcgt

SEQ ID NO: 76670 - protein, 270 aa, Arabidopsis thaliana
  peptide (1)..(270): Ceres Seq. ID no. 7108794
  misc_feature (21)..(256): Pfam Name: 14-3-3 protein Pfam Description: 14-3-3 protein
  misc_feature (17)..(270): Homolog of NCBI NO: 18395103 NR Description: 14-3-3 protein GF14 epsilon (grf10); protein id: supported by cDNA: 36798., supported by cDNA: gi_1022777, by cDNA: gi_15450849, supported by cDNA: gi_16604431, supported
  misc_feature (17)..(269): Homolog of NCBI NO: 30687814 NR Description: 14-3-3 protein GF14 epsilon (grf10) [Arabidopsis
  misc_feature (17)..(270): Homolog of NCBI NO: 26454609 NR Description: 14-3-3 protein 7 >gi|15637114|gb|AAL04425.1|
  misc_feature (17)..(270): Homolog of NCBI NO: 3925703 NR Description: 14-3-3 protein [Lycopersicon esculentum]
  misc_feature (17)..(270): Homolog of NCBI NO: 2492490 NR Description: 14-3-3-LIKE PROTEIN >gi|7435016|pir||T04101
  misc_feature (17)..(256): Homolog of NCBI NO: 18399427 NR Description: 14-3-3 protein GF14 omicron (grf11); protein id:
AAASTKEEEEEEEEKTMENEREKQVYLAKLSEQTERYDEMVEAMKKVAQLDVELTVEERNLVSVGYKNVIGARRASWRILSSIEQKEESKGNDENVKRLKNYRKRVEDELAKVCNDILSVIDKHLIPSSNAVESTVFFYKMKGDYYRYLAEFSSGAERKEAADQSLEAYKAAVAAAENGLAPTHPVRLGLALNFSVFYYEILNSPESACQLAKQAFDDAIAELDSLNEESYKDSTLIMQLLRDNLTLWTSDLNEEGDERTKGADEPQDEN

SEQ ID NO: 76671 - protein, 254 aa, Arabidopsis thaliana; identical to SEQ ID NO: 23632
  peptide (1)..(254): Ceres Seq. ID no. 7108795
  misc_feature (5)..(240): Pfam Name: 14-3-3 protein Pfam Description: 14-3-3 protein
  misc_feature (1)..(254): Homolog of NCBI NO: 18395103 NR Description: 14-3-3 protein GF14 epsilon (grf10); protein id: supported by cDNA: 36798., supported by cDNA: gi_1022777, by cDNA: gi_15450849, supported by cDNA: gi_16604431, supported
  misc_feature (1)..(253): Homolog of NCBI NO: 30687814 NR Description: 14-3-3 protein GF14 epsilon (grf10) [Arabidopsis
  misc_feature (1)..(254): Homolog of NCBI NO: 26454609 NR Description: 14-3-3 protein 7 >gi|15637114|gb|AAL04425.1|
  misc_feature (1)..(254): Homolog of NCBI NO: 3925703 NR Description: 14-3-3 protein [Lycopersicon esculentum]
  misc_feature (1)..(254): Homolog of NCBI NO: 2492490 NR Description: 14-3-3-LIKE PROTEIN >gi|7435016|pir||T04101
  misc_feature (1)..(240): Homolog of NCBI NO: 18399427 NR Description: 14-3-3 protein GF14 omicron (grf11); protein id:

SEQ ID NO: 76672 - protein, 231 aa, Arabidopsis thaliana; identical to SEQ ID NO: 23633
  peptide (1)..(231): Ceres Seq. ID no. 7108796
  misc_feature (1)..(217): Pfam Name: 14-3-3 protein Pfam Description: 14-3-3 protein
  misc_feature (1)..(231): Homolog of NCBI NO: 18395103 NR Description: 14-3-3 protein GF14 epsilon (grf10); protein id: supported by cDNA: 36798., supported by cDNA: gi_1022777, by cDNA: gi_15450849, supported by cDNA: gi_16604431, supported
  misc_feature (1)..(230): Homolog of NCBI NO: 30687814 NR Description: 14-3-3 protein GF14 epsilon (grf10) [Arabidopsis
  misc_feature (1)..(231): Homolog of NCBI NO: 26454609 NR Description: 14-3-3 protein 7 >gi|15637114|gb|AAL04425.1|
  misc_feature (1)..(231): Homolog of NCBI NO: 3925703 NR Description: 14-3-3 protein [Lycopersicon esculentum]
  misc_feature (1)..(231): Homolog of NCBI NO: 2492490 NR Description: 14-3-3-LIKE PROTEIN >gi|7435016|pir||T04101
  misc_feature (1)..(217): Homolog of NCBI NO: 18399427 NR Description: 14-3-3 protein GF14 omicron (grf11); protein id:

SEQ ID NO: 76673 - DNA, 1856 bp, Arabidopsis thaliana
  misc_feature (1)..(1856): Ceres Seq. ID no. 7108813
  misc_feature: MA Experiment ID: 108434 Result: Down-regulated in Transcription
  misc_feature: MA Experiment 108434 PARAMETER Experiment Name: At_Root_Tips_cDNA_P Parameter: Tissue Value: Root Tips
  misc_feature: MA Experiment ID: 108435 Result: Down-regulated in Transcription
  misc_feature: MA Experiment 108435 PARAMETER Experiment Name: At_stm_Mutants_cDNA_P Parameter: Plant Line Value: wt Landsburg vs stm
  misc_feature: MA Experiment 108435 PARAMETER Experiment Name: At_stm_Mutants_cDNA_P Parameter: Tissue Value: Shoot Apical Meristem Region
  misc_feature: MA Experiment ID: 108573 Result: Up-regulated in Transcription
  misc_feature: MA Experiment 108573 PARAMETER Experiment Name: At_Drought_cDNA_P Parameter: Timepoint (hr) Value: 6
  misc_feature: MA Experiment 108573 PARAMETER Experiment Name: At_Drought_cDNA_P Parameter: Tissue Value: Aerial
  misc_feature: MA Experiment 108573 PARAMETER Experiment Name: At_Drought_cDNA_P Parameter: Treatment Value: Drought vs. No Drought
  misc_feature: MA Experiment ID: 108595 Result: Down-regulated in Transcription
  misc_feature: MA Experiment 108595 PARAMETER Experiment Name: At_Ler-pi_Ovule_cDNA_P Parameter: Plant Line Value: null
  misc_feature: MA Experiment ID: 20000088 Result: Up-regulated in Transcription
  misc_feature: MA Experiment 20000088 PARAMETER Experiment Name: At_100uM_ABA_Mutants_cDNA_P Parameter: Plant Line Value: Landsberg
  misc_feature: MA Experiment 20000088 PARAMETER Experiment Name: At_100uM_ABA_Mutants_cDNA_P Parameter: Timepoint (hr) Value: 6
  misc_feature: MA Experiment 20000088 PARAMETER Experiment Name: At_100uM_ABA_Mutants_cDNA_P Parameter: Tissue Value: Aerial
  misc_feature: MA Experiment 20000088 PARAMETER Experiment Name: At_100uM_ABA_Mutants_cDNA_P Parameter: Treatment Value: 100uM ABA vs. No Treatment
  misc_feature: MA Experiment ID: 20000090 Result: Up-regulated in Transcription
  misc_feature: MA Experiment ID: 20000227 Result: Down-regulated in Transcription
  misc_feature: MA Experiment 20000227 PARAMETER Experiment Name: At_Root-Tips-vs-Tops_P Parameter: Tissue Value: Root Tips vs. Root Tops
  misc_feature: MA Experiment ID: 20000439 Result: Down-regulated in Transcription
  misc_feature: MA Experiment 20000439 PARAMETER Experiment Name: At_Roots__P Parameter: Age (day) Value: 14 vs. 21
  misc_feature: MA Experiment 20000439 PARAMETER Experiment Name: At_Roots__P Parameter: Organism Value: A. thaliana
  misc_feature: MA Experiment 20000439 PARAMETER Experiment Name: At_Roots__P Parameter: Tissue Value: Roots vs. Whole Plant
  misc_feature: MA Experiment ID: 20000496 Result: Up-regulated in Transcription
  misc_feature: MA Experiment 20000496 PARAMETER Experiment Name: At_Guard_Cells_P Parameter: Harvest Date Value: 7/19/2002
  misc_feature: MA Experiment 20000496 PARAMETER Experiment Name: At_Guard_Cells_P Parameter: Organism Value: Canola
  misc_feature: MA Experiment 20000496 PARAMETER Experiment Name: At_Guard_Cells_P Parameter: Tissue Value: Guard Cells vs. Leaves
gaattcctcgagctacgtcagggccctgacgtagccgtcaatcgaaatcccaaagatcagcgatggtgactctaaacgcttcttctcctctcacgaccaagtcgttcctcccctaccgtcacgctcctcgccgtccaatctctttctcccctgtcttcgccgttcattcgactgaccccaagaaatctacccaatcagcctccgcttcggttaaatggagtctagagagttggaagtcgaagaaagctttgcaattgccggattatcctgatcagaaggatgttgattcggttctacagacgctttcttcttttcctcctatagttttcgctggtgaggctaggaaactagaggataagcttggtcaagcggctatgggtcaagcctttatgcttcaaggtggtgattgtgctgagagtttcaaggaatttaacgctaataacattagagacacctttagggttcttcttcagatgggtgttgttctcatgttcggtggccagttaccagttatcaaggtgggaagaatggctggtcagtttgcgaagccgagattagacccatttgaggagaaagatggtgtgaagctgccgagttacagaggagataacataaatggtgatgcttttgatgagaaatcgaggattcctgatcctcataggatggttagagcgtacacacagtctgtggctacgttgaatctcttgagagcatttgctactggaggttatgcagctatgcagagagttagccagtggaaccttgatttcacgcaacatagtgaacagggtgacaggtaccgtgaattggctaatagagttgatgaggctttgggattcatgggtgcagctggacttactagtgctcacccgatcatgactactactgagttttggacatcccatgagtgtttgttattgccttatgagcaagcactcacaagagaggattcaacatctggactttactatgattgctctgcgcacatgctttgggttggagaacgaactcgccaacttgatggtgctcatgttgagtttctgaggggaatcgctaaccccctcggaatcaaggtgagtgataaaatggtccctagtgaactggttaagctgatagagatactaaaccctcagaacaagcctggaaggattacggttatagtgagaatgggagctgagaatatgcgggtcaagcttcctaatttgatcagagcagtccgtggagccggtcagattgtgacttgggttagtgatccaatgcacggaaacacaatcatggctcctggtgggctaaaaactcgttctttcgatgcaatcagggcggaattgagagcgttcttcgacgtccatgatcaagaagggagtttccctggcggggttcatttagaaatgactggtcaaaacgtgactgaatgtgtcggagggtcacgcaccatcacttacaacgatctaagctcacgctaccacactcactgtgacccaagactcaacgcatctcagtctctggagcttgcattcatcattgcagagcgtctgcgaaagagaaggcttggttccgggaatcttccgtcatctattggagtctagagaacaagaaaatacttatccgagctaggatgtgtgtgtatagaggctgatctctacttattaagttgccaagttaaatgagcttgtgtactgttaaaagtaagatattgttgtttttgtgtgttgggttatgattttgtctgaaataagtggctgactttataacccgtaaatctctacgtcacgcttgcaacaaaaattcgatatttgattcaatcacagaaaagtcctcccattaaggtgtaaaccctgacgtagctcgaggaattc

SEQ ID NO: 76674 - protein, 507 aa, Arabidopsis thaliana
  peptide (1)..(507): Ceres Seq. ID no. 7108814
  misc_feature (51)..(488): Pfam Name: Class-II DAHP synthetase family Pfam Description: Class-II DAHP synthetase family
  misc_feature (1)..(507): Homolog of NCBI NO: 166690 NR Description: 3-deoxy-D-arabino-heptulosonate 7-phosphate
  misc_feature (1)..(507): Homolog of NCBI NO: 15234217 NR Description: 2-dehydro-3-deoxyphosphoheptonate aldolase; id: At4g33510.1, supported by cDNA: 37432., supported by cDNA: supported by cDNA: gi_166689 [Arabidopsis thaliana]
  misc_feature (1)..(507): Homolog of NCBI NO: 21593248 NR Description: 2-dehydro-3-deoxyphosphoheptonate aldolase
  misc_feature (5)..(495): Homolog of NCBI NO: 2398681 NR Description: 3-deoxy-D-arabino-heptulosonate 7-phosphate
  misc_feature (1)..(498): Homolog of NCBI NO: 2398679 NR Description: 3-deoxy-D-arabino-heptulosonate 7-phosphate
  misc_feature (24)..(498): Homolog of NCBI NO: 584778 NR Description: Phospho-2-dehydro-3-deoxyheptonate aldolase 2,
  misc_feature (24)..(498): Homolog of NCBI NO: 2546988 NR Description: 2-dehydro-3-deoxyphosphoheptonate aldolase;
  misc_feature (24)..(498): Homolog of NCBI NO: 584777 NR Description: Phospho-2-dehydro-3-deoxyheptonate aldolase 1,
  misc_feature (24)..(498): Homolog of NCBI NO: 24745903 NR Description: 3-deoxy-D-arabino-heptulosonate 7-phosphate
  misc_feature (1)..(503): Homolog of NCBI NO: 7488957 NR Description: probable 2-dehydro-3-deoxy-phosphoheptonate
MVTLNASSPLTTKSFLPYRHAPRRPISFSPVFAVHSTDPKKSTQSASASVKWSLESWKSKKALQLPDYPDQKDVDSVLQTLSSFPPIVFAGEARKLEDKLGQAAMGQAFMLQGGDCAESFKEFNANNIRDTFRVLLQMGVVLMFGGQLPVIKVGRMAGQFAKPRLDPFEEKDGVKLPSYRGDNINGDAFDEKSRIPDPHRMVRAYTQSVATLNLLRAFATGGYAAMQRVSQWNLDFTQHSEQGDRYRELANRVDEALGFMGAAGLTSAHPIMTTTEFWTSHECLLLPYEQALTREDSTSGLYYDCSAHMLWVGERTRQLDGAHVEFLRGIANPLGIKVSDKMVPSELVKLIEILNPQNKPGRITVIVRMGAENMRVKLPNLIRAVRGAGQIVTWVSDPMHGNTIMAPGGLKTRSFDAIRAELRAFFDVHDQEGSFPGGVHLEMTGQNVTECVGGSRTITYNDLSSRYHTHCDPRLNASQSLELAFIIAERLRKRRLGSGNLPSSIGV

SEQ ID NO: 76675 - protein, 403 aa, Arabidopsis thaliana
  peptide (1)..(403): Ceres Seq. ID no. 7108815
  misc_feature (1)..(384): Pfam Name: Class-II DAHP synthetase family Pfam Description: Class-II DAHP synthetase family
  misc_feature (1)..(403): Homolog of NCBI NO: 166690 NR Description: 3-deoxy-D-arabino-heptulosonate 7-phosphate
  misc_feature (1)..(403): Homolog of NCBI NO: 15234217 NR Description: 2-dehydro-3-deoxyphosphoheptonate aldolase; id: At4g33510.1, supported by cDNA: 37432., supported by cDNA: supported by cDNA: gi_166689 [Arabidopsis thaliana]
  misc_feature (1)..(403): Homolog of NCBI NO: 21593248 NR Description: 2-dehydro-3-deoxyphosphoheptonate aldolase
  misc_feature (1)..(391): Homolog of NCBI NO: 2398681 NR Description: 3-deoxy-D-arabino-heptulosonate 7-phosphate
  misc_feature (1)..(394): Homolog of NCBI NO: 2398679 NR Description: 3-deoxy-D-arabino-heptulosonate 7-phosphate
  misc_feature (1)..(394): Homolog of NCBI NO: 584778 NR Description: Phospho-2-dehydro-3-deoxyheptonate aldolase 2,
  misc_feature (1)..(394): Homolog of NCBI NO: 2546988 NR Description: 2-dehydro-3-deoxyphosphoheptonate aldolase;
  misc_feature (1)..(394): Homolog of NCBI NO: 584777 NR Description: Phospho-2-dehydro-3-deoxyheptonate aldolase 1,
  misc_feature (1)..(394): Homolog of NCBI NO: 24745903 NR Description: 3-deoxy-D-arabino-heptulosonate 7-phosphate
  misc_feature (1)..(399): Homolog of NCBI NO: 7488957 NR Description: probable 2-dehydro-3-deoxy-phosphoheptonate
MGQAFMLQGGDCAESFKEFNANNIRDTFRVLLQMGVVLMFGGQLPVIKVGRMAGQFAKPRLDPFEEKDGVKLPSYRGDNINGDAFDEKSRIPDPHRMVRAYTQSVATLNLLRAFATGGYAAMQRVSQWNLDFTQHSEQGDRYRELANRVDEALGFMGAAGLTSAHPIMTTTEFWTSHECLLLPYEQALTREDSTSGLYYDCSAHMLWVGERTRQLDGAHVEFLRGIANPLGIKVSDKMVPSELVKLIEILNPQNKPGRITVIVRMGAENMRVKLPNLIRAVRGAGQIVTWVSDPMHGNTIMAPGGLKTRSFDAIRAELRAFFDVHDQEGSFPGGVHLEMTGQNVTECVGGSRTITYNDLSSRYHTHCDPRLNASQSLELAFIIAERLRKRRLGSGNLPSSIGV

SEQ ID NO: 76676 - protein, 398 aa, Arabidopsis thaliana
  peptide (1)..(398): Ceres Seq. ID no. 7108816
  misc_feature (1)..(379): Pfam Name: Class-II DAHP synthetase family Pfam Description: Class-II DAHP synthetase family
  misc_feature (1)..(398): Homolog of NCBI NO: 166690 NR Description: 3-deoxy-D-arabino-heptulosonate 7-phosphate
  misc_feature (1)..(398): Homolog of NCBI NO: 15234217 NR Description: 2-dehydro-3-deoxyphosphoheptonate aldolase; id: At4g33510.1, supported by cDNA: 37432., supported by cDNA: supported by cDNA: gi_166689 [Arabidopsis thaliana]
  misc_feature (1)..(398): Homolog of NCBI NO: 21593248 NR Description: 2-dehydro-3-deoxyphosphoheptonate aldolase
  misc_feature (1)..(386): Homolog of NCBI NO: 2398681 NR Description: 3-deoxy-D-arabino-heptulosonate 7-phosphate
  misc_feature (1)..(389): Homolog of NCBI NO: 2398679 NR Description: 3-deoxy-D-arabino-heptulosonate 7-phosphate
  misc_feature (1)..(389): Homolog of NCBI NO: 584778 NR Description: Phospho-2-dehydro-3-deoxyheptonate aldolase 2,
  misc_feature (1)..(389): Homolog of NCBI NO: 2546988 NR Description: 2-dehydro-3-deoxyphosphoheptonate aldolase;
  misc_feature (1)..(389): Homolog of NCBI NO: 584777 NR Description: Phospho-2-dehydro-3-deoxyheptonate aldolase 1,
  misc_feature (1)..(389): Homolog of NCBI NO: 24745903 NR Description: 3-deoxy-D-arabino-heptulosonate 7-phosphate
  misc_feature (1)..(394): Homolog of NCBI NO: 7488957 NR Description: probable 2-dehydro-3-deoxy-phosphoheptonate
MLQGGDCAESFKEFNANNIRDTFRVLLQMGVVLMFGGQLPVIKVGRMAGQFAKPRLDPFEEKDGVKLPSYRGDNINGDAFDEKSRIPDPHRMVRAYTQSVATLNLLRAFATGGYAAMQRVSQWNLDFTQHSEQGDRYRELANRVDEALGFMGAAGLTSAHPIMTTTEFWTSHECLLLPYEQALTREDSTSGLYYDCSAHMLWVGERTRQLDGAHVEFLRGIANPLGIKVSDKMVPSELVKLIEILNPQNKPGRITVIVRMGAENMRVKLPNLIRAVRGAGQIVTWVSDPMHGNTIMAPGGLKTRSFDAIRAELRAFFDVHDQEGSFPGGVHLEMTGQNVTECVGGSRTITYNDLSSRYHTHCDPRLNASQSLELAFIIAERLRKRRLGSGNLPSSIGV

SEQ ID NO: 76677 - DNA, 1918 bp, Arabidopsis thaliana
  misc_feature (1)..(1918): Ceres Seq. ID no. 7108817
  misc_feature: MA Experiment ID: 108434 Result: Down-regulated in Transcription
  misc_feature: MA Experiment 108434 PARAMETER Experiment Name: At_Root_Tips_cDNA_P Parameter: Tissue Value: Root Tips
  misc_feature: MA Experiment ID: 108463 Result: Down-regulated in Transcription
  misc_feature: MA Experiment 108463 PARAMETER Experiment Name: At_Germinating_Seeds_cDNA_P Parameter: Age (day) Value: 3 vs. 0
  misc_feature: MA Experiment 108463 PARAMETER Experiment Name: At_Germinating_Seeds_cDNA_P Parameter: Tissue Value: Germinating Seeds
  misc_feature: MA Experiment ID: 108464 Result: Down-regulated in Transcription
  misc_feature: MA Experiment 108464 PARAMETER Experiment Name: At_Germinating_Seeds_cDNA_P Parameter: Age (day) Value: 4 vs. 0
  misc_feature: MA Experiment 108464 PARAMETER Experiment Name: At_Germinating_Seeds_cDNA_P Parameter: Tissue Value: Germinating Seeds
  misc_feature: MA Experiment ID: 20000088 Result: Up-regulated in Transcription
  misc_feature: MA Experiment 20000088 PARAMETER Experiment Name: At_100uM_ABA_Mutants_cDNA_P Parameter: Plant Line Value: Landsberg
  misc_feature: MA Experiment 20000088 PARAMETER Experiment Name: At_100uM_ABA_Mutants_cDNA_P Parameter: Timepoint (hr) Value: 6
  misc_feature: MA Experiment 20000088 PARAMETER Experiment Name: At_100uM_ABA_Mutants_cDNA_P Parameter: Tissue Value: Aerial
  misc_feature: MA Experiment 20000088 PARAMETER Experiment Name: At_100uM_ABA_Mutants_cDNA_P Parameter: Treatment Value: 100uM ABA vs. No Treatment
  misc_feature: MA Experiment ID: 20000438 Result: Down-regulated in Transcription
  misc_feature: MA Experiment 20000438 PARAMETER Experiment Name: At_Shoots__P Parameter: Age (day) Value: 14
  misc_feature: MA Experiment 20000438 PARAMETER Experiment Name: At_Shoots__P Parameter: Tissue Value: Shoots vs. Whole Plant
  misc_feature: MA Experiment ID: 20000794 Result: Down-regulated in Transcription
  misc_feature: MA Experiment 20000794 PARAMETER Experiment Name: At_Petals_P Parameter: Age (day) Value: 23-25 days
  misc_feature: MA Experiment 20000794 PARAMETER Experiment Name: At_Petals_P Parameter: Plant Line Value: WS
  misc_feature: MA Experiment 20000794 PARAMETER Experiment Name: At_Petals_P Parameter: Tissue Value: Petals vs. Whole plant
  misc_feature: MA Experiment ID: 20001450 Result: Down-regulated in Transcription
  misc_feature: MA Experiment 20001450 PARAMETER Experiment Name: At_Far-red-induction_P Parameter: Age (day) Value: 7
  misc_feature: MA Experiment 20001450 PARAMETER Experiment Name: At_Far-red-induction_P Parameter: Light Value: Far-red vs. White
  misc_feature: MA Experiment 20001450 PARAMETER Experiment Name: At_Far-red-induction_P Parameter: Organism Value: A. thaliana
  misc_feature: MA Experiment 20001450 PARAMETER Experiment Name: At_Far-red-induction_P Parameter: Plant Line Value: Columbia
  misc_feature: MA Experiment 20001450 PARAMETER Experiment Name: At_Far-red-induction_P Parameter: Timepoint (hr) Value: 8
  misc_feature: MA Experiment 20001450 PARAMETER Experiment Name: At_Far-red-induction_P Parameter: Tissue Value: Whole Plant
  misc_feature: MA Experiment ID: 20001451 Result: Down-regulated in Transcription
  misc_feature: MA Experiment 20001451 PARAMETER Experiment Name: At_Far-red-induction_P Parameter: Age (day) Value: 7
  misc_feature: MA Experiment 20001451 PARAMETER Experiment Name: At_Far-red-induction_P Parameter: Light Value: Far-red vs. White
  misc_feature: MA Experiment 20001451 PARAMETER Experiment Name: At_Far-red-induction_P Parameter: Organism Value: A. thaliana
  misc_feature: MA Experiment 20001451 PARAMETER Experiment Name: At_Far-red-induction_P Parameter: Plant Line Value: Columbia
  misc_feature: MA Experiment 20001451 PARAMETER Experiment Name: At_Far-red-induction_P Parameter: Timepoint (hr) Value: 24
  misc_feature: MA Experiment 20001451 PARAMETER Experiment Name: At_Far-red-induction_P Parameter: Tissue Value: Whole Plant
gaattcctcgagctacgtcagggctcattctctctctctctaaaaaaccaaatccagagtcagagaaaatctgtgatggctctttccaacgcctcctctctctccaccagatctatctacggcggtgatctttctcaccgtccaagcaaccgtcaatcatccttcacatttcatcccgccgtcaacaccaagcctaaatccgttaacctcgtcacggctgtacacgcggctgagccagctagaaacgctgtttcagtcaaagaatccgttgcgtcttcttcgtctggtgcattgaaatggactccagagagctggaaactgaagaaggctctgcaacttcctgattatcctaacgccaatgagcttgagtctgtgcttaaaacgatagaggcttttcctccgattgtgttcgccggagaagctaggaatcttgaagagagattggctgatgctgctgttggtaaagcttttcttctccaaggaggtgattgtgctgagagtttcaaggagttcaatgctactaatatcagagacaccttcagggttctgcttcagatgagtattgttcttacattcggtggccaggttccggtcattaaggttgggaggatggctggtcaatttgcaaagcctagatctgatgcatttgaggagaaggatggagtgaaattaccaagctacaagggagataacatcaatggtgatacttttgatgagaaatccaggattcctgatcctaataggatgattcgagcttacactcaatctgcagctactttgaatcttcttagagcctttgccactggaggttacgctgctattcaaagagttactcaatggaaccttgattttgttgaacaaagtgagcaagctgacaggtaccaggaattagctaatagggttgatgaggccttggggttcatgtctgcatgtggacttggcacggatcatccacttatgactacaactgatttctacacatcccatgagtgtttgcttctgccttatgaacagtcccttacaaggttggattcaacttctggtctctactatgattgttctgcacacatggtctggtgcggagagcgtaccagacaattggatggcgctcatgtcgagtttctcagggggattgctaatcctctgggcattaaggtgagcaacaaaatggatccctttgagctggttaagctagtagaaatcctgaatcctaataacaagcctggaagaatcactgtaattgtgagaatgggtgccgagaacatgagagttaagcttccccacctgatcagagcagtccgcagatcaggccagattgtgacatgggtctgcgatccaatgcatggaaacaccatcaaaagcacttgcggtcttaaaacacgtgcctttgactcaatactggctgaagtccgagcattccttgatgtgcacgagcaagaaggaagccacgcgggcggtatccatctcgagatgacaggtcagaacgtgacagaatgcattggagggtcccgcactgtgacctacgatgacctcagttctcgctaccacacacactgtgacccaaggctgaacgcgtcacagtctcttgaacttgccttcattgttgcagaacggctcaggaagagaagaacgggtagccagcgtgtgtcttgagtccggttcttcccttttatacactttttgattccaaacaaatcttttctctttgtcctgtgactgtgagttggtgtgtttatgacctaagttaaaagccccaaaagcctctctagagagtaaacctgtttctgctgtggacagaccatgtcatgtcattgttctttatgttaactttaatgtcaaaccgtgtcacttacactagtgtatatttctttttacatatctacacgaacatgaaccctgacgtagctcgaggaattcc

SEQ ID NO: 76678 - protein, 550 aa, Arabidopsis thaliana
  peptide (1)..(550): Ceres Seq. ID no. 7108818
  misc_feature (99)..(536): Pfam Name: Class-II DAHP synthetase family Pfam Description: Class-II DAHP synthetase family
  misc_feature (26)..(550): Homolog of NCBI NO: 166688 NR Description: 3-deoxy-D-arabino-heptulosonate y-phosphate
  misc_feature (26)..(550): Homolog of NCBI NO: 99742 NR Description: 2-dehydro-3-deoxy-phosphoheptonate aldolase (EC
  misc_feature (26)..(550): Homolog of NCBI NO: 15236093 NR Description: 2-dehydro-3-deoxyphosphoheptonate aldolase; id: At4g39980.1, supported by cDNA: gi_166687, supported by cDNA: [Arabidopsis thaliana] >gi|20141225|sp|P29976|AROF_ARATH aldolase
  misc_feature (26)..(548): Homolog of NCBI NO: 2546988 NR Description: 2-dehydro-3-deoxyphosphoheptonate aldolase;
  misc_feature (26)..(549): Homolog of NCBI NO: 584779 NR Description: Phospho-2-dehydro-3-deoxyheptonate aldolase 2,
  misc_feature (26)..(549): Homolog of NCBI NO: 584776 NR Description: Phospho-2-dehydro-3-deoxyheptonate aldolase 1,
  misc_feature (26)..(548): Homolog of NCBI NO: 15219878 NR Description: 3-deoxy-D-arabino-heptulosonate 7-phosphate, protein id: At1g22410.1 [Arabidopsis thaliana]
  misc_feature (26)..(549): Homolog of NCBI NO: 114193 NR Description: Phospho-2-dehydro-3-deoxyheptonate aldolase 1,
  misc_feature (26)..(548): Homolog of NCBI NO: 2398679 NR Description: 3-deoxy-D-arabino-heptulosonate 7-phosphate
  misc_feature (9)..(549): Homolog of NCBI NO: 7488957 NR Description: probable 2-dehydro-3-deoxy-phosphoheptonate
EFLELRQGSFSLSLKNQIQSQRKSVMALSNASSLSTRSIYGGDLSHRPSNRQSSFTFHPAVNTKPKSVNLVTAVHAAEPARNAVSVKESVASSSSGALKWTPESWKLKKALQLPDYPNANELESVLKTIEAFPPIVFAGEARNLEERLADAAVGKAFLLQGGDCAESFKEFNATNIRDTFRVLLQMSIVLTFGGQVPVIKVGRMAGQFAKPRSDAFEEKDGVKLPSYKGDNINGDTFDEKSRIPDPNRMIRAYTQSAATLNLLRAFATGGYAAIQRVTQWNLDFVEQSEQADRYQELANRVDEALGFMSACGLGTDHPLMTTTDFYTSHECLLLPYEQSLTRLDSTSGLYYDCSAHMVWCGERTRQLDGAHVEFLRGIANPLGIKVSNKMDPFELVKLVEILNPNNKPGRITVIVRMGAENMRVKLPHLIRAVRRSGQIVTWVCDPMHGNTIKSTCGLKTRAFDSILAEVRAFLDVHEQEGSHAGGIHLEMTGQNVTECIGGSRTVTYDDLSSRYHTHCDPRLNASQSLELAFIVAERLRKRRTGSQRVS

SEQ ID NO: 76679 - protein, 525 aa, Arabidopsis thaliana
  peptide (1)..(525): Ceres Seq. ID no. 7108819
  misc_feature (74)..(511): Pfam Name: Class-II DAHP synthetase family Pfam Description: Class-II DAHP synthetase family
  misc_feature (1)..(525): Homolog of NCBI NO: 166688 NR Description: 3-deoxy-D-arabino-heptulosonate y-phosphate
  misc_feature (1)..(525): Homolog of NCBI NO: 99742 NR Description: 2-dehydro-3-deoxy-phosphoheptonate aldolase (EC
  misc_feature (1)..(525): Homolog of NCBI NO: 15236093 NR Description: 2-dehydro-3-deoxyphosphoheptonate aldolase; id: At4g39980.1, supported by cDNA: gi_166687, supported by cDNA: [Arabidopsis thaliana] >gi|20141225|sp|P29976|AROF_ARATH aldolase
  misc_feature (1)..(523): Homolog of NCBI NO: 2546988 NR Description: 2-dehydro-3-deoxyphosphoheptonate aldolase;
  misc_feature (1)..(524): Homolog of NCBI NO: 584779 NR Description: Phospho-2-dehydro-3-deoxyheptonate aldolase 2,
  misc_feature (1)..(524): Homolog of NCBI NO: 584776 NR Description: Phospho-2-dehydro-3-deoxyheptonate aldolase 1,
  misc_feature (1)..(523): Homolog of NCBI NO: 15219878 NR Description: 3-deoxy-D-arabino-heptulosonate 7-phosphate, protein id: At1g22410.1 [Arabidopsis thaliana]
  misc_feature (1)..(524): Homolog of NCBI NO: 114193 NR Description: Phospho-2-dehydro-3-deoxyheptonate aldolase 1,
  misc_feature (1)..(523): Homolog of NCBI NO: 2398679 NR Description: 3-deoxy-D-arabino-heptulosonate 7-phosphate
  misc_feature (1)..(524): Homolog of NCBI NO: 7488957 NR Description: probable 2-dehydro-3-deoxy-phosphoheptonate
MALSNASSLSTRSIYGGDLSHRPSNRQSSFTFHPAVNTKPKSVNLVTAVHAAEPARNAVSVKESVASSSSGALKWTPESWKLKKALQLPDYPNANELESVLKTIEAFPPIVFAGEARNLEERLADAAVGKAFLLQGGDCAESFKEFNATNIRDTFRVLLQMSIVLTFGGQVPVIKVGRMAGQFAKPRSDAFEEKDGVKLPSYKGDNINGDTFDEKSRIPDPNRMIRAYTQSAATLNLLRAFATGGYAAIQRVTQWNLDFVEQSEQADRYQELANRVDEALGFMSACGLGTDHPLMTTTDFYTSHECLLLPYEQSLTRLDSTSGLYYDCSAHMVWCGERTRQLDGAHVEFLRGIANPLGIKVSNKMDPFELVKLVEILNPNNKPGRITVIVRMGAENMRVKLPHLIRAVRRSGQIVTWVCDPMHGNTIKSTCGLKTRAFDSILAEVRAFLDVHEQEGSHAGGIHLEMTGQNVTECIGGSRTVTYDDLSSRYHTHCDPRLNASQSLELAFIVAERLRKRRTGSQRVS

SEQ ID NO: 76680 - protein, 365 aa, Arabidopsis thaliana
  peptide (1)..(365): Ceres Seq. ID no. 7108820
  misc_feature (1)..(351): Pfam Name: Class-II DAHP synthetase family Pfam Description: Class-II DAHP synthetase family
  misc_feature (1)..(365): Homolog of NCBI NO: 166688 NR Description: 3-deoxy-D-arabino-heptulosonate y-phosphate
  misc_feature (1)..(365): Homolog of NCBI NO: 99742 NR Description: 2-dehydro-3-deoxy-phosphoheptonate aldolase (EC
  misc_feature (1)..(365): Homolog of NCBI NO: 15236093 NR Description: 2-dehydro-3-deoxyphosphoheptonate aldolase; id: At4g39980.1, supported by cDNA: gi_166687, supported by cDNA: [Arabidopsis thaliana] >gi|20141225|sp|P29976|AROF_ARATH aldolase
  misc_feature (1)..(363): Homolog of NCBI NO: 2546988 NR Description: 2-dehydro-3-deoxyphosphoheptonate aldolase;
  misc_feature (1)..(364): Homolog of NCBI NO: 584779 NR Description: Phospho-2-dehydro-3-deoxyheptonate aldolase 2,
  misc_feature (1)..(364): Homolog of NCBI NO: 584776 NR Description: Phospho-2-dehydro-3-deoxyheptonate aldolase 1,
  misc_feature (1)..(363): Homolog of NCBI NO: 15219878 NR Description: 3-deoxy-D-arabino-heptulosonate 7-phosphate, protein id: At1g22410.1 [Arabidopsis thaliana]
  misc_feature (1)..(364): Homolog of NCBI NO: 114193 NR Description: Phospho-2-dehydro-3-deoxyheptonate aldolase 1,
  misc_feature (1)..(363): Homolog of NCBI NO: 2398679 NR Description: 3-deoxy-D-arabino-heptulosonate 7-phosphate
  misc_feature (1)..(364): Homolog of NCBI NO: 7488957 NR Description: probable 2-dehydro-3-deoxy-phosphoheptonate
MSIVLTFGGQVPVIKVGRMAGQFAKPRSDAFEEKDGVKLPSYKGDNINGDTFDEKSRIPDPNRMIRAYTQSAATLNLLRAFATGGYAAIQRVTQWNLDFVEQSEQADRYQELANRVDEALGFMSACGLGTDHPLMTTTDFYTSHECLLLPYEQSLTRLDSTSGLYYDCSAHMVWCGERTRQLDGAHVEFLRGIANPLGIKVSNKMDPFELVKLVEILNPNNKPGRITVIVRMGAENMRVKLPHLIRAVRRSGQIVTWVCDPMHGNTIKSTCGLKTRAFDSILAEVRAFLDVHEQEGSHAGGIHLEMTGQNVTECIGGSRTVTYDDLSSRYHTHCDPRLNASQSLELAFIVAERLRKRRTGSQRVS

SEQ ID NO: 76681 - DNA, 1151 bp, Arabidopsis thaliana
  misc_feature (1)..(1151): Ceres Seq. ID no. 7108844
  misc_feature: MA Experiment ID: 108434 Result: Up-regulated in Transcription
  misc_feature: MA Experiment 108434 PARAMETER Experiment Name: At_Root_Tips_cDNA_P Parameter: Tissue Value: Root Tips
  misc_feature: MA Experiment ID: 108435 Result: Up-regulated in Transcription
  misc_feature: MA Experiment 108435 PARAMETER Experiment Name: At_stm_Mutants_cDNA_P Parameter: Plant Line Value: wt Landsburg vs stm
  misc_feature: MA Experiment 108435 PARAMETER Experiment Name: At_stm_Mutants_cDNA_P Parameter: Tissue Value: Shoot Apical Meristem Region
  misc_feature: MA Experiment ID: 20000087 Result: Down-regulated in Transcription
  misc_feature: MA Experiment 20000087 PARAMETER Experiment Name: At_100uM_ABA_Mutants_cDNA_P Parameter: Plant Line Value: WS
  misc_feature: MA Experiment 20000087 PARAMETER Experiment Name: At_100uM_ABA_Mutants_cDNA_P Parameter: Timepoint (hr) Value: 6
  misc_feature: MA Experiment 20000087 PARAMETER Experiment Name: At_100uM_ABA_Mutants_cDNA_P Parameter: Tissue Value: Aerial
  misc_feature: MA Experiment 20000087 PARAMETER Experiment Name: At_100uM_ABA_Mutants_cDNA_P Parameter: Treatment Value: 100uM ABA vs. No Treatment
  misc_feature: MA Experiment ID: 20000089 Result: Down-regulated in Transcription
  misc_feature: MA Experiment ID: 20000111 Result: Down-regulated in Transcription
  misc_feature: MA Experiment 20000111 PARAMETER Experiment Name: At_42deg_Heat_cDNA_P Parameter: Temperature (deg C) Value: 42 vs. 22
  misc_feature: MA Experiment 20000111 PARAMETER Experiment Name: At_42deg_Heat_cDNA_P Parameter: Timepoint (hr) Value: 6
  misc_feature: MA Experiment 20000111 PARAMETER Experiment Name: At_42deg_Heat_cDNA_P Parameter: Tissue Value: Aerial
  misc_feature: MA Experiment ID: 20000234 Result: Down-regulated in Transcription
  misc_feature: MA Experiment 20000234 PARAMETER Experiment Name: At_Siliques_P Parameter: Age (day) Value: 21
  misc_feature: MA Experiment 20000234 PARAMETER Experiment Name: At_Siliques_P Parameter: Organism Value: A. thaliana
  misc_feature: MA Experiment 20000234 PARAMETER Experiment Name: At_Siliques_P Parameter: Plant Line Value: WS
  misc_feature: MA Experiment 20000234 PARAMETER Experiment Name: At_Siliques_P Parameter: Tissue Value: Less Than 5mm Siliques vs. Whole Plant
  misc_feature: MA Experiment ID: 20000235 Result: Down-regulated in Transcription
  misc_feature: MA Experiment 20000235 PARAMETER Experiment Name: At_Siliques_P Parameter: Age (day) Value: 21
  misc_feature: MA Experiment 20000235 PARAMETER Experiment Name: At_Siliques_P Parameter: Organism Value: A. thaliana
  misc_feature: MA Experiment 20000235 PARAMETER Experiment Name: At_Siliques_P Parameter: Plant Line Value: WS
  misc_feature: MA Experiment 20000235 PARAMETER Experiment Name: At_Siliques_P Parameter: Tissue Value: 5-10mm Siliques vs. Whole Plant
  misc_feature: MA Experiment ID: 20000264 Result: Down-regulated in Transcription
  misc_feature: MA Experiment 20000264 PARAMETER Experiment Name: At_Open_Flower_P Parameter: Age (day) Value: 21
  misc_feature: MA Experiment 20000264 PARAMETER Experiment Name: At_Open_Flower_P Parameter: Plant Line Value: WS
  misc_feature: MA Experiment 20000264 PARAMETER Experiment Name: At_Open_Flower_P Parameter: Tissue Value: Open Flower vs. Whole Plant
  misc_feature: MA Experiment ID: 20000265 Result: Down-regulated in Transcription
  misc_feature: MA Experiment 20000265 PARAMETER Experiment Name: At_Open_Flower_P Parameter: Age (day) Value: 21
  misc_feature: MA Experiment 20000265 PARAMETER Experiment Name: At_Open_Flower_P Parameter: Plant Line Value: WS
  misc_feature: MA Experiment 20000265 PARAMETER Experiment Name: At_Open_Flower_P Parameter: Tissue Value: Closed Flower vs. Whole Plant
  misc_feature: MA Experiment ID: 20000286 Result: Down-regulated in Transcription
  misc_feature: MA Experiment 20000286 PARAMETER Experiment Name: At_Open_Flower_P Parameter: Age (day) Value: 21
  misc_feature: MA Experiment 20000286 PARAMETER Experiment Name: At_Open_Flower_P Parameter: Plant Line Value: WS
  misc_feature: MA Experiment 20000286 PARAMETER Experiment Name: At_Open_Flower_P Parameter: Tissue Value: Half Open vs. Whole Plant
  misc_feature: MA Experiment ID: 20000308 Result: Down-regulated in Transcription
  misc_feature: MA Experiment 20000308 PARAMETER Experiment Name: At_100mM_NaCl__P Parameter: Age (day) Value: 17
  misc_feature: MA Experiment 20000308 PARAMETER Experiment Name: At_100mM_NaCl__P Parameter: Organism Value: A. thaliana
  misc_feature: MA Experiment 20000308 PARAMETER Experiment Name: At_100mM_NaCl__P Parameter: Plant Line Value: WS
  misc_feature: MA Experiment 20000308 PARAMETER Experiment Name: At_100mM_NaCl__P Parameter: Timepoint (hr) Value: 72
  misc_feature: MA Experiment 20000308 PARAMETER Experiment Name: At_100mM_NaCl__P Parameter: Tissue Value: Whole Plant
  misc_feature: MA Experiment 20000308 PARAMETER Experiment Name: At_100mM_NaCl__P Parameter: Treatment Value: 100mM NaCl vs. No Treatment
  misc_feature: MA Experiment ID: 20000437 Result: Down-regulated in Transcription
  misc_feature: MA Experiment 20000437 PARAMETER Experiment Name: At_Drought_P Parameter: Age (day) Value: 8
  misc_feature: MA Experiment 20000437 PARAMETER Experiment Name: At_Drought_P Parameter: Organism Value: A. thaliana
  misc_feature: MA Experiment 20000437 PARAMETER Experiment Name: At_Drought_P Parameter: Plant Line Value: WS
  misc_feature: MA Experiment 20000437 PARAMETER Experiment Name: At_Drought_P Parameter: Timepoint (hr) Value: 24
  misc_feature: MA Experiment 20000437 PARAMETER Experiment Name: At_Drought_P Parameter: Tissue Value: Whole Plant
  misc_feature: MA Experiment 20000437 PARAMETER Experiment Name: At_Drought_P Parameter: Treatment Value: Drought vs. No Drought
  misc_feature: MA Experiment ID: 20000575 Result: Up-regulated in Transcription
  misc_feature: MA Experiment 20000575 PARAMETER Experiment Name: At_100uM_ABA_Mutants__P Parameter: Organism Value: A. thaliana
  misc_feature: MA Experiment 20000575 PARAMETER Experiment Name: At_100uM_ABA_Mutants__P Parameter: Plant Line Value: CS22
  misc_feature: MA Experiment 20000575 PARAMETER Experiment Name: At_100uM_ABA_Mutants__P Parameter: Timepoint (hr) Value: 6
  misc_feature: MA Experiment 20000575 PARAMETER Experiment Name: At_100uM_ABA_Mutants__P Parameter: Tissue Value: Whole Plant
  misc_feature: MA Experiment 20000575 PARAMETER Experiment Name: At_100uM_ABA_Mutants__P Parameter: Treatment Value: 1uM ABA vs. No Treatment
  misc_feature: MA Experiment ID: 20000576 Result: Up-regulated in Transcription
  misc_feature: MA Experiment 20000576 PARAMETER Experiment Name: At_100uM_ABA_Mutants__P Parameter: Organism Value: A. thaliana
  misc_feature: MA Experiment 20000576 PARAMETER Experiment Name: At_100uM_ABA_Mutants__P Parameter: Plant Line Value: CS23
  misc_feature: MA Experiment 20000576 PARAMETER Experiment Name: At_100uM_ABA_Mutants__P Parameter: Timepoint (hr) Value: 6
  misc_feature: MA Experiment 20000576 PARAMETER Experiment Name: At_100uM_ABA_Mutants__P Parameter: Tissue Value: Whole Plant
  misc_feature: MA Experiment 20000576 PARAMETER Experiment Name: At_100uM_ABA_Mutants__P Parameter: Treatment Value: 1uM ABA vs. No Treatment
  misc_feature: MA Experiment ID: 20000794 Result: Down-regulated in Transcription
  misc_feature: MA Experiment 20000794 PARAMETER Experiment Name: At_Petals_P Parameter: Age (day) Value: 23-25 days
  misc_feature: MA Experiment 20000794 PARAMETER Experiment Name: At_Petals_P Parameter: Plant Line Value: WS
  misc_feature: MA Experiment 20000794 PARAMETER Experiment Name: At_Petals_P Parameter: Tissue Value: Petals vs. Whole plant
  misc_feature: MA Experiment ID: 20001247 Result: Up-regulated in Transcription
  misc_feature: MA Experiment 20001247 PARAMETER Experiment Name: At_Far-red-induction_P Parameter: Age (day) Value: 7
  misc_feature: MA Experiment 20001247 PARAMETER Experiment Name: At_Far-red-induction_P Parameter: Light Value: Far-red vs. White
  misc_feature: MA Experiment 20001247 PARAMETER Experiment Name: At_Far-red-induction_P Parameter: Organism Value: A. thaliana
  misc_feature: MA Experiment 20001247 PARAMETER Experiment Name: At_Far-red-induction_P Parameter: Plant Line Value: Columbia
  misc_feature: MA Experiment 20001247 PARAMETER Experiment Name: At_Far-red-induction_P Parameter: Timepoint (hr) Value: 1
  misc_feature: MA Experiment 20001247 PARAMETER Experiment Name: At_Far-red-induction_P Parameter: Tissue Value: Whole Plant
  misc_feature: MA Experiment ID: 20001248 Result: Up-regulated in Transcription
  misc_feature: MA Experiment 20001248 PARAMETER Experiment Name: At_Far-red-induction_P Parameter: Age (day) Value: 7
  misc_feature: MA Experiment 20001248 PARAMETER Experiment Name: At_Far-red-induction_P Parameter: Light Value: Far-red vs. White
  misc_feature: MA Experiment 20001248 PARAMETER Experiment Name: At_Far-red-induction_P Parameter: Organism Value: A. thaliana
  misc_feature: MA Experiment 20001248 PARAMETER Experiment Name: At_Far-red-induction_P Parameter: Plant Line Value: Columbia
  misc_feature: MA Experiment 20001248 PARAMETER Experiment Name: At_Far-red-induction_P Parameter: Timepoint (hr) Value: 4
  misc_feature: MA Experiment 20001248 PARAMETER Experiment Name: At_Far-red-induction_P Parameter: Tissue Value: Whole Plant
  misc_feature: MA Experiment ID: 20001450 Result: Up-regulated in Transcription
  misc_feature: MA Experiment 20001450 PARAMETER Experiment Name: At_Far-red-induction_P Parameter: Age (day) Value: 7
  misc_feature: MA Experiment 20001450 PARAMETER Experiment Name: At_Far-red-induction_P Parameter: Light Value: Far-red vs. White
  misc_feature: MA Experiment 20001450 PARAMETER Experiment Name: At_Far-red-induction_P Parameter: Organism Value: A. thaliana
  misc_feature: MA Experiment 20001450 PARAMETER Experiment Name: At_Far-red-induction_P Parameter: Plant Line Value: Columbia
  misc_feature: MA Experiment 20001450 PARAMETER Experiment Name: At_Far-red-induction_P Parameter: Timepoint (hr) Value: 8
  misc_feature: MA Experiment 20001450 PARAMETER Experiment Name: At_Far-red-induction_P Parameter: Tissue Value: Whole Plant
  misc_feature: MA Experiment ID: 20001451 Result: Up-regulated in Transcription
  misc_feature: MA Experiment 20001451 PARAMETER Experiment Name: At_Far-red-induction_P Parameter: Age (day) Value: 7
  misc_feature: MA Experiment 20001451 PARAMETER Experiment Name: At_Far-red-induction_P Parameter: Light Value: Far-red vs. White
  misc_feature: MA Experiment 20001451 PARAMETER Experiment Name: At_Far-red-induction_P Parameter: Organism Value: A. thaliana
  misc_feature: MA Experiment 20001451 PARAMETER Experiment Name: At_Far-red-induction_P Parameter: Plant Line Value: Columbia
  misc_feature: MA Experiment 20001451 PARAMETER Experiment Name: At_Far-red-induction_P Parameter: Timepoint (hr) Value: 24
  misc_feature: MA Experiment 20001451 PARAMETER Experiment Name: At_Far-red-induction_P Parameter: Tissue Value: Whole Plant
  misc_feature: MA Experiment ID: 20001503 Result: Up-regulated in Transcription
  misc_feature: MA Experiment 20001503 PARAMETER Experiment Name: At_Far-red-enriched_P Parameter: Age (day) Value: 7
  misc_feature: MA Experiment 20001503 PARAMETER Experiment Name: At_Far-red-enriched_P Parameter: Light Value: Far-red enriched vs. White
  misc_feature: MA Experiment 20001503 PARAMETER Experiment Name: At_Far-red-enriched_P Parameter: Organism Value: A. thaliana
  misc_feature: MA Experiment 20001503 PARAMETER Experiment Name: At_Far-red-enriched_P Parameter: Plant Line Value: Columbia
  misc_feature: MA Experiment 20001503 PARAMETER Experiment Name: At_Far-red-enriched_P Parameter: Timepoint (day) Value: 3
  misc_feature: MA Experiment 20001503 PARAMETER Experiment Name: At_Far-red-enriched_P Parameter: Tissue Value: Whole Plant
  misc_feature: MA Experiment ID: 20001504 Result: Up-regulated in Transcription
  misc_feature: MA Experiment 20001504 PARAMETER Experiment Name: At_Far-red-enriched_P Parameter: Age (day) Value: 10
  misc_feature: MA Experiment 20001504 PARAMETER Experiment Name: At_Far-red-enriched_P Parameter: Light Value: Far-red enriched vs. White
  misc_feature: MA Experiment 20001504 PARAMETER Experiment Name: At_Far-red-enriched_P Parameter: Organism Value: A. thaliana
  misc_feature: MA Experiment 20001504 PARAMETER Experiment Name: At_Far-red-enriched_P Parameter: Plant Line Value: Columbia
  misc_feature: MA Experiment 20001504 PARAMETER Experiment Name: At_Far-red-enriched_P Parameter: Timepoint (day) Value: 6
  misc_feature: MA Experiment 20001504 PARAMETER Experiment Name: At_Far-red-enriched_P Parameter: Tissue Value: Whole Plant
  misc_feature: MA Experiment ID: 20001556 Result: Down-regulated in Transcription
  misc_feature: MA Experiment 20001556 PARAMETER Experiment Name: At_Drought_Soil_Dry_P Parameter: Age (day) Value: 26
  misc_feature: MA Experiment 20001556 PARAMETER Experiment Name: At_Drought_Soil_Dry_P Parameter: Organism Value: A. thaliana
  misc_feature: MA Experiment 20001556 PARAMETER Experiment Name: At_Drought_Soil_Dry_P Parameter: Plant Line Value: WS
  misc_feature: MA Experiment 20001556 PARAMETER Experiment Name: At_Drought_Soil_Dry_P Parameter: Post Timepoint (hr) Value: None
  misc_feature: MA Experiment 20001556 PARAMETER Experiment Name: At_Drought_Soil_Dry_P Parameter: Post-Treatment Value: None
  misc_feature: MA Experiment 20001556 PARAMETER Experiment Name: At_Drought_Soil_Dry_P Parameter: Timepoint (day) Value: 12
  misc_feature: MA Experiment 20001556 PARAMETER Experiment Name: At_Drought_Soil_Dry_P Parameter: Treatment Value: Drought vs. No Drought
  misc_feature: MA Experiment ID: 20001557 Result: Down-regulated in Transcription
  misc_feature: MA Experiment 20001557 PARAMETER Experiment Name: At_Drought_Soil_Dry_P Parameter: Age (day) Value: 27
  misc_feature: MA Experiment 20001557 PARAMETER Experiment Name: At_Drought_Soil_Dry_P Parameter: Organism Value: A. thaliana
  misc_feature: MA Experiment 20001557 PARAMETER Experiment Name: At_Drought_Soil_Dry_P Parameter: Plant Line Value: WS
  misc_feature: MA Experiment 20001557 PARAMETER Experiment Name: At_Drought_Soil_Dry_P Parameter: Post Timepoint (hr) Value: 3
  misc_feature: MA Experiment 20001557 PARAMETER Experiment Name: At_Drought_Soil_Dry_P Parameter: Post-Treatment Value: Re-Water vs. No Drought
  misc_feature: MA Experiment 20001557 PARAMETER Experiment Name: At_Drought_Soil_Dry_P Parameter: Timepoint (day) Value: 13
  misc_feature: MA Experiment 20001557 PARAMETER Experiment Name: At_Drought_Soil_Dry_P Parameter: Treatment Value: Drought vs. No Drought
  misc_feature: MA Experiment ID: 20001558 Result: Down-regulated in Transcription
  misc_feature: MA Experiment 20001558 PARAMETER Experiment Name: At_Drought_Soil_Dry_P Parameter: Age (day) Value: 27
  misc_feature: MA Experiment 20001558 PARAMETER Experiment Name: At_Drought_Soil_Dry_P Parameter: Organism Value: A. thaliana
  misc_feature: MA Experiment 20001558 PARAMETER Experiment Name: At_Drought_Soil_Dry_P Parameter: Plant Line Value: WS
  misc_feature: MA Experiment 20001558 PARAMETER Experiment Name: At_Drought_Soil_Dry_P Parameter: Post Timepoint (hr) Value: 6
  misc_feature: MA Experiment 20001558 PARAMETER Experiment Name: At_Drought_Soil_Dry_P Parameter: Post-Treatment Value: Re-Water vs. No Drought
  misc_feature: MA Experiment 20001558 PARAMETER Experiment Name: At_Drought_Soil_Dry_P Parameter: Timepoint (day) Value: 13
  misc_feature: MA Experiment 20001558 PARAMETER Experiment Name: At_Drought_Soil_Dry_P Parameter: Treatment Value: Drought vs. No Drought
  misc_feature: MA Experiment ID: 20001559 Result: Down-regulated in Transcription
  misc_feature: MA Experiment 20001559 PARAMETER Experiment Name: At_Drought_Soil_Dry_P Parameter: Age (day) Value: 28
  misc_feature: MA Experiment 20001559 PARAMETER Experiment Name: At_Drought_Soil_Dry_P Parameter: Organism Value: A. thaliana
  misc_feature: MA Experiment 20001559 PARAMETER Experiment Name: At_Drought_Soil_Dry_P Parameter: Plant Line Value: WS
  misc_feature: MA Experiment 20001559 PARAMETER Experiment Name: At_Drought_Soil_Dry_P Parameter: Post Timepoint (hr) Value: 29
  misc_feature: MA Experiment 20001559 PARAMETER Experiment Name: At_Drought_Soil_Dry_P Parameter: Post-Treatment Value: Re-Water vs. No Drought
  misc_feature: MA Experiment 20001559 PARAMETER Experiment Name: At_Drought_Soil_Dry_P Parameter: Timepoint (day) Value: 14
  misc_feature: MA Experiment 20001559 PARAMETER Experiment Name: At_Drought_Soil_Dry_P Parameter: Treatment Value: Drought vs. No Drought
  misc_feature: MA Experiment ID: 20001560 Result: Down-regulated in Transcription
  misc_feature: MA Experiment 20001560 PARAMETER Experiment Name: At_Drought_Soil_Dry_P Parameter: Age (day) Value: 28
  misc_feature: MA Experiment 20001560 PARAMETER Experiment Name: At_Drought_Soil_Dry_P Parameter: Organism Value: A. thaliana
  misc_feature: MA Experiment 20001560 PARAMETER Experiment Name: At_Drought_Soil_Dry_P Parameter: Plant Line Value: WS
  misc_feature: MA Experiment 20001560 PARAMETER Experiment Name: At_Drought_Soil_Dry_P Parameter: Post Timepoint (hr) Value: None
  misc_feature: MA Experiment 20001560 PARAMETER Experiment Name: At_Drought_Soil_Dry_P Parameter: Post-Treatment Value: None
  misc_feature: MA Experiment 20001560 PARAMETER Experiment Name: At_Drought_Soil_Dry_P Parameter: Timepoint (day) Value: 14
  misc_feature: MA Experiment 20001560 PARAMETER Experiment Name: At_Drought_Soil_Dry_P Parameter: Treatment Value: Drought vs. No Drought
  misc_feature: MA Experiment ID: 20001768 Result: Up-regulated in Transcription
  misc_feature: MA Experiment 20001768 PARAMETER Experiment Name: At_Far-red-enriched-adult_P Parameter: Age (day) Value: 28
  misc_feature: MA Experiment 20001768 PARAMETER Experiment Name: At_Far-red-enriched-adult_P Parameter: Light Value: Far-red enriched vs. White
  misc_feature: MA Experiment 20001768 PARAMETER Experiment Name: At_Far-red-enriched-adult_P Parameter: Organism Value: A. thaliana
  misc_feature: MA Experiment 20001768 PARAMETER Experiment Name: At_Far-red-enriched-adult_P Parameter: Plant Line Value: Columbia
  misc_feature: MA Experiment 20001768 PARAMETER Experiment Name: At_Far-red-enriched-adult_P Parameter: Timepoint (hr) Value: 1
  misc_feature: MA Experiment 20001768 PARAMETER Experiment Name: At_Far-red-enriched-adult_P Parameter: Tissue Value: Aerial
  misc_feature: MA Experiment ID: 20001769 Result: Up-regulated in Transcription
  misc_feature: MA Experiment 20001769 PARAMETER Experiment Name: At_Far-red-enriched-adult_P Parameter: Age (day) Value: 28
  misc_feature: MA Experiment 20001769 PARAMETER Experiment Name: At_Far-red-enriched-adult_P Parameter: Light Value: Far-red enriched vs. White
  misc_feature: MA Experiment 20001769 PARAMETER Experiment Name: At_Far-red-enriched-adult_P Parameter: Organism Value: A. thaliana
  misc_feature: MA Experiment 20001769 PARAMETER Experiment Name: At_Far-red-enriched-adult_P Parameter: Plant Line Value: Columbia
  misc_feature: MA Experiment 20001769 PARAMETER Experiment Name: At_Far-red-enriched-adult_P Parameter: Timepoint (hr) Value: 4
  misc_feature: MA Experiment 20001769 PARAMETER Experiment Name: At_Far-red-enriched-adult_P Parameter: Tissue Value: Aerial
  misc_feature: MA Experiment ID: 20001770 Result: Up-regulated in Transcription
  misc_feature: MA Experiment 20001770 PARAMETER Experiment Name: At_Far-red-enriched-adult_P Parameter: Age (day) Value: 28
  misc_feature: MA Experiment 20001770 PARAMETER Experiment Name: At_Far-red-enriched-adult_P Parameter: Light Value: Far-red enriched vs. White
  misc_feature: MA Experiment 20001770 PARAMETER Experiment Name: At_Far-red-enriched-adult_P Parameter: Organism Value: A. thaliana
  misc_feature: MA Experiment 20001770 PARAMETER Experiment Name: At_Far-red-enriched-adult_P Parameter: Plant Line Value: Columbia
  misc_feature: MA Experiment 20001770 PARAMETER Experiment Name: At_Far-red-enriched-adult_P Parameter: Timepoint (hr) Value: 8
  misc_feature: MA Experiment 20001770 PARAMETER Experiment Name: At_Far-red-enriched-adult_P Parameter: Tissue Value: Aerial
  misc_feature: MA Experiment ID: 20001771 Result: Up-regulated in Transcription
  misc_feature: MA Experiment 20001771 PARAMETER Experiment Name: At_Far-red-enriched-adult_P Parameter: Age (day) Value: 28
  misc_feature: MA Experiment 20001771 PARAMETER Experiment Name: At_Far-red-enriched-adult_P Parameter: Light Value: Far-red enriched vs. White
  misc_feature: MA Experiment 20001771 PARAMETER Experiment Name: At_Far-red-enriched-adult_P Parameter: Organism Value: A. thaliana
  misc_feature: MA Experiment 20001771 PARAMETER Experiment Name: At_Far-red-enriched-adult_P Parameter: Plant Line Value: Columbia
  misc_feature: MA Experiment 20001771 PARAMETER Experiment Name: At_Far-red-enriched-adult_P Parameter: Timepoint (hr) Value: 16
  misc_feature: MA Experiment 20001771 PARAMETER Experiment Name: At_Far-red-enriched-adult_P Parameter: Tissue Value: Aerial
  misc_feature: MA Experiment ID: 20001773 Result: Up-regulated in Transcription
  misc_feature: MA Experiment 20001773 PARAMETER Experiment Name: At_Far-red-enriched-adult_P Parameter: Age (day) Value: 30
  misc_feature: MA Experiment 20001773 PARAMETER Experiment Name: At_Far-red-enriched-adult_P Parameter: Light Value: Far-red enriched vs. White
  misc_feature: MA Experiment 20001773 PARAMETER Experiment Name: At_Far-red-enriched-adult_P Parameter: Organism Value: A. thaliana
  misc_feature: MA Experiment 20001773 PARAMETER Experiment Name: At_Far-red-enriched-adult_P Parameter: Plant Line Value: Columbia
  misc_feature: MA Experiment 20001773 PARAMETER Experiment Name: At_Far-red-enriched-adult_P Parameter: Timepoint (hr) Value: 48
  misc_feature: MA Experiment 20001773 PARAMETER Experiment Name: At_Far-red-enriched-adult_P Parameter: Tissue Value: Aerial
  misc_feature: MA Experiment ID: 20001774 Result: Up-regulated in Transcription
  misc_feature: MA Experiment 20001774 PARAMETER Experiment Name: At_Far-red-enriched-adult_P Parameter: Age (day) Value: 31
  misc_feature: MA Experiment 20001774 PARAMETER Experiment Name: At_Far-red-enriched-adult_P Parameter: Light Value: Far-red enriched vs. White
  misc_feature: MA Experiment 20001774 PARAMETER Experiment Name: At_Far-red-enriched-adult_P Parameter: Organism Value: A. thaliana
  misc_feature: MA Experiment 20001774 PARAMETER Experiment Name: At_Far-red-enriched-adult_P Parameter: Plant Line Value: Columbia
  misc_feature: MA Experiment 20001774 PARAMETER Experiment Name: At_Far-red-enriched-adult_P Parameter: Timepoint (hr) Value: 72
  misc_feature: MA Experiment 20001774 PARAMETER Experiment Name: At_Far-red-enriched-adult_P Parameter: Tissue Value: Aerial
  misc_feature: MA Experiment ID: 20001904 Result: Down-regulated in Transcription
  misc_feature: MA Experiment 20001904 PARAMETER Experiment Name: At_Drought_Reproduction_P Parameter: Age (day) Value: 37
  misc_feature: MA Experiment 20001904 PARAMETER Experiment Name: At_Drought_Reproduction_P Parameter: Organism Value: A. thaliana
  misc_feature: MA Experiment 20001904 PARAMETER Experiment Name: At_Drought_Reproduction_P Parameter: Plant Line Value: WS
  misc_feature: MA Experiment 20001904 PARAMETER Experiment Name: At_Drought_Reproduction_P Parameter: Timepoint (day) Value: 7
  misc_feature: MA Experiment 20001904 PARAMETER Experiment Name: At_Drought_Reproduction_P Parameter: Tissue Value: Rosettes
  misc_feature: MA Experiment 20001904 PARAMETER Experiment Name: At_Drought_Reproduction_P Parameter: Treatment Value: Drought vs. No Drought
cttcaactgctgcgtctagctgtccttccttcttcatttgcttcttcttctctagctcagcgcggatcgctgcagtagtaccctgacgtagcctttcttcttcctttactttctcatcttctatctctcaaaagaaaagcagacaactttatttgcaaaaacagagtttttttttcttatcttgagaaagttcaacagaagatgatgttcgagaaagacgatctgggtctaagcttaggcttgaattttccaaagaaacagatcaatctcaaatcaaatccatctgtttctgttactccttcttcttcttcttttggattattcagaagatcttcatggaacgagagttttacttcttcagttccaaactcagattcgtcacaaaaagaaacaagaactttcatccgaggaatcgacgtgaacagaccaccgtctacagcggaatacggcgacgaagacgctggagtatcttcacctaacagtacagtctcaagctctacagggaaaagaagcgagagagaagaagacacagatccacaaggctcaagaggaatcagtgacgatgaagatggtgataactccaggaaaaagcttagactttccaaagatcaatctgctattcttgaagagaccttcaaagatcacagtactctcaatccgaagcagaagcaagcattggctaaacaattagggttacgagcaagacaagtggaagtttggtttcagaacagacgagcaagaacaaagctgaagcaaacggaggtagactgcgagttcttacggagatgctgcgagaatctaacggaagagaaccgtcggctacaaaaagaagtaacggaattgagagtacttaagctctctcctcagttctacatgcacatgagcccacccactactttgaccatgtgcccttcatgtgaacacgtgtcggtcccgccaccacaacctcaggctgctacgtcagcgcaccaccggtcgttgccggtcaatgcgtgggctcctgctacgaggatatctcacggcttgacttttgacgctcttcgtcctaggtcctaagtctttttacttgcaaccaaagggcattttggtcgttttttaagtttcatggaccagatatgcatgtagttgttaacatgtatgtattttcttag

SEQ ID NO: 76682 - protein, 284 aa, Arabidopsis thaliana
  peptide (1)..(284): Ceres Seq. ID no. 7108845
  misc_feature (1)..(109): Pfam Name: HD-ZIP protein N terminus Pfam Description: HD-ZIP protein N terminus
  misc_feature (1)..(284): Homolog of NCBI NO: 22759 NR Description: HAT4 [Arabidopsis thaliana]
  misc_feature (1)..(284): Homolog of NCBI NO: 15235882 NR Description: homeobox-leucine zipper protein HAT4 (HD-Zip
  misc_feature (1)..(284): Homolog of NCBI NO: 8919876 NR Description: hypothetical protein [Capsella rubella]
MMFEKDDLGLSLGLNFPKKQINLKSNPSVSVTPSSSSFGLFRRSSWNESFTSSVPNSDSSQKETRTFIRGIDVNRPPSTAEYGDEDAGVSSPNSTVSSSTGKRSEREEDTDPQGSRGISDDEDGDNSRKKLRLSKDQSAILEETFKDHSTLNPKQKQALAKQLGLRARQVEVWFQNRRARTKLKQTEVDCEFLRRCCENLTEENRRLQKEVTELRVLKLSPQFYMHMSPPTTLTMCPSCEHVSVPPPQPQAATSAHHRSLPVNAWAPATRISHGLTFDALRPRS

SEQ ID NO: 76683 - protein, 283 aa, Arabidopsis thaliana
  peptide (1)..(283): Ceres Seq. ID no. 7108846
  misc_feature (1)..(108): Pfam Name: HD-ZIP protein N terminus Pfam Description: HD-ZIP protein N terminus
  misc_feature (1)..(283): Homolog of NCBI NO: 22759 NR Description: HAT4 [Arabidopsis thaliana]
  misc_feature (1)..(283): Homolog of NCBI NO: 15235882 NR Description: homeobox-leucine zipper protein HAT4 (HD-Zip
  misc_feature (1)..(283): Homolog of NCBI NO: 8919876 NR Description: hypothetical protein [Capsella rubella]
MFEKDDLGLSLGLNFPKKQINLKSNPSVSVTPSSSSFGLFRRSSWNESFTSSVPNSDSSQKETRTFIRGIDVNRPPSTAEYGDEDAGVSSPNSTVSSSTGKRSEREEDTDPQGSRGISDDEDGDNSRKKLRLSKDQSAILEETFKDHSTLNPKQKQALAKQLGLRARQVEVWFQNRRARTKLKQTEVDCEFLRRCCENLTEENRRLQKEVTELRVLKLSPQFYMHMSPPTTLTMCPSCEHVSVPPPQPQAATSAHHRSLPVNAWAPATRISHGLTFDALRPRS

SEQ ID NO: 76684 - DNA, 838 bp, Arabidopsis thaliana
  misc_feature (1)..(838): Ceres Seq. ID no. 7108852
  misc_feature: MA Experiment ID: 108434 Result: Up-regulated in Transcription
  misc_feature: MA Experiment 108434 PARAMETER Experiment Name: At_Root_Tips_cDNA_P Parameter: Tissue Value: Root Tips
  misc_feature: Pfam Name: Pro_isomerase Pfam Description: Cyclophilin type peptidyl-prolyl cis-trans isomerase/CLD
gtcgacccacgcgtccgcaatcttcttcatcgatttctctcttccaaatctcccaaaagatgtcgaaccctagagttttcttcgacatgagtctcagcggtactcccatcggacggatcgagatggagcttttcgctgatacaaccccaaacacggcggagaatttccgtgctctctgtaccggcgagaaaggaatgggaaagctaggtaagccacttcacttcaaaggatcgatcttccaccgtgtgattcccggattcatgtgtcaaggaggtgatttcaccgccaagaacggaaccggtggtgaatcgatctacggtgctaagttcaaggacgagaactttatcaagaagcatacaggagctgggattctctcaatggctaactctggtcctaacactaacggatctcagttcttcatctgtaccgataagacgtcgtggttagatggtaagcacgttgtgtttggacaagttgttaaaggcttggacgtcgtgaaggcgattgagaaagttggatctgattctggaaagacttccaaagtcgttaccatcactgattgtggtcagctttcttagatctgagtgagaaagtgagagactttgatctttatgagtaataatggtgtcttttgctttcggttgttcttcctcttaccttaatggattattctgtttagggtttgagttttcgtttcagagtttgtaacaaaacccttttgtgttttctggggtttgaaataattatgagcttacccaattgcttctttgtgtttttgcttctatgaacaagtagtaactgattcgtcttctgattcttcaactgaatcgtgaatctt

SEQ ID NO: 76685 - protein, 191 aa, Arabidopsis thaliana
  peptide (1)..(191): Ceres Seq. ID no. 7108853
  misc_feature: Pfam Name: Pro_isomerase Pfam Description: Cyclophilin type peptidyl-prolyl cis-trans isomerase/CLD
  misc_feature (20)..(191): Homolog of NCBI NO: 15236211 NR Description: peptidylprolyl isomerase (cyclophilin); protein At4g34870.1, supported by cDNA: 37., supported by cDNA: supported by cDNA: gi_460967 [Arabidopsis thaliana]
  misc_feature (20)..(191): Homolog of NCBI NO: 3334157 NR Description: Peptidyl-prolyl cis-trans isomerase (PPIase)
  misc_feature (20)..(190): Homolog of NCBI NO: 11270316 NR Description: peptidylprolyl isomerase (EC 5.2.1.8) - Digitalis lanata >gi|1563719|emb|CAA69622.1| cyclophylin
  misc_feature (21)..(191): Homolog of NCBI NO: 18076088 NR Description: cyclophilin [Ricinus communis]
  misc_feature (20)..(190): Homolog of NCBI NO: 11270322 NR Description: peptidylprolyl isomerase (EC 5.2.1.8) - potato >gi|4559302|gb|AAD22975.1|AF126551_1 cyclophilin
  misc_feature (21)..(191): Homolog of NCBI NO: 21886603 NR Description: peptidylprolyl isomerase (cyclophilin) [Betula
  misc_feature (20)..(191): Homolog of NCBI NO: 18146786 NR Description: CYP1 [Vigna radiata]
  misc_feature (20)..(190): Homolog of NCBI NO: 11270318 NR Description: peptidylprolyl isomerase (EC 5.2.1.8) CYP18 - Digitalis lanata >gi|1561575|emb|CAA69598.1| cyclophilin
  misc_feature (20)..(191): Homolog of NCBI NO: 1076510 NR Description: peptidylprolyl isomerase (EC 5.2.1.8) Cyp -
  misc_feature (20)..(191): Homolog of NCBI NO: 29124975 NR Description: cyclophilin [Populus tremuloides]
RPTRPQSSSSISLFQISQKMSNPRVFFDMSLSGTPIGRIEMELFADTTPNTAENFRALCTGEKGMGKLGKPLHFKGSIFHRVIPGFMCQGGDFTAKNGTGGESIYGAKFKDENFIKKHTGAGILSMANSGPNTNGSQFFICTDKTSWLDGKHVVFGQVVKGLDVVKAIEKVGSDSGKTSKVVTITDCGQLS

SEQ ID NO: 76686 - protein, 172 aa, Arabidopsis thaliana; identical to SEQ ID NO: 25632
  peptide (1)..(172): Ceres Seq. ID no. 7108854
  misc_feature: Pfam Name: Pro_isomerase Pfam Description: Cyclophilin type peptidyl-prolyl cis-trans isomerase/CLD
  misc_feature (1)..(172): Homolog of NCBI NO: 15236211 NR Description: peptidylprolyl isomerase (cyclophilin); protein At4g34870.1, supported by cDNA: 37., supported by cDNA: supported by cDNA: gi_460967 [Arabidopsis thaliana]
  misc_feature (1)..(172): Homolog of NCBI NO: 3334157 NR Description: Peptidyl-prolyl cis-trans isomerase (PPIase)
  misc_feature (1)..(171): Homolog of NCBI NO: 11270316 NR Description: peptidylprolyl isomerase (EC 5.2.1.8) - Digitalis lanata >gi|1563719|emb|CAA69622.1| cyclophylin
  misc_feature (2)..(172): Homolog of NCBI NO: 18076088 NR Description: cyclophilin [Ricinus communis]
  misc_feature (1)..(171): Homolog of NCBI NO: 11270322 NR Description: peptidylprolyl isomerase (EC 5.2.1.8) - potato >gi|4559302|gb|AAD22975.1|AF126551_1 cyclophilin
  misc_feature (2)..(172): Homolog of NCBI NO: 21886603 NR Description: peptidylprolyl isomerase (cyclophilin) [Betula
  misc_feature (1)..(172): Homolog of NCBI NO: 18146786 NR Description: CYP1 [Vigna radiata]
  misc_feature (1)..(171): Homolog of NCBI NO: 11270318 NR Description: peptidylprolyl isomerase (EC 5.2.1.8) CYP18 - Digitalis lanata >gi|1561575|emb|CAA69598.1| cyclophilin
  misc_feature (1)..(172): Homolog of NCBI NO: 1076510 NR Description: peptidylprolyl isomerase (EC 5.2.1.8) Cyp -
  misc_feature (1)..(172): Homolog of NCBI NO: 29124975 NR Description: cyclophilin [Populus tremuloides]

SEQ ID NO: 76687 - protein, 163 aa, Arabidopsis thaliana; identical to SEQ ID NO: 25633
  peptide (1)..(163): Ceres Seq. ID no. 7108855
  misc_feature: Pfam Name: Pro_isomerase Pfam Description: Cyclophilin type peptidyl-prolyl cis-trans isomerase/CLD
  misc_feature (1)..(163): Homolog of NCBI NO: 15236211 NR Description: peptidylprolyl isomerase (cyclophilin); protein At4g34870.1, supported by cDNA: 37., supported by cDNA: supported by cDNA: gi_460967 [Arabidopsis thaliana]
  misc_feature (1)..(163): Homolog of NCBI NO: 3334157 NR Description: Peptidyl-prolyl cis-trans isomerase (PPIase)
  misc_feature (1)..(162): Homolog of NCBI NO: 11270316 NR Description: peptidylprolyl isomerase (EC 5.2.1.8) - Digitalis lanata >gi|1563719|emb|CAA69622.1| cyclophylin
  misc_feature (1)..(163): Homolog of NCBI NO: 18076088 NR Description: cyclophilin [Ricinus communis]
  misc_feature (1)..(162): Homolog of NCBI NO: 11270322 NR Description: peptidylprolyl isomerase (EC 5.2.1.8) - potato >gi|4559302|gb|AAD22975.1|AF126551_1 cyclophilin
  misc_feature (1)..(163): Homolog of NCBI NO: 21886603 NR Description: peptidylprolyl isomerase (cyclophilin) [Betula
  misc_feature (1)..(163): Homolog of NCBI NO: 18146786 NR Description: CYP1 [Vigna radiata]
  misc_feature (1)..(162): Homolog of NCBI NO: 11270318 NR Description: peptidylprolyl isomerase (EC 5.2.1.8) CYP18 - Digitalis lanata >gi|1561575|emb|CAA69598.1| cyclophilin
  misc_feature (1)..(163): Homolog of NCBI NO: 1076510 NR Description: peptidylprolyl isomerase (EC 5.2.1.8) Cyp -
  misc_feature (1)..(163): Homolog of NCBI NO: 29124975 NR Description: cyclophilin [Populus tremuloides]

SEQ ID NO: 76688 - DNA, 715 bp, Arabidopsis thaliana
  misc_feature (1)..(715): Ceres Seq. ID no. 7108888
  misc_feature: MA Experiment ID: 108488 Result: Down-regulated in Transcription
  misc_feature: MA Experiment ID: 108595 Result: Up-regulated in Transcription
  misc_feature: MA Experiment 108595 PARAMETER Experiment Name: At_Ler-pi_Ovule_cDNA_P Parameter: Plant Line Value: null
  misc_feature: MA Experiment ID: 20000069 Result: Up-regulated in Transcription
  misc_feature: MA Experiment 20000069 PARAMETER Experiment Name: At_100uM_ABA_Mutants_cDNA_P Parameter: Plant Line Value: CS23
  misc_feature: MA Experiment 20000069 PARAMETER Experiment Name: At_100uM_ABA_Mutants_cDNA_P Parameter: Timepoint (hr) Value: 6
  misc_feature: MA Experiment 20000069 PARAMETER Experiment Name: At_100uM_ABA_Mutants_cDNA_P Parameter: Tissue Value: Aerial
  misc_feature: MA Experiment 20000069 PARAMETER Experiment Name: At_100uM_ABA_Mutants_cDNA_P Parameter: Treatment Value: 100uM ABA vs. No Treatment
  misc_feature: MA Experiment ID: 20000070 Result: Up-regulated in Transcription
  misc_feature: MA Experiment 20000070 PARAMETER Experiment Name: At_100uM_ABA_Mutants_cDNA_P Parameter: Plant Line Value: CS24
  misc_feature: MA Experiment 20000070 PARAMETER Experiment Name: At_100uM_ABA_Mutants_cDNA_P Parameter: Timepoint (hr) Value: 6
  misc_feature: MA Experiment 20000070 PARAMETER Experiment Name: At_100uM_ABA_Mutants_cDNA_P Parameter: Tissue Value: Aerial
  misc_feature: MA Experiment 20000070 PARAMETER Experiment Name: At_100uM_ABA_Mutants_cDNA_P Parameter: Treatment Value: 100uM ABA vs. No Treatment
  misc_feature: MA Experiment ID: 20000071 Result: Up-regulated in Transcription
  misc_feature: MA Experiment 20000071 PARAMETER Experiment Name: At_100uM_ABA_Mutants_cDNA_P Parameter: Plant Line Value: CS8104
  misc_feature: MA Experiment 20000071 PARAMETER Experiment Name: At_100uM_ABA_Mutants_cDNA_P Parameter: Timepoint (hr) Value: 6
  misc_feature: MA Experiment 20000071 PARAMETER Experiment Name: At_100uM_ABA_Mutants_cDNA_P Parameter: Tissue Value: Aerial
  misc_feature: MA Experiment 20000071 PARAMETER Experiment Name: At_100uM_ABA_Mutants_cDNA_P Parameter: Treatment Value: 100uM ABA vs. No Treatment
  misc_feature: MA Experiment ID: 20000072 Result: Up-regulated in Transcription
  misc_feature: MA Experiment 20000072 PARAMETER Experiment Name: At_100uM_ABA_Mutants_cDNA_P Parameter: Plant Line Value: CS8105
  misc_feature: MA Experiment 20000072 PARAMETER Experiment Name: At_100uM_ABA_Mutants_cDNA_P Parameter: Timepoint (hr) Value: 6
  misc_feature: MA Experiment 20000072 PARAMETER Experiment Name: At_100uM_ABA_Mutants_cDNA_P Parameter: Tissue Value: Aerial
  misc_feature: MA Experiment 20000072 PARAMETER Experiment Name: At_100uM_ABA_Mutants_cDNA_P Parameter: Treatment Value: 100uM ABA vs. No Treatment
  misc_feature: MA Experiment ID: 20000086 Result: Up-regulated in Transcription
  misc_feature: MA Experiment 20000086 PARAMETER Experiment Name: At_100uM_ABA_Mutants_cDNA_P Parameter: Plant Line Value: CS22
  misc_feature: MA Experiment 20000086 PARAMETER Experiment Name: At_100uM_ABA_Mutants_cDNA_P Parameter: Timepoint (hr) Value: 6
  misc_feature: MA Experiment 20000086 PARAMETER Experiment Name: At_100uM_ABA_Mutants_cDNA_P Parameter: Tissue Value: Aerial
  misc_feature: MA Experiment 20000086 PARAMETER Experiment Name: At_100uM_ABA_Mutants_cDNA_P Parameter: Treatment Value: 100uM ABA vs. No Treatment
  misc_feature: MA Experiment ID: 20000087 Result: Up-regulated in Transcription
  misc_feature: MA Experiment 20000087 PARAMETER Experiment Name: At_100uM_ABA_Mutants_cDNA_P Parameter: Plant Line Value: WS
  misc_feature: MA Experiment 20000087 PARAMETER Experiment Name: At_100uM_ABA_Mutants_cDNA_P Parameter: Timepoint (hr) Value: 6
  misc_feature: MA Experiment 20000087 PARAMETER Experiment Name: At_100uM_ABA_Mutants_cDNA_P Parameter: Tissue Value: Aerial
  misc_feature: MA Experiment 20000087 PARAMETER Experiment Name: At_100uM_ABA_Mutants_cDNA_P Parameter: Treatment Value: 100uM ABA vs. No Treatment
  misc_feature: MA Experiment ID: 20000088 Result: Up-regulated in Transcription
  misc_feature: MA Experiment 20000088 PARAMETER Experiment Name: At_100uM_ABA_Mutants_cDNA_P Parameter: Plant Line Value: Landsberg
  misc_feature: MA Experiment 20000088 PARAMETER Experiment Name: At_100uM_ABA_Mutants_cDNA_P Parameter: Timepoint (hr) Value: 6
  misc_feature: MA Experiment 20000088 PARAMETER Experiment Name: At_100uM_ABA_Mutants_cDNA_P Parameter: Tissue Value: Aerial
  misc_feature: MA Experiment 20000088 PARAMETER Experiment Name: At_100uM_ABA_Mutants_cDNA_P Parameter: Treatment Value: 100uM ABA vs. No Treatment
  misc_feature: MA Experiment ID: 20000089 Result: Up-regulated in Transcription
  misc_feature: MA Experiment ID: 20000090 Result: Up-regulated in Transcription
  misc_feature: MA Experiment ID: 20000184 Result: Down-regulated in Transcription
  misc_feature: MA Experiment 20000184 PARAMETER Experiment Name: At_Shoots__P Parameter: Age (day) Value: 7
  misc_feature: MA Experiment 20000184 PARAMETER Experiment Name: At_Shoots__P Parameter: Tissue Value: Shoots vs. Whole Plant
  misc_feature: MA Experiment ID: 20000438 Result: Down-regulated in Transcription
  misc_feature: MA Experiment 20000438 PARAMETER Experiment Name: At_Shoots__P Parameter: Age (day) Value: 14
  misc_feature: MA Experiment 20000438 PARAMETER Experiment Name: At_Shoots__P Parameter: Tissue Value: Shoots vs. Whole Plant
gtataattgtttttgtcggtcgctaagatattttcacagcttcggagacttcaggaaaaaaaaaaatcatttcttctctgaaacgaaaaaccaaagaaacgagaagaagaagctatggcggatcagctaactgatgaacagatctctgagtttaaggaagcttttagcctcttcgacaaagatggagatggttgcatcaccacaaaggagctgggaacagtgatgcggtcactagggcagaacccaacagaagctgagctacaagacatgatcaacgaggttgacgctgatggaaacggaaccattgacttccctgagttcttaaacctaatggctaaaaagatgaaggacacagactcggaggaagagctgaaagaagctttcagggtgttcgacaaagaccagaacggtttcatatccgctgcagagcttcgccatgtgatgacgaatctaggtgagaaactgactgatgaagaggtcgaggagatgattcgtgaagcagatgttgatggagatggtcagataaactacgaggagtttgtcaagattatgatggctaagtgatgatgataagaaaaaaatgaagaataaaagtggtgatgtgatgaccttttaggcttttactatctacaaaagaatgattcgacctttaatgtcttgggtttgatttgagcctagtagtttcttaaggttttaacagactgaatttgtgact

SEQ ID NO: 76689 - protein, 149 aa, Arabidopsis thaliana; identical to SEQ ID NO: 27678
  peptide (1)..(149): Ceres Seq. ID no. 7108889
  misc_feature (12)..(40): Pfam Name: EF hand Pfam Description: EF hand
  misc_feature (1)..(149): Homolog of NCBI NO: 15219652 NR Description: calmodulin-4; protein id: At1g66410.1, supported cDNA: 6982., supported by cDNA: gi_13878060, supported by cDNA:
  misc_feature (1)..(149): Homolog of NCBI NO: 479693 NR Description: calmodulin 4 - Arabidopsis thaliana
  misc_feature (1)..(149): Homolog of NCBI NO: 115515 NR Description: Calmodulin >gi|71683|pir||MCAA calmodulin -
  misc_feature (1)..(149): Homolog of NCBI NO: 2809481 NR Description: calmodulin [Oryza sativa]
  misc_feature (1)..(149): Homolog of NCBI NO: 20186 NR Description: calmodulin [Oryza sativa] calmodulin [Zea mays] >gi|4103961|gb|AAD10246.1| calmodulin
  misc_feature (1)..(149): Homolog of NCBI NO: 15229784 NR Description: calmodulin 7; protein id: At3g43810.1, supported cDNA: 7008., supported by cDNA: gi_5825597 [Arabidopsis thaliana]
  misc_feature (1)..(149): Homolog of NCBI NO: 34304715 NR Description: calmodulin 4 [Daucus carota]
  misc_feature (1)..(149): Homolog of NCBI NO: 1076793 NR Description: calmodulin cam2 - maize
  misc_feature (1)..(149): Homolog of NCBI NO: 3121848 NR Description: CALMODULIN >gi|1835521|gb|AAB46588.1| calmodulin annuum] >gi|7643792|gb|AAF65511.1| calmodulin [Capsicum annuum]
  misc_feature (3)..(149): Homolog of NCBI NO: 29150153 NR Description: calcium-sensing GFP analog [synthetic construct]

SEQ ID NO: 76690 - protein, 113 aa, Arabidopsis thaliana; identical to SEQ ID NO: 27679
  peptide (1)..(113): Ceres Seq. ID no. 7108890
  misc_feature (1)..(113): Homolog of NCBI NO: 15219652 NR Description: calmodulin-4; protein id: At1g66410.1, supported cDNA: 6982., supported by cDNA: gi_13878060, supported by cDNA:
  misc_feature (1)..(113): Homolog of NCBI NO: 479693 NR Description: calmodulin 4 - Arabidopsis thaliana
  misc_feature (1)..(113): Homolog of NCBI NO: 115515 NR Description: Calmodulin >gi|71683|pir||MCAA calmodulin -
  misc_feature (1)..(113): Homolog of NCBI NO: 2809481 NR Description: calmodulin [Oryza sativa]
  misc_feature (1)..(113): Homolog of NCBI NO: 20186 NR Description: calmodulin [Oryza sativa] calmodulin [Zea mays] >gi|4103961|gb|AAD10246.1| calmodulin
  misc_feature (1)..(113): Homolog of NCBI NO: 15229784 NR Description: calmodulin 7; protein id: At3g43810.1, supported cDNA: 7008., supported by cDNA: gi_5825597 [Arabidopsis thaliana]
  misc_feature (1)..(113): Homolog of NCBI NO: 34304715 NR Description: calmodulin 4 [Daucus carota]
  misc_feature (1)..(113): Homolog of NCBI NO: 1076793 NR Description: calmodulin cam2 - maize
  misc_feature (1)..(113): Homolog of NCBI NO: 3121848 NR Description: CALMODULIN >gi|1835521|gb|AAB46588.1| calmodulin annuum] >gi|7643792|gb|AAF65511.1| calmodulin [Capsicum annuum]
  misc_feature (1)..(113): Homolog of NCBI NO: 29150153 NR Description: calcium-sensing GFP analog [synthetic construct]

SEQ ID NO: 76691 - protein, 98 aa, Arabidopsis thaliana; identical to SEQ ID NO: 27680
  peptide (1)..(98): Ceres Seq. ID no. 7108891
  misc_feature (1)..(98): Homolog of NCBI NO: 15219652 NR Description: calmodulin-4; protein id: At1g66410.1, supported cDNA: 6982., supported by cDNA: gi_13878060, supported by cDNA:
  misc_feature (1)..(98): Homolog of NCBI NO: 479693 NR Description: calmodulin 4 - Arabidopsis thaliana
  misc_feature (1)..(98): Homolog of NCBI NO: 115515 NR Description: Calmodulin >gi|71683|pir||MCAA calmodulin -
  misc_feature (1)..(98): Homolog of NCBI NO: 2809481 NR Description: calmodulin [Oryza sativa]
  misc_feature (1)..(98): Homolog of NCBI NO: 20186 NR Description: calmodulin [Oryza sativa] calmodulin [Zea mays] >gi|4103961|gb|AAD10246.1| calmodulin
  misc_feature (1)..(98): Homolog of NCBI NO: 15229784 NR Description: calmodulin 7; protein id: At3g43810.1, supported cDNA: 7008., supported by cDNA: gi_5825597 [Arabidopsis thaliana]
  misc_feature (1)..(98): Homolog of NCBI NO: 34304715 NR Description: calmodulin 4 [Daucus carota]
  misc_feature (1)..(98): Homolog of NCBI NO: 1076793 NR Description: calmodulin cam2 - maize
  misc_feature (1)..(98): Homolog of NCBI NO: 3121848 NR Description: CALMODULIN >gi|1835521|gb|AAB46588.1| calmodulin annuum] >gi|7643792|gb|AAF65511.1| calmodulin [Capsicum annuum]
  misc_feature (1)..(98): Homolog of NCBI NO: 29150153 NR Description: calcium-sensing GFP analog [synthetic construct]

SEQ ID NO: 76692 - DNA, 1438 bp, Arabidopsis thaliana
  misc_feature (1)..(1438): Ceres Seq. ID no. 11023447
  misc_feature: MA Experiment ID: 20000315 Result: Down-regulated in Transcription
  misc_feature: MA Experiment 20000315 PARAMETER Experiment Name: At_14day_Shoots-Roots_Sub_P Parameter: Age (day) Value: 14
  misc_feature: MA Experiment 20000315 PARAMETER Experiment Name: At_14day_Shoots-Roots_Sub_P Parameter: Organism Value: A. thaliana
  misc_feature: MA Experiment 20000315 PARAMETER Experiment Name: At_14day_Shoots-Roots_Sub_P Parameter: Plant Line Value: WS
  misc_feature: MA Experiment 20000315 PARAMETER Experiment Name: At_14day_Shoots-Roots_Sub_P Parameter: Tissue Value: Shoots vs. Whole Plant
ttccccccgaaaaacgcagagctgagctgagttacataagatcgagagaattcgcaaactcgtttcttcattcgtcttcgtctttcgccatggctgctctacaatacttggaatctctgaaaaatacgcatccagagctcggcgaatggtacaattcccttgcagatctgtatcagaaaaagctctggcatcaactcacccttaagctcgaacagttcatcgctctcgctgtctttcaggctggtgatgctttgattcagttctatcacaatttcatcactgactttgagacgaagatcaatcttctgaagcttgcgcattttgctgtggtggtctctcgacagtactctgagaaagaagctgcagttagctatcttgaaagcgtgattgagaaacttagagctactaaagagcctaggattactgaaccaatcatttatattgaaacacaaaaagctttattcaagcttgagcaaggtgatcagaaggagtgcaaaaaaatcttggacgatggaaagagctctcttgatagtatgactgacattgatccatcagtctatgccaacttctattgggtgtcttctcagtaccataagtgccgtcaagaattttctgatttctacaaaagtgctctgctttatcttgcatacacgtctgtggaggacctttcagaatcgtttaagctggatttggctttcgatttgtcactatcagctctacttggggagaacatctataactttggggaactgttagcccatcccattttgaaaagtctccttggaacaaatgtggaatggctctaccacattctacaggcattcaaccatggtgatttagttcagtatcaagaactatgccgtgtgcacaacgcatccttgattgctcaaccagcacttgttgagaacgagaagaagcttttggaaaagatcaacattctctgccttatcgagatcatcttcagccgacccgctgaagatagaaccattcctttgagcatcatcgctgagcgtactaaactttccattgaagatgttgagcaccttctcatgaagagcctttctgtgcatttgatcgagggcatcatagaccaagtgaacggaacaatttatgtctcatgggcgcaaccgagagtactagggattccacagatcaaggctttgagggatcaattagacagttgggttgacaaagttcacaccactttactatctgttgaagccgagacaccagatcttgttgcagcataagagaaaagaaaaccttcttcctccttttgaagctactgaatgtaaaacaccatcttctctgggattagattcaagttttttatttcagtcgtagaagaaattacaattgctttttaatcttttgacttccatttcaagatgtccgaaatttcagttctacatttagactattttcatacattttttct

SEQ ID NO: 76693 - protein, 415 aa, Arabidopsis thaliana
  peptide (1)..(415): Ceres Seq. ID no. 11023448
  misc_feature (265)..(373): Pfam Name: PCI domain Pfam Description: PCI domain
  misc_feature (30)..(415): Homolog of NCBI NO: 22327608 NR Description: 26S proteasome regulatory subunit (RPN9), protein id: At5g45620.1, supported by cDNA: gi_20260473
  misc_feature (30)..(415): Homolog of NCBI NO: 30684612 NR Description: 26S proteasome regulatory subunit (RPN9) -related thaliana] >gi|26450594|dbj|BAC42409.1| unknown protein
  misc_feature (30)..(354): Homolog of NCBI NO: 9758666 NR Description: 26S proteasome subunit-like protein [Arabidopsis
  misc_feature (32)..(415): Homolog of NCBI NO: 34914614 NR Description: putative 26S proteasome subunit [Oryza sativa
  misc_feature (135)..(415): Homolog of NCBI NO: 17298163 NR Description: 26S proteasome regulatory particle non-ATPase
  misc_feature (44)..(413): Homolog of NCBI NO: 29612578 NR Description: Similar to proteasome (prosome, macropain) 26S
  misc_feature (35)..(413): Homolog of NCBI NO: 3618343 NR Description: 26S proteasome subunit p40.5 [Homo sapiens]
  misc_feature (35)..(413): Homolog of NCBI NO: 28872728 NR Description: proteasome 26S non-ATPase subunit 13 isoform 1; proteasome subunit p40.5; 26S proteasome regulatory subunit S11
  misc_feature (35)..(413): Homolog of NCBI NO: 32880133 NR Description: proteasome (prosome, macropain) 26S subunit,
  misc_feature (35)..(413): Homolog of NCBI NO: 3746882 NR Description: 26S proteasome subunit 11 [Homo sapiens]
PPEKRRAELSYIRSREFANSFLHSSSSFAMAALQYLESLKNTHPELGEWYNSLADLYQKKLWHQLTLKLEQFIALAVFQAGDALIQFYHNFITDFETKINLLKLAHFAVVVSRQYSEKEAAVSYLESVIEKLRATKEPRITEPIIYIETQKALFKLEQGDQKECKKILDDGKSSLDSMTDIDPSVYANFYWVSSQYHKCRQEFSDFYKSALLYLAYTSVEDLSESFKLDLAFDLSLSALLGENIYNFGELLAHPILKSLLGTNVEWLYHILQAFNHGDLVQYQELCRVHNASLIAQPALVENEKKLLEKINILCLIEIIFSRPAEDRTIPLSIIAERTKLSIEDVEHLLMKSLSVHLIEGIIDQVNGTIYVSWAQPRVLGIPQIKALRDQLDSWVDKVHTTLLSVEAETPDLVAA

SEQ ID NO: 76694 - protein, 386 aa, Arabidopsis thaliana; identical to SEQ ID NO: 49844
  peptide (1)..(386): Ceres Seq. ID no. 11023449
  misc_feature (236)..(344): Pfam Name: PCI domain Pfam Description: PCI domain
  misc_feature (1)..(386): Homolog of NCBI NO: 22327608 NR Description: 26S proteasome regulatory subunit (RPN9), protein id: At5g45620.1, supported by cDNA: gi_20260473
  misc_feature (1)..(386): Homolog of NCBI NO: 30684612 NR Description: 26S proteasome regulatory subunit (RPN9) -related thaliana] >gi|26450594|dbj|BAC42409.1| unknown protein
  misc_feature (1)..(325): Homolog of NCBI NO: 9758666 NR Description: 26S proteasome subunit-like protein [Arabidopsis
  misc_feature (3)..(386): Homolog of NCBI NO: 34914614 NR Description: putative 26S proteasome subunit [Oryza sativa
  misc_feature (106)..(386): Homolog of NCBI NO: 17298163 NR Description: 26S proteasome regulatory particle non-ATPase
  misc_feature (15)..(384): Homolog of NCBI NO: 29612578 NR Description: Similar to proteasome (prosome, macropain) 26S
  misc_feature (6)..(384): Homolog of NCBI NO: 3618343 NR Description: 26S proteasome subunit p40.5 [Homo sapiens]
  misc_feature (6)..(384): Homolog of NCBI NO: 28872728 NR Description: proteasome 26S non-ATPase subunit 13 isoform 1; proteasome subunit p40.5; 26S proteasome regulatory subunit S11
  misc_feature (6)..(384): Homolog of NCBI NO: 32880133 NR Description: proteasome (prosome, macropain) 26S subunit,
  misc_feature (6)..(384): Homolog of NCBI NO: 3746882 NR Description: 26S proteasome subunit 11 [Homo sapiens]

SEQ ID NO: 76695 - protein, 238 aa, Arabidopsis thaliana; identical to SEQ ID NO: 49845
  peptide (1)..(238): Ceres Seq. ID no. 11023450
  misc_feature (88)..(196): Pfam Name: PCI domain Pfam Description: PCI domain
  misc_feature (1)..(238): Homolog of NCBI NO: 22327608 NR Description: 26S proteasome regulatory subunit (RPN9), protein id: At5g45620.1, supported by cDNA: gi_20260473
  misc_feature (1)..(238): Homolog of NCBI NO: 30684612 NR Description: 26S proteasome regulatory subunit (RPN9) -related thaliana] >gi|26450594|dbj|BAC42409.1| unknown protein
  misc_feature (1)..(177): Homolog of NCBI NO: 9758666 NR Description: 26S proteasome subunit-like protein [Arabidopsis
  misc_feature (1)..(238): Homolog of NCBI NO: 34914614 NR Description: putative 26S proteasome subunit [Oryza sativa
  misc_feature (1)..(238): Homolog of NCBI NO: 17298163 NR Description: 26S proteasome regulatory particle non-ATPase
  misc_feature (1)..(236): Homolog of NCBI NO: 29612578 NR Description: Similar to proteasome (prosome, macropain) 26S
  misc_feature (1)..(236): Homolog of NCBI NO: 3618343 NR Description: 26S proteasome subunit p40.5 [Homo sapiens]
  misc_feature (1)..(236): Homolog of NCBI NO: 28872728 NR Description: proteasome 26S non-ATPase subunit 13 isoform 1; proteasome subunit p40.5; 26S proteasome regulatory subunit S11
  misc_feature (1)..(236): Homolog of NCBI NO: 32880133 NR Description: proteasome (prosome, macropain) 26S subunit,
  misc_feature (1)..(236): Homolog of NCBI NO: 3746882 NR Description: 26S proteasome subunit 11 [Homo sapiens]

SEQ ID NO: 76696 - DNA, 1956 bp, Arabidopsis thaliana
  misc_feature (1)..(1956): Ceres Seq. ID no. 11026568
  misc_feature: MA Experiment ID: 20001557 Result: Up-regulated in Transcription
  misc_feature: MA Experiment 20001557 PARAMETER Experiment Name: At_Drought_Soil_Dry_P Parameter: Age (day) Value: 27
  misc_feature: MA Experiment 20001557 PARAMETER Experiment Name: At_Drought_Soil_Dry_P Parameter: Organism Value: A. thaliana
  misc_feature: MA Experiment 20001557 PARAMETER Experiment Name: At_Drought_Soil_Dry_P Parameter: Plant Line Value: WS
  misc_feature: MA Experiment 20001557 PARAMETER Experiment Name: At_Drought_Soil_Dry_P Parameter: Post Timepoint (hr) Value: 3
  misc_feature: MA Experiment 20001557 PARAMETER Experiment Name: At_Drought_Soil_Dry_P Parameter: Post-Treatment Value: Re-Water vs. No Drought
  misc_feature: MA Experiment 20001557 PARAMETER Experiment Name: At_Drought_Soil_Dry_P Parameter: Timepoint (day) Value: 13
  misc_feature: MA Experiment 20001557 PARAMETER Experiment Name: At_Drought_Soil_Dry_P Parameter: Treatment Value: Drought vs. No Drought
  misc_feature: Pfam Name: IBB Pfam Description: Importin beta binding domain
gaatatagaccccacgcgtccggggtttatatcttttcatcggattttctttgtcgagcaagagccatgtcactgagacccaacgctaagacggaggttcgccggaaccgatacaaagttgcagtggatgcggaggaaggacgacggaggagagaagacaacatggttgagatccgtaaaagcaagcgtgaggagagtttgatgaagaagagacgtgaaggtatgcaagctcttcagggtttcccttcagcttccgccgcctccgtcgataagaagttggatagtctgaaggatatggtcgctggggtttggtccgatgaccctgccttgcagcttgagtccactactcagttcaggaagcttctctctattgagagaagtcctccaatcgaggaagtgataagtgctggtgttgttcctaggtttgttgagtttcttaagaaagaagattaccccgccattcagtttgaggcagcttgggctctaacaaacattgcatctggaacatcggatcacactaaggttgtaatcgatcacaatgctgttccaatctttgttcagcttcttgcttcccctagcgatgatgttcgtgaacaggctgtatgggctttgggtaacgttgctggtgattcaccacggtgccgtgatcttgttcttggatgtggggcactgcttccgctgctcaatcagcttaatgagcatgctaaattgtccatgcttcgaaatgccacttggaccttgtcaaacttctgtcgtggcaagcctcagcctcactttgaccaggtcaaacctgctcttcccgcccttgaacgactaattcattcagatgatgaagaagtcttgacagatgcctgttgggctctttcttacctctctgatgggaccaatgacaaaatccagactgtcatccaggccggtgttgtcccaaaacttgttgaacttctcctccatcattctccatctgtgctaattcctgctcttcgcactgttggaaatatagttactggagatgatatacaaacacagtgcgtgatcaatagtggtgctctaccttgtcttgccaacctgctcactcaaaaccataagaaaagcataaagaaggaagcttgctggacgatttcaaacatcacagcaggcaacaaagatcagatccagacggtagttgaggctaatttgatttccccgttggtgagtctgcttcaaaatgctgaatttgacattaagaaggaagctcatgggcaatttcaaatgcaacttcaggtggttctcatgatcaaataaaatacctggtggagcaagggtgcataaaaccattatgcgatctcctggtttgcccagatccaagaatcataactgtctgccttgaaggattggaaaacattttgaaggtgggagaggcagagaagaacttgggtcacacaggagacatgaactattacgctcagctgattgatgatgcagaagggctagaaaagatcgagaaccttcagagccatgacaacaatgagatctatgagaaggctgttaaaattctggagacatactggcttgaagaggaagatgatgagacacagcaacctccaggtgttgatggttctcaggctgggttccagtttggagggaatcaagctccagtaccatccggaggattcaacttcagctgaaggaatggaattggaagcttgcaacttgagaatggtgaaaggtcagagtcagtcagagtctagtttcactgccatggttatactccaggtctggtctggtctggtctcagaggtttgtaccgggtggtcggtttaaaagtacagcgtctgagaaagtgtttggttcattgtccagggctatttttttgaaatgactggtacaccggtcgtgagtcgacctttgtgttgtttttaaattttggagggttataaaaacttacagtggagtcttttgtttttgtgttgacaacag

SEQ ID NO: 76697 - protein, 426 aa, Arabidopsis thaliana
  peptide (1)..(426): Ceres Seq. ID no. 11026569
  misc_feature: Pfam Name: IBB Pfam Description: Importin beta binding domain
  misc_feature (23)..(411): Homolog of NCBI NO: 15230778 NR Description: importin alpha; protein id: At3g06720.2, by cDNA: 9351., supported by cDNA: gi_13699776, supported by gi_15809793, supported by cDNA: gi_20453047, supported by cDNA:
  misc_feature (23)..(411): Homolog of NCBI NO: 15809794 NR Description: AT3g06720/F3E22_14 [Arabidopsis thaliana]
  misc_feature (23)..(411): Homolog of NCBI NO: 25314876 NR Description: probable nuclear transport factor importin
  misc_feature (23)..(411): Homolog of NCBI NO: 13699777 NR Description: AtKAP alpha [Arabidopsis thaliana]
  misc_feature (23)..(411): Homolog of NCBI NO: 13605661 NR Description: AT3g06720/F3E22_14 [Arabidopsis thaliana]
  misc_feature (23)..(411): Homolog of NCBI NO: 25314870 NR Description: probable nuclear transport factor importin alpha
  misc_feature (23)..(411): Homolog of NCBI NO: 13752562 NR Description: importin alpha 2 [Capsicum annuum]
  misc_feature (23)..(411): Homolog of NCBI NO: 3915737 NR Description: Importin alpha subunit (Karyopherin alpha
  misc_feature (23)..(411): Homolog of NCBI NO: 6682927 NR Description: importin alpha 1b [Oryza sativa (japonica
  misc_feature (21)..(411): Homolog of NCBI NO: 30421147 NR Description: importin alpha [Toxoplasma gondii]
EYRPHASGVYIFSSDFLCRARAMSLRPNAKTEVRRNRYKVAVDAEEGRRRREDNMVEIRKSKREESLMKKRREGMQALQGFPSASAASVDKKLDSLKDMVAGVWSDDPALQLESTTQFRKLLSIERSPPIEEVISAGVVPRFVEFLKKEDYPAIQFEAAWALTNIASGTSDHTKVVIDHNAVPIFVQLLASPSDDVREQAVWALGNVAGDSPRCRDLVLGCGALLPLLNQLNEHAKLSMLRNATWTLSNFCRGKPQPHFDQVKPALPALERLIHSDDEEVLTDACWALSYLSDGTNDKIQTVIQAGVVPKLVELLLHHSPSVLIPALRTVGNIVTGDDIQTQCVINSGALPCLANLLTQNHKKSIKKEACWTISNITAGNKDQIQTVVEANLISPLVSLLQNAEFDIKKEAHGQFQMQLQVVLMIK

SEQ ID NO: 76698 - protein, 404 aa, Arabidopsis thaliana
  peptide (1)..(404): Ceres Seq. ID no. 11026570
  misc_feature: Pfam Name: IBB Pfam Description: Importin beta binding domain
  misc_feature (1)..(389): Homolog of NCBI NO: 15230778 NR Description: importin alpha; protein id: At3g06720.2, by cDNA: 9351., supported by cDNA: gi_13699776, supported by gi_15809793, supported by cDNA: gi_20453047, supported by cDNA:
  misc_feature (1)..(389): Homolog of NCBI NO: 15809794 NR Description: AT3g06720/F3E22_14 [Arabidopsis thaliana]
  misc_feature (1)..(389): Homolog of NCBI NO: 25314876 NR Description: probable nuclear transport factor importin
  misc_feature (1)..(389): Homolog of NCBI NO: 13699777 NR Description: AtKAP alpha [Arabidopsis thaliana]
  misc_feature (1)..(389): Homolog of NCBI NO: 13605661 NR Description: AT3g06720/F3E22_14 [Arabidopsis thaliana]
  misc_feature (1)..(389): Homolog of NCBI NO: 25314870 NR Description: probable nuclear transport factor importin alpha
  misc_feature (1)..(389): Homolog of NCBI NO: 13752562 NR Description: importin alpha 2 [Capsicum annuum]
  misc_feature (1)..(389): Homolog of NCBI NO: 3915737 NR Description: Importin alpha subunit (Karyopherin alpha
  misc_feature (1)..(389): Homolog of NCBI NO: 6682927 NR Description: importin alpha 1b [Oryza sativa (japonica
  misc_feature (1)..(389): Homolog of NCBI NO: 30421147 NR Description: importin alpha [Toxoplasma gondii]
MSLRPNAKTEVRRNRYKVAVDAEEGRRRREDNMVEIRKSKREESLMKKRREGMQALQGFPSASAASVDKKLDSLKDMVAGVWSDDPALQLESTTQFRKLLSIERSPPIEEVISAGVVPRFVEFLKKEDYPAIQFEAAWALTNIASGTSDHTKVVIDHNAVPIFVQLLASPSDDVREQAVWALGNVAGDSPRCRDLVLGCGALLPLLNQLNEHAKLSMLRNATWTLSNFCRGKPQPHFDQVKPALPALERLIHSDDEEVLTDACWALSYLSDGTNDKIQTVIQAGVVPKLVELLLHHSPSVLIPALRTVGNIVTGDDIQTQCVINSGALPCLANLLTQNHKKSIKKEACWTISNITAGNKDQIQTVVEANLISPLVSLLQNAEFDIKKEAHGQFQMQLQVVLMIK

SEQ ID NO: 76699 - protein, 372 aa, Arabidopsis thaliana
  peptide (1)..(372): Ceres Seq. ID no. 11026571
  misc_feature: Pfam Name: IBB Pfam Description: Importin beta binding domain
  misc_feature (1)..(357): Homolog of NCBI NO: 15230778 NR Description: importin alpha; protein id: At3g06720.2, by cDNA: 9351., supported by cDNA: gi_13699776, supported by gi_15809793, supported by cDNA: gi_20453047, supported by cDNA:
  misc_feature (1)..(357): Homolog of NCBI NO: 15809794 NR Description: AT3g06720/F3E22_14 [Arabidopsis thaliana]
  misc_feature (1)..(357): Homolog of NCBI NO: 25314876 NR Description: probable nuclear transport factor importin
  misc_feature (1)..(357): Homolog of NCBI NO: 13699777 NR Description: AtKAP alpha [Arabidopsis thaliana]
  misc_feature (1)..(357): Homolog of NCBI NO: 13605661 NR Description: AT3g06720/F3E22_14 [Arabidopsis thaliana]
  misc_feature (1)..(357): Homolog of NCBI NO: 25314870 NR Description: probable nuclear transport factor importin alpha
  misc_feature (1)..(357): Homolog of NCBI NO: 13752562 NR Description: importin alpha 2 [Capsicum annuum]
  misc_feature (1)..(357): Homolog of NCBI NO: 3915737 NR Description: Importin alpha subunit (Karyopherin alpha
  misc_feature (1)..(357): Homolog of NCBI NO: 6682927 NR Description: importin alpha 1b [Oryza sativa (japonica
  misc_feature (1)..(357): Homolog of NCBI NO: 30421147 NR Description: importin alpha [Toxoplasma gondii]
MVEIRKSKREESLMKKRREGMQALQGFPSASAASVDKKLDSLKDMVAGVWSDDPALQLESTTQFRKLLSIERSPPIEEVISAGVVPRFVEFLKKEDYPAIQFEAAWALTNIASGTSDHTKVVIDHNAVPIFVQLLASPSDDVREQAVWALGNVAGDSPRCRDLVLGCGALLPLLNQLNEHAKLSMLRNATWTLSNFCRGKPQPHFDQVKPALPALERLIHSDDEEVLTDACWALSYLSDGTNDKIQTVIQAGVVPKLVELLLHHSPSVLIPALRTVGNIVTGDDIQTQCVINSGALPCLANLLTQNHKKSIKKEACWTISNITAGNKDQIQTVVEANLISPLVSLLQNAEFDIKKEAHGQFQMQLQVVLMIK

SEQ ID NO: 76700 - DNA, 2297 bp, Arabidopsis thaliana
  misc_feature (1)..(2297): Ceres Seq. ID no. 11033056
  misc_feature: MA Experiment ID: 20000179 Result: Down-regulated in Transcription
  misc_feature: MA Experiment 20000179 PARAMETER Experiment Name: At_Germinating_Seeds_P Parameter: Age (hr) Value: 6 vs. 0
  misc_feature: MA Experiment 20000179 PARAMETER Experiment Name: At_Germinating_Seeds_P Parameter: Tissue Value: Germinating Seeds
  misc_feature: MA Experiment ID: 20000185 Result: Down-regulated in Transcription
  misc_feature: MA Experiment 20000185 PARAMETER Experiment Name: At_Roots__P Parameter: Age (day) Value: 7 vs. 21
  misc_feature: MA Experiment 20000185 PARAMETER Experiment Name: At_Roots__P Parameter: Organism Value: A. thaliana
  misc_feature: MA Experiment 20000185 PARAMETER Experiment Name: At_Roots__P Parameter: Tissue Value: Roots vs. Whole Plant
  misc_feature: MA Experiment ID: 20000227 Result: Down-regulated in Transcription
  misc_feature: MA Experiment 20000227 PARAMETER Experiment Name: At_Root-Tips-vs-Tops_P Parameter: Tissue Value: Root Tips vs. Root Tops
  misc_feature: MA Experiment ID: 20000439 Result: Down-regulated in Transcription
  misc_feature: MA Experiment 20000439 PARAMETER Experiment Name: At_Roots__P Parameter: Age (day) Value: 14 vs. 21
  misc_feature: MA Experiment 20000439 PARAMETER Experiment Name: At_Roots__P Parameter: Organism Value: A. thaliana
  misc_feature: MA Experiment 20000439 PARAMETER Experiment Name: At_Roots__P Parameter: Tissue Value: Roots vs. Whole Plant
  misc_feature: MA Experiment ID: 20000451 Result: Down-regulated in Transcription
  misc_feature: MA Experiment 20000451 PARAMETER Experiment Name: At_CS6879_Shoots-Roots_P Parameter: Age (day) Value: 14
  misc_feature: MA Experiment 20000451 PARAMETER Experiment Name: At_CS6879_Shoots-Roots_P Parameter: Organism Value: A. thaliana
  misc_feature: MA Experiment 20000451 PARAMETER Experiment Name: At_CS6879_Shoots-Roots_P Parameter: Plant Line Value: CS6879 vs. WS
  misc_feature: MA Experiment 20000451 PARAMETER Experiment Name: At_CS6879_Shoots-Roots_P Parameter: Tissue Value: Roots
  misc_feature: MA Experiment ID: 20000794 Result: Down-regulated in Transcription
  misc_feature: MA Experiment 20000794 PARAMETER Experiment Name: At_Petals_P Parameter: Age (day) Value: 23-25 days
  misc_feature: MA Experiment 20000794 PARAMETER Experiment Name: At_Petals_P Parameter: Plant Line Value: WS
  misc_feature: MA Experiment 20000794 PARAMETER Experiment Name: At_Petals_P Parameter: Tissue Value: Petals vs. Whole plant
  misc_feature: MA Experiment ID: 20001560 Result: Down-regulated in Transcription
  misc_feature: MA Experiment 20001560 PARAMETER Experiment Name: At_Drought_Soil_Dry_P Parameter: Age (day) Value: 28
  misc_feature: MA Experiment 20001560 PARAMETER Experiment Name: At_Drought_Soil_Dry_P Parameter: Organism Value: A. thaliana
  misc_feature: MA Experiment 20001560 PARAMETER Experiment Name: At_Drought_Soil_Dry_P Parameter: Plant Line Value: WS
  misc_feature: MA Experiment 20001560 PARAMETER Experiment Name: At_Drought_Soil_Dry_P Parameter: Post Timepoint (hr) Value: None
  misc_feature: MA Experiment 20001560 PARAMETER Experiment Name: At_Drought_Soil_Dry_P Parameter: Post-Treatment Value: None
  misc_feature: MA Experiment 20001560 PARAMETER Experiment Name: At_Drought_Soil_Dry_P Parameter: Timepoint (day) Value: 14
  misc_feature: MA Experiment 20001560 PARAMETER Experiment Name: At_Drought_Soil_Dry_P Parameter: Treatment Value: Drought vs. No Drought
tgaaaccaaactttcgtcttcttcccggctttactctctttctctctccaccgtcggctcagatctagacggaaatgtgccggtgaaatcgaatcatgaaaagatctcacatttcgtctcctcgttcttattcacgaccagcgatttcaatcttcggtgtcttcctcttgtttcttctggttttaacactaagctctcgaaaaccatcagattcatcctccggtttagctccaaatcgaaacttagccacaaaatcgacgattccgaggtttgcgtatttggtaacgggaacgaaaggagatgggaaacgagtgaagcggctgcttaaagcaatacatcatccgagaaattactatctgcttcatttggatctcgaagcttcagatgaagagagaatggagctggcgaagtatgtgagatcggagaagaagaagtttgagaatgttatggtaatgggtttagctgatttggttacggagaaaggtccaacgatgttagctagtacgcttcatggtgttgccattttgttgaagaaagctaaggattgggattggtttattaatcttagtgcttctgattatcctttaatgcctcaagatgatattttgcatatattctcatacttgccacgctacctgaactttatcgagcacacaagcaacatcggttggaaagagtgagggagctaatattatgaaccaaagagcaaggcctatcattattgatcctggtttttaccatttgaagaaatctggtgtcttttgggctaaagaacggagatctttgcctgcttcattcaaacttttcatgggttcaaccagcgttgctttaacaagaccgttcctcgagttttgcatttggggatgggataatctcccaagaacgctattgatgtactataccaacttcctcttgtcatctgaaggctactttcagacagttgtgtgcaacaataaagattatcagaacacaacggttaaccacgacctgcattacacaaaatgggatccaaaagaaaagaggaaaaaatggactatatgtatggaccagggagacaccatctgtttgtaccaggaccagtgaacataccggaaccggtaatccgggcgatgaaccggaacaacgaggattaccggtcaccagccattccggcgcttacgaaaacattgttggaggatgttaagaagatattcaagaccacatcagggacaccttttctgtttcccacgaccggggctggtgcttgggagagtgccttgaccaacacgttatctcctggagacaggattgtttcgtttctgattggacaatttagcttgctctggattgaccagcagaagaggcttaatttcaatgttgatgtggttgagagtgattggggacaaggtgctaatctccaagtcttggcctcaaagctctcacaagacgagaatcataccatcaaagccatttgcattgtccacaacgagaccgcgaccggagttaccaatgacatctctgctgtccgcacactcctcgatcactacaagcatccggctttgctgctagtggacggtgtttcgtccatctgcgcgcttgatttccgaatggatgagtggggagtggacgtggccttgactgggtctcagaaagccttatctcttccaacaggacttggtattgtctgcgccagtcctaaagctttggaagctgccaaaacttctaaatctctcaaagtattctttgactggaatgactaccttaagttttacaagctaggaacctattggccatacacaccttccattcaacttctctacggtcttagagctgctcttgatcttatctttgaggaaggacttgagaacatcatcgcccgccatgctcgtttgggaaaggccaccaggcttgcggtggaagcatgggggctgaaaaactgcacacagaaggaggaatggataagtaacacagtgacagcagttatggtgcctccgcatatagacggttcggagattgtgagaagggcatggcagaggtacaacttaagtcttggtcttggtctcaacaaagtggctggaaaggttttcagaattggacacctaggaaatgtgaatgagttgcaacttctcgggtgtcttgcgggagtggagatgatactgaaggatgttggatacccagttgtaatgggaagtggagttgcagctgcctctacttatcttcagcaccacattcctctcattccctctagaatctaatccatgtggtccttctctttctttctcttcctctcaatgtaaacaaactctcatgttttctct

SEQ ID NO: 76701 - protein, 410 aa, Arabidopsis thaliana
  peptide (1)..(410): Ceres Seq. ID no. 11033057
  misc_feature (29)..(372): Pfam Name: Aminotransferase class-V Pfam Description: Aminotransferase class-V
  misc_feature (10)..(410): Homolog of NCBI NO: 15225026 NR Description: alanine-glyoxylate aminotransferase; protein id: supported by cDNA: 8306., supported by cDNA: gi_12082306, by cDNA: gi_20465424, supported by cDNA: gi_21281088, supported
  misc_feature (10)..(410): Homolog of NCBI NO: 18032028 NR Description: aminotransferase 1 [Cucumis melo]
  misc_feature (10)..(410): Homolog of NCBI NO: 34014752 NR Description: aminotransferase 1 [Cucumis melo]
  misc_feature (10)..(410): Homolog of NCBI NO: 34014758 NR Description: aminotransferase 2 [Cucumis melo]
  misc_feature (10)..(410): Homolog of NCBI NO: 34014756 NR Description: aminotransferase 1 [Cucumis melo]
  misc_feature (10)..(410): Homolog of NCBI NO: 18158221 NR Description: aminotransferase 2 [Cucumis melo]
  misc_feature (10)..(410): Homolog of NCBI NO: 2754849 NR Description: putative serine-glyoxylate aminotransferase
  misc_feature (10)..(410): Homolog of NCBI NO: 34014754 NR Description: aminotransferase 2 [Cucumis melo]
  misc_feature (33)..(405): Homolog of NCBI NO: 21535798 NR Description: serine-glyoxylate aminotransferase
  misc_feature (17)..(401): Homolog of NCBI NO: 13471371 NR Description: probable serine-glyoxylate aminotransferase
MGSKRKEEKMDYMYGPGRHHLFVPGPVNIPEPVIRAMNRNNEDYRSPAIPALTKTLLEDVKKIFKTTSGTPFLFPTTGAGAWESALTNTLSPGDRIVSFLIGQFSLLWIDQQKRLNFNVDVVESDWGQGANLQVLASKLSQDENHTIKAICIVHNETATGVTNDISAVRTLLDHYKHPALLLVDGVSSICALDFRMDEWGVDVALTGSQKALSLPTGLGIVCASPKALEAAKTSKSLKVFFDWNDYLKFYKLGTYWPYTPSIQLLYGLRAALDLIFEEGLENIIARHARLGKATRLAVEAWGLKNCTQKEEWISNTVTAVMVPPHIDGSEIVRRAWQRYNLSLGLGLNKVAGKVFRIGHLGNVNELQLLGCLAGVEMILKDVGYPVVMGSGVAAASTYLQHHIPLIPSRI

SEQ ID NO: 76702 - protein, 401 aa, Arabidopsis thaliana
  peptide (1)..(401): Ceres Seq. ID no. 11033058
  misc_feature (20)..(363): Pfam Name: Aminotransferase class-V Pfam Description: Aminotransferase class-V
  misc_feature (1)..(401): Homolog of NCBI NO: 15225026 NR Description: alanine-glyoxylate aminotransferase; protein id: supported by cDNA: 8306., supported by cDNA: gi_12082306, by cDNA: gi_20465424, supported by cDNA: gi_21281088, supported
  misc_feature (1)..(401): Homolog of NCBI NO: 18032028 NR Description: aminotransferase 1 [Cucumis melo]
  misc_feature (1)..(401): Homolog of NCBI NO: 34014752 NR Description: aminotransferase 1 [Cucumis melo]
  misc_feature (1)..(401): Homolog of NCBI NO: 34014758 NR Description: aminotransferase 2 [Cucumis melo]
  misc_feature (1)..(401): Homolog of NCBI NO: 34014756 NR Description: aminotransferase 1 [Cucumis melo]
  misc_feature (1)..(401): Homolog of NCBI NO: 18158221 NR Description: aminotransferase 2 [Cucumis melo]
  misc_feature (1)..(401): Homolog of NCBI NO: 2754849 NR Description: putative serine-glyoxylate aminotransferase
  misc_feature (1)..(401): Homolog of NCBI NO: 34014754 NR Description: aminotransferase 2 [Cucumis melo]
  misc_feature (24)..(396): Homolog of NCBI NO: 21535798 NR Description: serine-glyoxylate aminotransferase
  misc_feature (8)..(392): Homolog of NCBI NO: 13471371 NR Description: probable serine-glyoxylate aminotransferase
MDYMYGPGRHHLFVPGPVNIPEPVIRAMNRNNEDYRSPAIPALTKTLLEDVKKIFKTTSGTPFLFPTTGAGAWESALTNTLSPGDRIVSFLIGQFSLLWIDQQKRLNFNVDVVESDWGQGANLQVLASKLSQDENHTIKAICIVHNETATGVTNDISAVRTLLDHYKHPALLLVDGVSSICALDFRMDEWGVDVALTGSQKALSLPTGLGIVCASPKALEAAKTSKSLKVFFDWNDYLKFYKLGTYWPYTPSIQLLYGLRAALDLIFEEGLENIIARHARLGKATRLAVEAWGLKNCTQKEEWISNTVTAVMVPPHIDGSEIVRRAWQRYNLSLGLGLNKVAGKVFRIGHLGNVNELQLLGCLAGVEMILKDVGYPVVMGSGVAAASTYLQHHIPLIPSRI

SEQ ID NO: 76703 - protein, 398 aa, Arabidopsis thaliana
  peptide (1)..(398): Ceres Seq. ID no. 11033059
  misc_feature (17)..(360): Pfam Name: Aminotransferase class-V Pfam Description: Aminotransferase class-V
  misc_feature (1)..(398): Homolog of NCBI NO: 15225026 NR Description: alanine-glyoxylate aminotransferase; protein id: supported by cDNA: 8306., supported by cDNA: gi_12082306, by cDNA: gi_20465424, supported by cDNA: gi_21281088, supported
  misc_feature (1)..(398): Homolog of NCBI NO: 18032028 NR Description: aminotransferase 1 [Cucumis melo]
  misc_feature (1)..(398): Homolog of NCBI NO: 34014752 NR Description: aminotransferase 1 [Cucumis melo]
  misc_feature (1)..(398): Homolog of NCBI NO: 34014758 NR Description: aminotransferase 2 [Cucumis melo]
  misc_feature (1)..(398): Homolog of NCBI NO: 34014756 NR Description: aminotransferase 1 [Cucumis melo]
  misc_feature (1)..(398): Homolog of NCBI NO: 18158221 NR Description: aminotransferase 2 [Cucumis melo]
  misc_feature (1)..(398): Homolog of NCBI NO: 2754849 NR Description: putative serine-glyoxylate aminotransferase
  misc_feature (1)..(398): Homolog of NCBI NO: 34014754 NR Description: aminotransferase 2 [Cucumis melo]
  misc_feature (21)..(393): Homolog of NCBI NO: 21535798 NR Description: serine-glyoxylate aminotransferase
  misc_feature (5)..(389): Homolog of NCBI NO: 13471371 NR Description: probable serine-glyoxylate aminotransferase
MYGPGRHHLFVPGPVNIPEPVIRAMNRNNEDYRSPAIPALTKTLLEDVKKIFKTTSGTPFLFPTTGAGAWESALTNTLSPGDRIVSFLIGQFSLLWIDQQKRLNFNVDVVESDWGQGANLQVLASKLSQDENHTIKAICIVHNETATGVTNDISAVRTLLDHYKHPALLLVDGVSSICALDFRMDEWGVDVALTGSQKALSLPTGLGIVCASPKALEAAKTSKSLKVFFDWNDYLKFYKLGTYWPYTPSIQLLYGLRAALDLIFEEGLENIIARHARLGKATRLAVEAWGLKNCTQKEEWISNTVTAVMVPPHIDGSEIVRRAWQRYNLSLGLGLNKVAGKVFRIGHLGNVNELQLLGCLAGVEMILKDVGYPVVMGSGVAAASTYLQHHIPLIPSRI

SEQ ID NO: 76704 - DNA, 3083 bp, Arabidopsis thaliana
  misc_feature (1)..(3083): Ceres Seq. ID no. 11033071
  misc_feature: MA Experiment ID: 108433 Result: Up-regulated in Transcription
  misc_feature: MA Experiment 108433 PARAMETER Experiment Name: At_rhl_Mutant2_cDNA_P Parameter: Age (day) Value: 7
  misc_feature: MA Experiment 108433 PARAMETER Experiment Name: At_rhl_Mutant2_cDNA_P Parameter: Organism Value: A. thaliana
  misc_feature: MA Experiment 108433 PARAMETER Experiment Name: At_rhl_Mutant2_cDNA_P Parameter: Plant Line Value: rhl Mutant vs. wt landsburg
  misc_feature: MA Experiment 108433 PARAMETER Experiment Name: At_rhl_Mutant2_cDNA_P Parameter: Tissue Value: Roots
  misc_feature: MA Experiment ID: 108573 Result: Up-regulated in Transcription
  misc_feature: MA Experiment 108573 PARAMETER Experiment Name: At_Drought_cDNA_P Parameter: Timepoint (hr) Value: 6
  misc_feature: MA Experiment 108573 PARAMETER Experiment Name: At_Drought_cDNA_P Parameter: Tissue Value: Aerial
  misc_feature: MA Experiment 108573 PARAMETER Experiment Name: At_Drought_cDNA_P Parameter: Treatment Value: Drought vs. No Drought
  misc_feature: MA Experiment ID: 108668 Result: Up-regulated in Transcription
  misc_feature: MA Experiment 108668 PARAMETER Experiment Name: At_2mM_SA_cDNA_P Parameter: Plant Line Value: WS
  misc_feature: MA Experiment 108668 PARAMETER Experiment Name: At_2mM_SA_cDNA_P Parameter: Timepoint (hr) Value: 6
  misc_feature: MA Experiment 108668 PARAMETER Experiment Name: At_2mM_SA_cDNA_P Parameter: Treatment Value: 2mM SA vs. No Treatment
  misc_feature: MA Experiment ID: 20000089 Result: Up-regulated in Transcription
  misc_feature: MA Experiment ID: 20000111 Result: Up-regulated in Transcription
  misc_feature: MA Experiment 20000111 PARAMETER Experiment Name: At_42deg_Heat_cDNA_P Parameter: Temperature (deg C) Value: 42 vs. 22
  misc_feature: MA Experiment 20000111 PARAMETER Experiment Name: At_42deg_Heat_cDNA_P Parameter: Timepoint (hr) Value: 6
  misc_feature: MA Experiment 20000111 PARAMETER Experiment Name: At_42deg_Heat_cDNA_P Parameter: Tissue Value: Aerial
  misc_feature: MA Experiment ID: 20000112 Result: Up-regulated in Transcription
  misc_feature: MA Experiment 20000112 PARAMETER Experiment Name: At_42deg_Heat_cDNA_P Parameter: Temperature (deg C) Value: 42 vs. 22
  misc_feature: MA Experiment 20000112 PARAMETER Experiment Name: At_42deg_Heat_cDNA_P Parameter: Timepoint (hr) Value: 2
  misc_feature: MA Experiment 20000112 PARAMETER Experiment Name: At_42deg_Heat_cDNA_P Parameter: Tissue Value: Aerial
  misc_feature: MA Experiment ID: 20000113 Result: Up-regulated in Transcription
  misc_feature: MA Experiment 20000113 PARAMETER Experiment Name: At_42deg_Heat_cDNA_P Parameter: Temperature (deg C) Value: 42 vs. 22
  misc_feature: MA Experiment 20000113 PARAMETER Experiment Name: At_42deg_Heat_cDNA_P Parameter: Timepoint (hr) Value: 8
  misc_feature: MA Experiment 20000113 PARAMETER Experiment Name: At_42deg_Heat_cDNA_P Parameter: Tissue Value: Aerial
  misc_feature: MA Experiment ID: 20000173 Result: Up-regulated in Transcription
  misc_feature: MA Experiment 20000173 PARAMETER Experiment Name: At_42deg_Heat_P Parameter: Age (day) Value: 14
  misc_feature: MA Experiment 20000173 PARAMETER Experiment Name: At_42deg_Heat_P Parameter: Organism Value: A. thaliana
  misc_feature: MA Experiment 20000173 PARAMETER Experiment Name: At_42deg_Heat_P Parameter: Plant Line Value: WS
  misc_feature: MA Experiment 20000173 PARAMETER Experiment Name: At_42deg_Heat_P Parameter: Temperature (deg C) Value: 42 vs. 22
  misc_feature: MA Experiment 20000173 PARAMETER Experiment Name: At_42deg_Heat_P Parameter: Timepoint (hr) Value: 6
  misc_feature: MA Experiment 20000173 PARAMETER Experiment Name: At_42deg_Heat_P Parameter: Tissue Value: Aerial
  misc_feature: MA Experiment ID: 20000182 Result: Up-regulated in Transcription
  misc_feature: MA Experiment 20000182 PARAMETER Experiment Name: At_2mM_SA_P Parameter: Age (day) Value: 14
  misc_feature: MA Experiment 20000182 PARAMETER Experiment Name: At_2mM_SA_P Parameter: Organism Value: A. thaliana
  misc_feature: MA Experiment 20000182 PARAMETER Experiment Name: At_2mM_SA_P Parameter: Plant Line Value: WS
  misc_feature: MA Experiment 20000182 PARAMETER Experiment Name: At_2mM_SA_P Parameter: Timepoint (hr) Value: 6
  misc_feature: MA Experiment 20000182 PARAMETER Experiment Name: At_2mM_SA_P Parameter: Tissue Value: Aerial
  misc_feature: MA Experiment 20000182 PARAMETER Experiment Name: At_2mM_SA_P Parameter: Treatment Value: 2mM SA vs. No Treatment
  misc_feature: MA Experiment ID: 20000286 Result: Up-regulated in Transcription
  misc_feature: MA Experiment 20000286 PARAMETER Experiment Name: At_Open_Flower_P Parameter: Age (day) Value: 21
  misc_feature: MA Experiment 20000286 PARAMETER Experiment Name: At_Open_Flower_P Parameter: Plant Line Value: WS
  misc_feature: MA Experiment 20000286 PARAMETER Experiment Name: At_Open_Flower_P Parameter: Tissue Value: Half Open vs. Whole Plant
  misc_feature: MA Experiment ID: 20000436 Result: Up-regulated in Transcription
  misc_feature: MA Experiment 20000436 PARAMETER Experiment Name: At_Drought_P Parameter: Age (day) Value: 7
  misc_feature: MA Experiment 20000436 PARAMETER Experiment Name: At_Drought_P Parameter: Organism Value: A. thaliana
  misc_feature: MA Experiment 20000436 PARAMETER Experiment Name: At_Drought_P Parameter: Plant Line Value: WS
  misc_feature: MA Experiment 20000436 PARAMETER Experiment Name: At_Drought_P Parameter: Timepoint (hr) Value: 12
  misc_feature: MA Experiment 20000436 PARAMETER Experiment Name: At_Drought_P Parameter: Tissue Value: Whole Plant
  misc_feature: MA Experiment 20000436 PARAMETER Experiment Name: At_Drought_P Parameter: Treatment Value: Drought vs. No Drought
  misc_feature: MA Experiment ID: 20000437 Result: Up-regulated in Transcription
  misc_feature: MA Experiment 20000437 PARAMETER Experiment Name: At_Drought_P Parameter: Age (day) Value: 8
  misc_feature: MA Experiment 20000437 PARAMETER Experiment Name: At_Drought_P Parameter: Organism Value: A. thaliana
  misc_feature: MA Experiment 20000437 PARAMETER Experiment Name: At_Drought_P Parameter: Plant Line Value: WS
  misc_feature: MA Experiment 20000437 PARAMETER Experiment Name: At_Drought_P Parameter: Timepoint (hr) Value: 24
  misc_feature: MA Experiment 20000437 PARAMETER Experiment Name: At_Drought_P Parameter: Tissue Value: Whole Plant
  misc_feature: MA Experiment 20000437 PARAMETER Experiment Name: At_Drought_P Parameter: Treatment Value: Drought vs. No Drought
  misc_feature: MA Experiment ID: 20000439 Result: Up-regulated in Transcription
  misc_feature: MA Experiment 20000439 PARAMETER Experiment Name: At_Roots__P Parameter: Age (day) Value: 14 vs. 21
  misc_feature: MA Experiment 20000439 PARAMETER Experiment Name: At_Roots__P Parameter: Organism Value: A. thaliana
  misc_feature: MA Experiment 20000439 PARAMETER Experiment Name: At_Roots__P Parameter: Tissue Value: Roots vs. Whole Plant
  misc_feature: MA Experiment ID: 20000495 Result: Up-regulated in Transcription
  misc_feature: MA Experiment 20000495 PARAMETER Experiment Name: At_Guard_Cells_P Parameter: Harvest Date Value: 8/2/2002
  misc_feature: MA Experiment 20000495 PARAMETER Experiment Name: At_Guard_Cells_P Parameter: Organism Value: A. thaliana
  misc_feature: MA Experiment 20000495 PARAMETER Experiment Name: At_Guard_Cells_P Parameter: Tissue Value: Guard Cells vs. Leaves
  misc_feature: MA Experiment ID: 20001451 Result: Down-regulated in Transcription
  misc_feature: MA Experiment 20001451 PARAMETER Experiment Name: At_Far-red-induction_P Parameter: Age (day) Value: 7
  misc_feature: MA Experiment 20001451 PARAMETER Experiment Name: At_Far-red-induction_P Parameter: Light Value: Far-red vs. White
  misc_feature: MA Experiment 20001451 PARAMETER Experiment Name: At_Far-red-induction_P Parameter: Organism Value: A. thaliana
  misc_feature: MA Experiment 20001451 PARAMETER Experiment Name: At_Far-red-induction_P Parameter: Plant Line Value: Columbia
  misc_feature: MA Experiment 20001451 PARAMETER Experiment Name: At_Far-red-induction_P Parameter: Timepoint (hr) Value: 24
  misc_feature: MA Experiment 20001451 PARAMETER Experiment Name: At_Far-red-induction_P Parameter: Tissue Value: Whole Plant
  misc_feature: MA Experiment ID: 20001911 Result: Up-regulated in Transcription
  misc_feature: MA Experiment 20001911 PARAMETER Experiment Name: At_Drought_Reproduction_P Parameter: Age (day) Value: 40
  misc_feature: MA Experiment 20001911 PARAMETER Experiment Name: At_Drought_Reproduction_P Parameter: Organism Value: A. thaliana
  misc_feature: MA Experiment 20001911 PARAMETER Experiment Name: At_Drought_Reproduction_P Parameter: Plant Line Value: WS
  misc_feature: MA Experiment 20001911 PARAMETER Experiment Name: At_Drought_Reproduction_P Parameter: Timepoint (day) Value: 10
  misc_feature: MA Experiment 20001911 PARAMETER Experiment Name: At_Drought_Reproduction_P Parameter: Tissue Value: Flowers
  misc_feature: MA Experiment 20001911 PARAMETER Experiment Name: At_Drought_Reproduction_P Parameter: Treatment Value: Drought vs. No Drought
  misc_feature: Pfam Name: Glyco_hydro_1 Pfam Description: Glycosyl hydrolase family 1
ataaaaaaaacttacttgaaaaatggcactcaaagcgattctctttttgggtttatttctcgtcgtgatagtttctccgatcaccgtctacggtggagctgtgtgtccggcgagttccacgtttggtcgtggaagctttcctgatggtttcttgttcggtgctacaacttctgctttccagcatgaaggtgcagcagaagaaggaggccgaggttccagcatttgggactcattcactcttaaacaacattcagaaagcaacaacaatcttgacggcaggctcggagttgatttctatcatcattacaaggaagatgttcaactattgaaaaaactgaatatggatgcctttaggttctctatatcttggtcaagaatatttccccatgggaaaaaagacaagggagtgagtgaaacaggagttaaattctacaatgatcttatcaacgagctcattgcaaatggtgtaacgcctcttgtcacattgtttcaatgggatgtacctcaggctcttgaagatgaatacggcggtttcttgagtgaccgtattttggaggatttccgtgattttgcacagtttgctttcaataaatatggtgatagagtgaagcattgggttactataaacgaaccttatgaatttagtcgtggtggatacgagactggagagaaagcaccaggaagatgttctaaatatgtcaatgagaaatgtgttgcaggcaagagtggccatgaagtttacactgttagtcacaatctgctgttggctcatgccgaagctgtggaagaattcaggaaatgtggaaagtgcacaggtggaaagatcggaattgttcaaagtccaatgtggtttgagccttatgataagaaatccacctcgagtccttcagaggagatagtgaagagagctatggatttcactctaggctggcatatggagccaataacacatggagattaccctcaggccatgaaagatgttgttggtagtcgattaccatcttttacgcccgagcagaaggagaaactgaagggttcttatgattttgtcggtatcaattacttcacttctacatttgttgctcatacggacaatgttaatccagagaaaccgagttgggaagctgattctcgcttgcagttacattcgaataacgttgatgggttcaagattggttctcagcctgctactgcgaagtactgatgaatcccctaatgatttttatcaaaatcattaagttaaggtagatacacatcttgtcatatgatcaaatggtttcgccaaaaatcaataatcagacaacaaaatgtgcgaactcgatattttacacgactctctttaccaattctgccccgaattacacttaaaacgactcaacagcttaacgttggcttgccacgccttacttgactgtaaaactctcactcttaccgaacttggccgtaacctgccaaccaaagcgagaacaaaacataacatcaaacgaatcgaccgattgttaggtaatcgtcacctccacaaagagcgactcgctgtataccgttggcatgctagctttatctgttcgggcaatacgatgcccattgtacttgttgactggtctgatatccgtgagcaaaaacggcttatggtattgcgagcttcagtcgcactacacggtcgttctgttactctttatgagaaagcgttcccgctttcagagcaatgttcaaagaaagctcatgaccaatttctagccgaccttgcgagcattctaccgagtaacaccacaccgctcattgtcagtgatgctggctttaaagtgccatggtataaatccgttgagaagctgggttggtactggttaagtcgagtaagaggaaaagtacaatatgcagacctaggagcggaaaactggaaacctatcagcaacttacatgatatgtcatctagtcactcaaagactttaggctataagaggctgactaaaagcaatccaatctcatgccaaattctattgtataaatctcgctctaaaggccgaaaaaatcagcgctcgacacggactcattgtcaccacccgtcacctaaaatctactcagcgtcggcaaaggagccatggattctagcaactaacttacctgttgaaattcgaacacccaaacaacttgttaatatctattcgaagcgaatgcagattgaagaaaccttccgagacttgaaaagtcctgcctacggactaggcctacgccatagccgaacgagcagctcagagcgttttgatatcatgctgctaatcgccctgatgcttcaactaacatgttggcttgcgggcgttcatgctcagaaacaaggttgggacaagcacttccaggctaacacagtcagaaatcgaaacgtactctcaacagttcgcttaggcatggaagttttgcggcattctggctacacaataacaagggaagactcactcgtggctgcaaccctgcttactcaaaatctattcacacatggttacgttttggggaaattatgaggggatctctcagtgcgaagtatcctgtttgcgctgacgggttaagaaaagttttgaaatacatcaaagagaactacaatgacccagaaatcatagtcactggaaacgggtacaaggagacacttgaagagaaagatgtacttccagatgccctcagcgatagtaacaggaagtattatcatatgagacatctcatggcattacatggagcagtctgcgaggacaaggttaatgttaaaggttactttgtgtcgtcgcttatggatggactagagtgggaagatggatacaagacgaggtctggactgtactatgtagactatggacacaatatgggacggcatgagaaacaatctgccaagtggctctccaagctccttgagaaagtcccggacacgattcagtcgaaggtagattcggattcaaggaaagagttataaatgatcagagatccttttcgcaactctgtttaatcgatcatatgatgttatgtgtgtttttatcttaaaagagtgtaatccacgatctatgtagtttatataataaataaagaagtaacttatatcg

SEQ ID NO: 76705 - protein, 402 aa, Arabidopsis thaliana
  peptide (1)..(402): Ceres Seq. ID no. 11033072
  misc_feature: Pfam Name: Glyco_hydro_1 Pfam Description: Glycosyl hydrolase family 1
  misc_feature (1)..(402): Homolog of NCBI NO: 9507594 NR Description: transposase of Tn10 [Plasmid R100] putative transposase [Salmonella enterica subsp. enterica serovar >gi|18466588|ref|NP_569396.1| transposase [Salmonella enterica
  misc_feature (1)..(402): Homolog of NCBI NO: 10957265 NR Description: putative IS10 transposase [Salmonella typhi] putative IS10 transposase [Salmonella typhi]
  misc_feature (1)..(402): Homolog of NCBI NO: 24111918 NR Description: transposase of Tn10 [Shigella flexneri 2a str. >gi|24050722|gb|AAN42135.1|AE015080_3 transposase of Tn10
  misc_feature (1)..(402): Homolog of NCBI NO: 20142126 NR Description: transposase [Bacillus cereus]
  misc_feature (1)..(402): Homolog of NCBI NO: 24114267 NR Description: transposase of Tn10 [Shigella flexneri 2a str. >gi|24053421|gb|AAN44484.1|AE015313_11 transposase of Tn10
  misc_feature (1)..(402): Homolog of NCBI NO: 10957274 NR Description: IS10 transposase [Salmonella typhi]
  misc_feature (1)..(402): Homolog of NCBI NO: 9507603 NR Description: transposase of Tn10 [Plasmid R100]
  misc_feature (1)..(402): Homolog of NCBI NO: 11545514 NR Description: transposase [Tn10 delivery vector pHV1248]
  misc_feature (1)..(342): Homolog of NCBI NO: 15230813 NR Description: bacterial IS-element; protein id: At3g25185.1
MCELDILHDSLYQFCPELHLKRLNSLTLACHALLDCKTLTLTELGRNLPTKARTKHNIKRIDRLLGNRHLHKERLAVYRWHASFICSGNTMPIVLVDWSDIREQKRLMVLRASVALHGRSVTLYEKAFPLSEQCSKKAHDQFLADLASILPSNTTPLIVSDAGFKVPWYKSVEKLGWYWLSRVRGKVQYADLGAENWKPISNLHDMSSSHSKTLGYKRLTKSNPISCQILLYKSRSKGRKNQRSTRTHCHHPSPKIYSASAKEPWILATNLPVEIRTPKQLVNIYSKRMQIEETFRDLKSPAYGLGLRHSRTSSSERFDIMLLIALMLQLTCWLAGVHAQKQGWDKHFQANTVRNRNVLSTVRLGMEVLRHSGYTITREDSLVAATLLTQNLFTHGYVLGKL

SEQ ID NO: 76706 - protein, 393 aa, Arabidopsis thaliana
  peptide (1)..(393): Ceres Seq. ID no. 11033073
  misc_feature: Pfam Name: Glyco_hydro_1 Pfam Description: Glycosyl hydrolase family 1
  misc_feature (1)..(393): Homolog of NCBI NO: 15228597 NR Description: glycosyl hydrolase family 1; protein id: supported by cDNA: gi_3420934 [Arabidopsis thaliana]
  misc_feature (6)..(392): Homolog of NCBI NO: 25404995 NR Description: protein T4O12.15 [imported] - Arabidopsis >gi|8778810|gb|AAF26759.2|AC007396_8 T4O12.15 [Arabidopsis
  misc_feature (1)..(391): Homolog of NCBI NO: 30697327 NR Description: glycosyl hydrolase family 1, beta-glucosidase
  misc_feature (13)..(373): Homolog of NCBI NO: 7435453 NR Description: probable beta-glucosidase At2g44460 [imported] -
  misc_feature (13)..(373): Homolog of NCBI NO: 7435454 NR Description: beta-glucosidase homolog At2g44470 [imported] -
  misc_feature (29)..(385): Homolog of NCBI NO: 7435429 NR Description: furostanol glycoside 26-O-beta-glucosidase F26G -
  misc_feature (28)..(381): Homolog of NCBI NO: 27261134 NR Description: carboxypeptidase Y/myrosinase fusion protein
  misc_feature (36)..(385): Homolog of NCBI NO: 7489718 NR Description: beta-D-glucosidase (EC 3.2.1.-) glu2 precursor -
  misc_feature (36)..(385): Homolog of NCBI NO: 626042 NR Description: beta-glucosidase, root meristem (EC 3.2.1.-)
  misc_feature (36)..(390): Homolog of NCBI NO: 13924741 NR Description: cyanogenic beta-glucosidase dhurrinase-2 [Sorghum
MALKAILFLGLFLVVIVSPITVYGGAVCPASSTFGRGSFPDGFLFGATTSAFQHEGAAEEGGRGSSIWDSFTLKQHSESNNNLDGRLGVDFYHHYKEDVQLLKKLNMDAFRFSISWSRIFPHGKKDKGVSETGVKFYNDLINELIANGVTPLVTLFQWDVPQALEDEYGGFLSDRILEDFRDFAQFAFNKYGDRVKHWVTINEPYEFSRGGYETGEKAPGRCSKYVNEKCVAGKSGHEVYTVSHNLLLAHAEAVEEFRKCGKCTGGKIGIVQSPMWFEPYDKKSTSSPSEEIVKRAMDFTLGWHMEPITHGDYPQAMKDVVGSRLPSFTPEQKEKLKGSYDFVGINYFTSTFVAHTDNVNPEKPSWEADSRLQLHSNNVDGFKIGSQPATAKY

SEQ ID NO: 76707 - protein, 312 aa, Arabidopsis thaliana
  peptide (1)..(312): Ceres Seq. ID no. 11033074
  misc_feature: Pfam Name: Glyco_hydro_1 Pfam Description: Glycosyl hydrolase family 1
  misc_feature (1)..(312): Homolog of NCBI NO: 9507594 NR Description: transposase of Tn10 [Plasmid R100] putative transposase [Salmonella enterica subsp. enterica serovar >gi|18466588|ref|NP_569396.1| transposase [Salmonella enterica
  misc_feature (1)..(312): Homolog of NCBI NO: 10957265 NR Description: putative IS10 transposase [Salmonella typhi] putative IS10 transposase [Salmonella typhi]
  misc_feature (1)..(312): Homolog of NCBI NO: 24111918 NR Description: transposase of Tn10 [Shigella flexneri 2a str. >gi|24050722|gb|AAN42135.1|AE015080_3 transposase of Tn10
  misc_feature (1)..(312): Homolog of NCBI NO: 20142126 NR Description: transposase [Bacillus cereus]
  misc_feature (1)..(312): Homolog of NCBI NO: 24114267 NR Description: transposase of Tn10 [Shigella flexneri 2a str. >gi|24053421|gb|AAN44484.1|AE015313_11 transposase of Tn10
  misc_feature (1)..(312): Homolog of NCBI NO: 10957274 NR Description: IS10 transposase [Salmonella typhi]
  misc_feature (1)..(312): Homolog of NCBI NO: 9507603 NR Description: transposase of Tn10 [Plasmid R100]
  misc_feature (1)..(312): Homolog of NCBI NO: 11545514 NR Description: transposase [Tn10 delivery vector pHV1248]
  misc_feature (1)..(252): Homolog of NCBI NO: 15230813 NR Description: bacterial IS-element; protein id: At3g25185.1
MPIVLVDWSDIREQKRLMVLRASVALHGRSVTLYEKAFPLSEQCSKKAHDQFLADLASILPSNTTPLIVSDAGFKVPWYKSVEKLGWYWLSRVRGKVQYADLGAENWKPISNLHDMSSSHSKTLGYKRLTKSNPISCQILLYKSRSKGRKNQRSTRTHCHHPSPKIYSASAKEPWILATNLPVEIRTPKQLVNIYSKRMQIEETFRDLKSPAYGLGLRHSRTSSSERFDIMLLIALMLQLTCWLAGVHAQKQGWDKHFQANTVRNRNVLSTVRLGMEVLRHSGYTITREDSLVAATLLTQNLFTHGYVLGKL

SEQ ID NO: 76708 - DNA, 1176 bp, Arabidopsis thaliana
  misc_feature (1)..(1176): Ceres Seq. ID no. 11033599
  misc_feature: MA Experiment ID: 108434 Result: Up-regulated in Transcription
  misc_feature: MA Experiment 108434 PARAMETER Experiment Name: At_Root_Tips_cDNA_P Parameter: Tissue Value: Root Tips
  misc_feature: MA Experiment ID: 108461 Result: Down-regulated in Transcription
  misc_feature: MA Experiment 108461 PARAMETER Experiment Name: At_Germinating_Seeds_cDNA_P Parameter: Age (day) Value: 1 vs. 0
  misc_feature: MA Experiment 108461 PARAMETER Experiment Name: At_Germinating_Seeds_cDNA_P Parameter: Tissue Value: Germinating Seeds
  misc_feature: MA Experiment ID: 108462 Result: Down-regulated in Transcription
  misc_feature: MA Experiment 108462 PARAMETER Experiment Name: At_Germinating_Seeds_cDNA_P Parameter: Age (day) Value: 2 vs. 0
  misc_feature: MA Experiment 108462 PARAMETER Experiment Name: At_Germinating_Seeds_cDNA_P Parameter: Tissue Value: Germinating Seeds
  misc_feature: MA Experiment ID: 108463 Result: Down-regulated in Transcription
  misc_feature: MA Experiment 108463 PARAMETER Experiment Name: At_Germinating_Seeds_cDNA_P Parameter: Age (day) Value: 3 vs. 0
  misc_feature: MA Experiment 108463 PARAMETER Experiment Name: At_Germinating_Seeds_cDNA_P Parameter: Tissue Value: Germinating Seeds
  misc_feature: MA Experiment ID: 108464 Result: Down-regulated in Transcription
  misc_feature: MA Experiment 108464 PARAMETER Experiment Name: At_Germinating_Seeds_cDNA_P Parameter: Age (day) Value: 4 vs. 0
  misc_feature: MA Experiment 108464 PARAMETER Experiment Name: At_Germinating_Seeds_cDNA_P Parameter: Tissue Value: Germinating Seeds
  misc_feature: MA Experiment ID: 108607 Result: Down-regulated in Transcription
  misc_feature: MA Experiment 108607 PARAMETER Experiment Name: At_100uM_ABA_cDNA_P Parameter: Timepoint (hr) Value: 4
  misc_feature: MA Experiment 108607 PARAMETER Experiment Name: At_100uM_ABA_cDNA_P Parameter: Tissue Value: Aerial
  misc_feature: MA Experiment 108607 PARAMETER Experiment Name: At_100uM_ABA_cDNA_P Parameter: Treatment Value: 100uM ABA vs. No Treatment
  misc_feature: MA Experiment ID: 20000111 Result: Up-regulated in Transcription
  misc_feature: MA Experiment 20000111 PARAMETER Experiment Name: At_42deg_Heat_cDNA_P Parameter: Temperature (deg C) Value: 42 vs. 22
  misc_feature: MA Experiment 20000111 PARAMETER Experiment Name: At_42deg_Heat_cDNA_P Parameter: Timepoint (hr) Value: 6
  misc_feature: MA Experiment 20000111 PARAMETER Experiment Name: At_42deg_Heat_cDNA_P Parameter: Tissue Value: Aerial
  misc_feature: MA Experiment ID: 20000173 Result: Up-regulated in Transcription
  misc_feature: MA Experiment 20000173 PARAMETER Experiment Name: At_42deg_Heat_P Parameter: Age (day) Value: 14
  misc_feature: MA Experiment 20000173 PARAMETER Experiment Name: At_42deg_Heat_P Parameter: Organism Value: A. thaliana
  misc_feature: MA Experiment 20000173 PARAMETER Experiment Name: At_42deg_Heat_P Parameter: Plant Line Value: WS
  misc_feature: MA Experiment 20000173 PARAMETER Experiment Name: At_42deg_Heat_P Parameter: Temperature (deg C) Value: 42 vs. 22
  misc_feature: MA Experiment 20000173 PARAMETER Experiment Name: At_42deg_Heat_P Parameter: Timepoint (hr) Value: 6
  misc_feature: MA Experiment 20000173 PARAMETER Experiment Name: At_42deg_Heat_P Parameter: Tissue Value: Aerial
  misc_feature: MA Experiment ID: 20000180 Result: Down-regulated in Transcription
  misc_feature: MA Experiment 20000180 PARAMETER Experiment Name: At_Germinating_Seeds_P Parameter: Age (hr) Value: 24 vs. 0
  misc_feature: MA Experiment 20000180 PARAMETER Experiment Name: At_Germinating_Seeds_P Parameter: Tissue Value: Germinating Seeds
  misc_feature: MA Experiment ID: 20000456 Result: Up-regulated in Transcription
  misc_feature: MA Experiment 20000456 PARAMETER Experiment Name: At_100uM_BA_P Parameter: Age (day) Value: 14
  misc_feature: MA Experiment 20000456 PARAMETER Experiment Name: At_100uM_BA_P Parameter: Organism Value: A. thaliana
  misc_feature: MA Experiment 20000456 PARAMETER Experiment Name: At_100uM_BA_P Parameter: Plant Line Value: WS
  misc_feature: MA Experiment 20000456 PARAMETER Experiment Name: At_100uM_BA_P Parameter: Timepoint (hr) Value: 6
  misc_feature: MA Experiment 20000456 PARAMETER Experiment Name: At_100uM_BA_P Parameter: Tissue Value: Aerial
  misc_feature: MA Experiment 20000456 PARAMETER Experiment Name: At_100uM_BA_P Parameter: Treatment Value: 100uM BA vs. No Treatment
  misc_feature: MA Experiment ID: 20000794 Result: Down-regulated in Transcription
  misc_feature: MA Experiment 20000794 PARAMETER Experiment Name: At_Petals_P Parameter: Age (day) Value: 23-25 days
  misc_feature: MA Experiment 20000794 PARAMETER Experiment Name: At_Petals_P Parameter: Plant Line Value: WS
  misc_feature: MA Experiment 20000794 PARAMETER Experiment Name: At_Petals_P Parameter: Tissue Value: Petals vs. Whole plant
  misc_feature: MA Experiment ID: 20001248 Result: Up-regulated in Transcription
  misc_feature: MA Experiment 20001248 PARAMETER Experiment Name: At_Far-red-induction_P Parameter: Age (day) Value: 7
  misc_feature: MA Experiment 20001248 PARAMETER Experiment Name: At_Far-red-induction_P Parameter: Light Value: Far-red vs. White
  misc_feature: MA Experiment 20001248 PARAMETER Experiment Name: At_Far-red-induction_P Parameter: Organism Value: A. thaliana
  misc_feature: MA Experiment 20001248 PARAMETER Experiment Name: At_Far-red-induction_P Parameter: Plant Line Value: Columbia
  misc_feature: MA Experiment 20001248 PARAMETER Experiment Name: At_Far-red-induction_P Parameter: Timepoint (hr) Value: 4
  misc_feature: MA Experiment 20001248 PARAMETER Experiment Name: At_Far-red-induction_P Parameter: Tissue Value: Whole Plant
  misc_feature: MA Experiment ID: 20001558 Result: Up-regulated in Transcription
  misc_feature: MA Experiment 20001558 PARAMETER Experiment Name: At_Drought_Soil_Dry_P Parameter: Age (day) Value: 27
  misc_feature: MA Experiment 20001558 PARAMETER Experiment Name: At_Drought_Soil_Dry_P Parameter: Organism Value: A. thaliana
  misc_feature: MA Experiment 20001558 PARAMETER Experiment Name: At_Drought_Soil_Dry_P Parameter: Plant Line Value: WS
  misc_feature: MA Experiment 20001558 PARAMETER Experiment Name: At_Drought_Soil_Dry_P Parameter: Post Timepoint (hr) Value: 6
  misc_feature: MA Experiment 20001558 PARAMETER Experiment Name: At_Drought_Soil_Dry_P Parameter: Post-Treatment Value: Re-Water vs. No Drought
  misc_feature: MA Experiment 20001558 PARAMETER Experiment Name: At_Drought_Soil_Dry_P Parameter: Timepoint (day) Value: 13
  misc_feature: MA Experiment 20001558 PARAMETER Experiment Name: At_Drought_Soil_Dry_P Parameter: Treatment Value: Drought vs. No Drought
  misc_feature: MA Experiment ID: 20001757 Result: Up-regulated in Transcription
  misc_feature: MA Experiment 20001757 PARAMETER Experiment Name: At_50mM_NH4NO3_L-to-H_P Parameter: Timepoint (hr) Value: 6
  misc_feature: MA Experiment 20001757 PARAMETER Experiment Name: At_50mM_NH4NO3_L-to-H_P Parameter: Tissue Value: Leaf
  misc_feature: MA Experiment 20001757 PARAMETER Experiment Name: At_50mM_NH4NO3_L-to-H_P Parameter: Treatment Value: 50mM NH4NO3 vs 100mM Mannitol
agccaccgccgcgcatgtgtctcgttggccgtggttttttttgggttctagtctttcgttcttcgcttttagacaagcaaatatgagacccccagttacaggaggacgtggtggtggaggattcagaggtggaagagatggtggtggaagaggttttggaggtggaagaagctttggaggaggccgtagtggtgacagaggccgtagtgggcctcgcggcagaggacgtggtgcgcctcgtggtcgtggaggaccacctcgtggaggaatgaaaggaggaagcaaagtgattgttgagcctcacagacatgcgggagtgtttattgctaagggtaaagaagatgctcttgtcactaagaatttggttcctggtgaagctgtttacaatgagaagagaatctctgttcagaatgaagatggaactaaggttgaatacagagtttggaatccgtttagatctaagttagctgctgcaattcttggtggtgtcgacaacatttggatcaaacctggtgccaaagttctttacttgggtgctgcttctgggaccactgtctctcatgtttctgacctcgttggccctgagggatgtgtttatgctgttgagttttctcatagaagtggtagagatttggtgaacatggccaagaagagaactaacgttattccaatcattgaagatgctagacatccggctaagtacagaatgctcgtgggcatggttgatgtcatattctctgatgttgctcagccagatcaggcaagaatcttggccctgaatgcctcatttttcctcaaaactggtggacactttgttatctcaatcaaggccaactgtatcgactctacagttgcagcagaagcagtcttccagagcgaggtgaagaagctgcaacaagagcagtttaagccagcagaacaggtgactctcgagccgtttgagcgtgaccatgcctgtgttgttggtggttaccgcatgccgaagaaacaaaagaccccagcctcatagaggaactgtggacagtagtgcctgtgtattaagacttatttactgggttttgtttttatctccttgcttgttgtattaagctagagatggataatgcttttatgtctcatttggaaaattttatcctcgttttagaactaatatatattgatgcaacattttcgtcc

SEQ ID NO: 76709 - protein, 335 aa, Arabidopsis thaliana
  peptide (1)..(335): Ceres Seq. ID no. 11033600
  misc_feature (94)..(326): Pfam Name: Fibrillarin Pfam Description: Fibrillarin
  misc_feature (28)..(335): Homolog of NCBI NO: 30696189 NR Description: fibrillarin 1 (Fib1) (SKIP7) [Arabidopsis >gi|9965653|gb|AAG10103.1|AF233443_1 fibrillarin 1 [Arabidopsis
  misc_feature (28)..(335): Homolog of NCBI NO: 6003681 NR Description: fibrillarin homolog [Arabidopsis thaliana]
  misc_feature (28)..(331): Homolog of NCBI NO: 18416588 NR Description: fibrillarin 2 (AtFib2); protein id: At4g25630.1, by cDNA: 11319., supported by cDNA: gi_15028154, supported by
  misc_feature (28)..(331): Homolog of NCBI NO: 15028155 NR Description: putative fibrillarin 2 protein AtFib2
  misc_feature (34)..(331): Homolog of NCBI NO: 38566188 NR Description: Fibrillarin [Silurana tropicalis]
  misc_feature (34)..(331): Homolog of NCBI NO: 30353806 NR Description: Unknown (protein for MGC:56145) [Danio rerio]
  misc_feature (34)..(331): Homolog of NCBI NO: 27924365 NR Description: Unknown (protein for IMAGE:5543421) [Xenopus
  misc_feature (34)..(331): Homolog of NCBI NO: 34855407 NR Description: similar to fibrillarin [Rattus norvegicus]
  misc_feature (34)..(331): Homolog of NCBI NO: 119856 NR Description: Fibrillarin >gi|2134062|pir||I51417 fibrillarin -
  misc_feature (34)..(331): Homolog of NCBI NO: 30583881 NR Description: Homo sapiens fibrillarin [synthetic construct]
ATAAHVSRWPWFFLGSSLSFFAFRQANMRPPVTGGRGGGGFRGGRDGGGRGFGGGRSFGGGRSGDRGRSGPRGRGRGAPRGRGGPPRGGMKGGSKVIVEPHRHAGVFIAKGKEDALVTKNLVPGEAVYNEKRISVQNEDGTKVEYRVWNPFRSKLAAAILGGVDNIWIKPGAKVLYLGAASGTTVSHVSDLVGPEGCVYAVEFSHRSGRDLVNMAKKRTNVIPIIEDARHPAKYRMLVGMVDVIFSDVAQPDQARILALNASFFLKTGGHFVISIKANCIDSTVAAEAVFQSEVKKLQQEQFKPAEQVTLEPFERDHACVVGGYRMPKKQKTPAS

SEQ ID NO: 76710 - protein, 308 aa, Arabidopsis thaliana
  peptide (1)..(308): Ceres Seq. ID no. 11033601
  misc_feature (67)..(299): Pfam Name: Fibrillarin Pfam Description: Fibrillarin
  misc_feature (1)..(308): Homolog of NCBI NO: 30696189 NR Description: fibrillarin 1 (Fib1) (SKIP7) [Arabidopsis >gi|9965653|gb|AAG10103.1|AF233443_1 fibrillarin 1 [Arabidopsis
  misc_feature (1)..(308): Homolog of NCBI NO: 6003681 NR Description: fibrillarin homolog [Arabidopsis thaliana]
  misc_feature (1)..(304): Homolog of NCBI NO: 18416588 NR Description: fibrillarin 2 (AtFib2); protein id: At4g25630.1, by cDNA: 11319., supported by cDNA: gi_15028154, supported by
  misc_feature (1)..(304): Homolog of NCBI NO: 15028155 NR Description: putative fibrillarin 2 protein AtFib2
  misc_feature (7)..(304): Homolog of NCBI NO: 38566188 NR Description: Fibrillarin [Silurana tropicalis]
  misc_feature (7)..(304): Homolog of NCBI NO: 30353806 NR Description: Unknown (protein for MGC:56145) [Danio rerio]
  misc_feature (7)..(304): Homolog of NCBI NO: 27924365 NR Description: Unknown (protein for IMAGE:5543421) [Xenopus
  misc_feature (7)..(304): Homolog of NCBI NO: 34855407 NR Description: similar to fibrillarin [Rattus norvegicus]
  misc_feature (7)..(304): Homolog of NCBI NO: 119856 NR Description: Fibrillarin >gi|2134062|pir||I51417 fibrillarin -
  misc_feature (7)..(304): Homolog of NCBI NO: 30583881 NR Description: Homo sapiens fibrillarin [synthetic construct]
MRPPVTGGRGGGGFRGGRDGGGRGFGGGRSFGGGRSGDRGRSGPRGRGRGAPRGRGGPPRGGMKGGSKVIVEPHRHAGVFIAKGKEDALVTKNLVPGEAVYNEKRISVQNEDGTKVEYRVWNPFRSKLAAAILGGVDNIWIKPGAKVLYLGAASGTTVSHVSDLVGPEGCVYAVEFSHRSGRDLVNMAKKRTNVIPIIEDARHPAKYRMLVGMVDVIFSDVAQPDQARILALNASFFLKTGGHFVISIKANCIDSTVAAEAVFQSEVKKLQQEQFKPAEQVTLEPFERDHACVVGGYRMPKKQKTPAS

SEQ ID NO: 76711 - protein, 246 aa, Arabidopsis thaliana
  peptide (1)..(246): Ceres Seq. ID no. 11033602
  misc_feature (5)..(237): Pfam Name: Fibrillarin Pfam Description: Fibrillarin
  misc_feature (1)..(246): Homolog of NCBI NO: 30696189 NR Description: fibrillarin 1 (Fib1) (SKIP7) [Arabidopsis >gi|9965653|gb|AAG10103.1|AF233443_1 fibrillarin 1 [Arabidopsis
  misc_feature (1)..(246): Homolog of NCBI NO: 6003681 NR Description: fibrillarin homolog [Arabidopsis thaliana]
  misc_feature (1)..(242): Homolog of NCBI NO: 18416588 NR Description: fibrillarin 2 (AtFib2); protein id: At4g25630.1, by cDNA: 11319., supported by cDNA: gi_15028154, supported by
  misc_feature (1)..(242): Homolog of NCBI NO: 15028155 NR Description: putative fibrillarin 2 protein AtFib2
  misc_feature (1)..(242): Homolog of NCBI NO: 38566188 NR Description: Fibrillarin [Silurana tropicalis]
  misc_feature (1)..(242): Homolog of NCBI NO: 30353806 NR Description: Unknown (protein for MGC:56145) [Danio rerio]
  misc_feature (1)..(242): Homolog of NCBI NO: 27924365 NR Description: Unknown (protein for IMAGE:5543421) [Xenopus
  misc_feature (1)..(242): Homolog of NCBI NO: 34855407 NR Description: similar to fibrillarin [Rattus norvegicus]
  misc_feature (1)..(242): Homolog of NCBI NO: 119856 NR Description: Fibrillarin >gi|2134062|pir||I51417 fibrillarin -
  misc_feature (1)..(242): Homolog of NCBI NO: 30583881 NR Description: Homo sapiens fibrillarin [synthetic construct]
MKGGSKVIVEPHRHAGVFIAKGKEDALVTKNLVPGEAVYNEKRISVQNEDGTKVEYRVWNPFRSKLAAAILGGVDNIWIKPGAKVLYLGAASGTTVSHVSDLVGPEGCVYAVEFSHRSGRDLVNMAKKRTNVIPIIEDARHPAKYRMLVGMVDVIFSDVAQPDQARILALNASFFLKTGGHFVISIKANCIDSTVAAEAVFQSEVKKLQQEQFKPAEQVTLEPFERDHACVVGGYRMPKKQKTPAS

SEQ ID NO: 76712 - DNA, 1570 bp, Arabidopsis thaliana
  misc_feature (1)..(1570): Ceres Seq. ID no. 11033619
  misc_feature: MA Experiment ID: 108605 Result: Down-regulated in Transcription
  misc_feature: MA Experiment 108605 PARAMETER Experiment Name: At_100uM_ABA_cDNA_P Parameter: Timepoint (hr) Value: 6
  misc_feature: MA Experiment 108605 PARAMETER Experiment Name: At_100uM_ABA_cDNA_P Parameter: Tissue Value: Aerial
  misc_feature: MA Experiment 108605 PARAMETER Experiment Name: At_100uM_ABA_cDNA_P Parameter: Treatment Value: 100uM ABA vs. No Treatment
  misc_feature: MA Experiment ID: 20000173 Result: Down-regulated in Transcription
  misc_feature: MA Experiment 20000173 PARAMETER Experiment Name: At_42deg_Heat_P Parameter: Age (day) Value: 14
  misc_feature: MA Experiment 20000173 PARAMETER Experiment Name: At_42deg_Heat_P Parameter: Organism Value: A. thaliana
  misc_feature: MA Experiment 20000173 PARAMETER Experiment Name: At_42deg_Heat_P Parameter: Plant Line Value: WS
  misc_feature: MA Experiment 20000173 PARAMETER Experiment Name: At_42deg_Heat_P Parameter: Temperature (deg C) Value: 42 vs. 22
  misc_feature: MA Experiment 20000173 PARAMETER Experiment Name: At_42deg_Heat_P Parameter: Timepoint (hr) Value: 6
  misc_feature: MA Experiment 20000173 PARAMETER Experiment Name: At_42deg_Heat_P Parameter: Tissue Value: Aerial
  misc_feature: MA Experiment ID: 20000185 Result: Up-regulated in Transcription
  misc_feature: MA Experiment 20000185 PARAMETER Experiment Name: At_Roots__P Parameter: Age (day) Value: 7 vs. 21
  misc_feature: MA Experiment 20000185 PARAMETER Experiment Name: At_Roots__P Parameter: Organism Value: A. thaliana
  misc_feature: MA Experiment 20000185 PARAMETER Experiment Name: At_Roots__P Parameter: Tissue Value: Roots vs. Whole Plant
  misc_feature: MA Experiment ID: 20000227 Result: Up-regulated in Transcription
  misc_feature: MA Experiment 20000227 PARAMETER Experiment Name: At_Root-Tips-vs-Tops_P Parameter: Tissue Value: Root Tips vs. Root Tops
  misc_feature: MA Experiment ID: 20000234 Result: Up-regulated in Transcription
  misc_feature: MA Experiment 20000234 PARAMETER Experiment Name: At_Siliques_P Parameter: Age (day) Value: 21
  misc_feature: MA Experiment 20000234 PARAMETER Experiment Name: At_Siliques_P Parameter: Organism Value: A. thaliana
  misc_feature: MA Experiment 20000234 PARAMETER Experiment Name: At_Siliques_P Parameter: Plant Line Value: WS
  misc_feature: MA Experiment 20000234 PARAMETER Experiment Name: At_Siliques_P Parameter: Tissue Value: Less Than 5mm Siliques vs. Whole Plant
  misc_feature: MA Experiment ID: 20000265 Result: Up-regulated in Transcription
  misc_feature: MA Experiment 20000265 PARAMETER Experiment Name: At_Open_Flower_P Parameter: Age (day) Value: 21
  misc_feature: MA Experiment 20000265 PARAMETER Experiment Name: At_Open_Flower_P Parameter: Plant Line Value: WS
  misc_feature: MA Experiment 20000265 PARAMETER Experiment Name: At_Open_Flower_P Parameter: Tissue Value: Closed Flower vs. Whole Plant
  misc_feature: MA Experiment ID: 20000286 Result: Up-regulated in Transcription
  misc_feature: MA Experiment 20000286 PARAMETER Experiment Name: At_Open_Flower_P Parameter: Age (day) Value: 21
  misc_feature: MA Experiment 20000286 PARAMETER Experiment Name: At_Open_Flower_P Parameter: Plant Line Value: WS
  misc_feature: MA Experiment 20000286 PARAMETER Experiment Name: At_Open_Flower_P Parameter: Tissue Value: Half Open vs. Whole Plant
  misc_feature: MA Experiment ID: 20000439 Result: Up-regulated in Transcription
  misc_feature: MA Experiment 20000439 PARAMETER Experiment Name: At_Roots__P Parameter: Age (day) Value: 14 vs. 21
  misc_feature: MA Experiment 20000439 PARAMETER Experiment Name: At_Roots__P Parameter: Organism Value: A. thaliana
  misc_feature: MA Experiment 20000439 PARAMETER Experiment Name: At_Roots__P Parameter: Tissue Value: Roots vs. Whole Plant
  misc_feature: MA Experiment ID: 20001451 Result: Down-regulated in Transcription
  misc_feature: MA Experiment 20001451 PARAMETER Experiment Name: At_Far-red-induction_P Parameter: Age (day) Value: 7
  misc_feature: MA Experiment 20001451 PARAMETER Experiment Name: At_Far-red-induction_P Parameter: Light Value: Far-red vs. White
  misc_feature: MA Experiment 20001451 PARAMETER Experiment Name: At_Far-red-induction_P Parameter: Organism Value: A. thaliana
  misc_feature: MA Experiment 20001451 PARAMETER Experiment Name: At_Far-red-induction_P Parameter: Plant Line Value: Columbia
  misc_feature: MA Experiment 20001451 PARAMETER Experiment Name: At_Far-red-induction_P Parameter: Timepoint (hr) Value: 24
  misc_feature: MA Experiment 20001451 PARAMETER Experiment Name: At_Far-red-induction_P Parameter: Tissue Value: Whole Plant
  misc_feature: MA Experiment ID: 20001905 Result: Up-regulated in Transcription
  misc_feature: MA Experiment 20001905 PARAMETER Experiment Name: At_Drought_Reproduction_P Parameter: Age (day) Value: 40
  misc_feature: MA Experiment 20001905 PARAMETER Experiment Name: At_Drought_Reproduction_P Parameter: Organism Value: A. thaliana
  misc_feature: MA Experiment 20001905 PARAMETER Experiment Name: At_Drought_Reproduction_P Parameter: Plant Line Value: WS
  misc_feature: MA Experiment 20001905 PARAMETER Experiment Name: At_Drought_Reproduction_P Parameter: Timepoint (day) Value: 10
  misc_feature: MA Experiment 20001905 PARAMETER Experiment Name: At_Drought_Reproduction_P Parameter: Tissue Value: Rosettes
  misc_feature: MA Experiment 20001905 PARAMETER Experiment Name: At_Drought_Reproduction_P Parameter: Treatment Value: Drought vs. No Drought
  misc_feature: MA Experiment ID: 20001911 Result: Down-regulated in Transcription
  misc_feature: MA Experiment 20001911 PARAMETER Experiment Name: At_Drought_Reproduction_P Parameter: Age (day) Value: 40
  misc_feature: MA Experiment 20001911 PARAMETER Experiment Name: At_Drought_Reproduction_P Parameter: Organism Value: A. thaliana
  misc_feature: MA Experiment 20001911 PARAMETER Experiment Name: At_Drought_Reproduction_P Parameter: Plant Line Value: WS
  misc_feature: MA Experiment 20001911 PARAMETER Experiment Name: At_Drought_Reproduction_P Parameter: Timepoint (day) Value: 10
  misc_feature: MA Experiment 20001911 PARAMETER Experiment Name: At_Drought_Reproduction_P Parameter: Tissue Value: Flowers
  misc_feature: MA Experiment 20001911 PARAMETER Experiment Name: At_Drought_Reproduction_P Parameter: Treatment Value: Drought vs. No Drought
accaatctctcacaagtcacaacatatccattttccaggaagctttggaagcacatgatggagcaagtaaagggaaatacactattggacttggccaagattgtttagctttttgcactgagcttgaagatgttatctctatgagtttcaatgcggtgacatcactttttgagaagtataagattgaccctaaccaaatcgggcgtcttgaagtaggaagtgagactgttattgacaaaagcaagtccatcaagaccttcttgatgcagctctttgagaaatgtggaaacactgatgtcgaaggtgttgactcgaccaatgcttgctatggtggaactgcagctttgttaaactgtgtcaattgggttgagagtaactcttgggatggacgttatggcctcgtcatttgtactgacagcgcggtttatgcagaaggacccgcaaggcccactggaggagctgcagcgattgctatgttgataggacctgatgctcctatcgttttcgaaagcaaattgagagcaagccacatggctcatgtctatgacttttacaagcccaatcttgctagcgagtacccggttgttgatggtaagctttcacagacttgctacctcatggctcttgactcctgctataaacatttatgcaacaagttcgagaagatcgagggcaaagagttctccataaatgatgctgattacattgttttccattctccatacaataaacttgtacagaaaagctttgctcgtctcttgtacaacgacttcttgagaaacgcaagctccattgacgaggctgccaaagaaaagttcaccccttattcatctttgacccttgacgagagttaccaaagccgtgatcttgaaaaggtgtcacaacaaattgcgaaaccgttttatgatgctaaagtgcaaccaacgactttaataccaaaggaagtcggtaacatgtacactgcttctctctacgctgcatttgcttccctcatccacaagaaacacaatgatttggcgggaaagcgggtggttatgttctcttatggaagtggctcaaccgcaacaatgttctcattacgcctcaacgacaataagcctcctttcagcatttcaaacattgcatctgtaatggatgttggcggtaaattgaaagctagacatgagtatgcacctgagaagtttgtggagacaatgaagctaatggaacataggtatggagcaaaggactttgtgacaaccaaggagggtattatagatcttttggcaccgggaacttattatctgaaagaggttgattccttgtaccggagattctatggcaagaaaggtgaagatggatctgtagccaatggacactgattcttgaaaaggaacaaatcataaaaagtcacctgaaaatgttatgttttacttgcaccattttaatcgttttataagtttgttgttactttgatttagggacaaagaaggaatgtattctctgtttttatttactgtttgatttactctctcatgcaaatgataatttggaaattattggaatctctattttgtatgtttgtgttctt

SEQ ID NO: 76713 - protein, 452 aa, Arabidopsis thaliana
  peptide (1)..(452): Ceres Seq. ID no. 11033620
  misc_feature (12)..(442): Pfam Name: Hydroxymethylglutaryl-coenzyme A synthase Pfam Description: Hydroxymethylglutaryl-coenzyme A synthase
  misc_feature (12)..(452): Homolog of NCBI NO: 15234313 NR Description: hydroxymethylglutaryl-CoA synthase; protein id: supported by cDNA: 22413., supported by cDNA: gi_4098520
  misc_feature (12)..(452): Homolog of NCBI NO: 1143390 NR Description: hydroxymethylglutaryl-CoA synthase [Arabidopsis
  misc_feature (12)..(452): Homolog of NCBI NO: 7799986 NR Description: HMG-CoA synthase [Brassica juncea]
  misc_feature (12)..(452): Homolog of NCBI NO: 11192005 NR Description: HMG-CoA synthase [Brassica juncea]
  misc_feature (12)..(452): Homolog of NCBI NO: 11192003 NR Description: HMG-CoA synthase [Brassica juncea]
  misc_feature (12)..(451): Homolog of NCBI NO: 11192007 NR Description: HMG-CoA synthase [Brassica juncea]
  misc_feature (47)..(452): Homolog of NCBI NO: 30681902 NR Description: hydroxymethylglutaryl-CoA synthase [Arabidopsis
  misc_feature (12)..(452): Homolog of NCBI NO: 16417956 NR Description: hydroxymethylglutaryl coenzyme A synthase [Hevea
  misc_feature (12)..(452): Homolog of NCBI NO: 14916100 NR Description: hydroxymethylglutaryl coenzyme A synthase [Hevea
  misc_feature (10)..(452): Homolog of NCBI NO: 34902200 NR Description: Putative hydroxymethylglutaryl coenzyme A
QSLTSHNISIFQEALEAHDGASKGKYTIGLGQDCLAFCTELEDVISMSFNAVTSLFEKYKIDPNQIGRLEVGSETVIDKSKSIKTFLMQLFEKCGNTDVEGVDSTNACYGGTAALLNCVNWVESNSWDGRYGLVICTDSAVYAEGPARPTGGAAAIAMLIGPDAPIVFESKLRASHMAHVYDFYKPNLASEYPVVDGKLSQTCYLMALDSCYKHLCNKFEKIEGKEFSINDADYIVFHSPYNKLVQKSFARLLYNDFLRNASSIDEAAKEKFTPYSSLTLDESYQSRDLEKVSQQIAKPFYDAKVQPTTLIPKEVGNMYTASLYAAFASLIHKKHNDLAGKRVVMFSYGSGSTATMFSLRLNDNKPPFSISNIASVMDVGGKLKARHEYAPEKFVETMKLMEHRYGAKDFVTTKEGIIDLLAPGTYYLKEVDSLYRRFYGKKGEDGSVANGH

SEQ ID NO: 76714 - protein, 406 aa, Arabidopsis thaliana
  peptide (1)..(406): Ceres Seq. ID no. 11033621
  misc_feature (1)..(396): Pfam Name: Hydroxymethylglutaryl-coenzyme A synthase Pfam Description: Hydroxymethylglutaryl-coenzyme A synthase
  misc_feature (1)..(406): Homolog of NCBI NO: 15234313 NR Description: hydroxymethylglutaryl-CoA synthase; protein id: supported by cDNA: 22413., supported by cDNA: gi_4098520
  misc_feature (1)..(406): Homolog of NCBI NO: 1143390 NR Description: hydroxymethylglutaryl-CoA synthase [Arabidopsis
  misc_feature (1)..(406): Homolog of NCBI NO: 7799986 NR Description: HMG-CoA synthase [Brassica juncea]
  misc_feature (1)..(406): Homolog of NCBI NO: 11192005 NR Description: HMG-CoA synthase [Brassica juncea]
  misc_feature (1)..(406): Homolog of NCBI NO: 11192003 NR Description: HMG-CoA synthase [Brassica juncea]
  misc_feature (1)..(405): Homolog of NCBI NO: 11192007 NR Description: HMG-CoA synthase [Brassica juncea]
  misc_feature (1)..(406): Homolog of NCBI NO: 30681902 NR Description: hydroxymethylglutaryl-CoA synthase [Arabidopsis
  misc_feature (1)..(406): Homolog of NCBI NO: 16417956 NR Description: hydroxymethylglutaryl coenzyme A synthase [Hevea
  misc_feature (1)..(406): Homolog of NCBI NO: 14916100 NR Description: hydroxymethylglutaryl coenzyme A synthase [Hevea
  misc_feature (1)..(406): Homolog of NCBI NO: 34902200 NR Description: Putative hydroxymethylglutaryl coenzyme A
MSFNAVTSLFEKYKIDPNQIGRLEVGSETVIDKSKSIKTFLMQLFEKCGNTDVEGVDSTNACYGGTAALLNCVNWVESNSWDGRYGLVICTDSAVYAEGPARPTGGAAAIAMLIGPDAPIVFESKLRASHMAHVYDFYKPNLASEYPVVDGKLSQTCYLMALDSCYKHLCNKFEKIEGKEFSINDADYIVFHSPYNKLVQKSFARLLYNDFLRNASSIDEAAKEKFTPYSSLTLDESYQSRDLEKVSQQIAKPFYDAKVQPTTLIPKEVGNMYTASLYAAFASLIHKKHNDLAGKRVVMFSYGSGSTATMFSLRLNDNKPPFSISNIASVMDVGGKLKARHEYAPEKFVETMKLMEHRYGAKDFVTTKEGIIDLLAPGTYYLKEVDSLYRRFYGKKGEDGSVANGH

SEQ ID NO: 76715 - protein, 365 aa, Arabidopsis thaliana
  peptide (1)..(365): Ceres Seq. ID no. 11033622
  misc_feature (1)..(355): Pfam Name: Hydroxymethylglutaryl-coenzyme A synthase Pfam Description: Hydroxymethylglutaryl-coenzyme A synthase
  misc_feature (1)..(365): Homolog of NCBI NO: 15234313 NR Description: hydroxymethylglutaryl-CoA synthase; protein id: supported by cDNA: 22413., supported by cDNA: gi_4098520
  misc_feature (1)..(365): Homolog of NCBI NO: 1143390 NR Description: hydroxymethylglutaryl-CoA synthase [Arabidopsis
  misc_feature (1)..(365): Homolog of NCBI NO: 7799986 NR Description: HMG-CoA synthase [Brassica juncea]
  misc_feature (1)..(365): Homolog of NCBI NO: 11192005 NR Description: HMG-CoA synthase [Brassica juncea]
  misc_feature (1)..(365): Homolog of NCBI NO: 11192003 NR Description: HMG-CoA synthase [Brassica juncea]
  misc_feature (1)..(364): Homolog of NCBI NO: 11192007 NR Description: HMG-CoA synthase [Brassica juncea]
  misc_feature (1)..(365): Homolog of NCBI NO: 30681902 NR Description: hydroxymethylglutaryl-CoA synthase [Arabidopsis
  misc_feature (1)..(365): Homolog of NCBI NO: 16417956 NR Description: hydroxymethylglutaryl coenzyme A synthase [Hevea
  misc_feature (1)..(365): Homolog of NCBI NO: 14916100 NR Description: hydroxymethylglutaryl coenzyme A synthase [Hevea
  misc_feature (1)..(365): Homolog of NCBI NO: 34902200 NR Description: Putative hydroxymethylglutaryl coenzyme A
MQLFEKCGNTDVEGVDSTNACYGGTAALLNCVNWVESNSWDGRYGLVICTDSAVYAEGPARPTGGAAAIAMLIGPDAPIVFESKLRASHMAHVYDFYKPNLASEYPVVDGKLSQTCYLMALDSCYKHLCNKFEKIEGKEFSINDADYIVFHSPYNKLVQKSFARLLYNDFLRNASSIDEAAKEKFTPYSSLTLDESYQSRDLEKVSQQIAKPFYDAKVQPTTLIPKEVGNMYTASLYAAFASLIHKKHNDLAGKRVVMFSYGSGSTATMFSLRLNDNKPPFSISNIASVMDVGGKLKARHEYAPEKFVETMKLMEHRYGAKDFVTTKEGIIDLLAPGTYYLKEVDSLYRRFYGKKGEDGSVANGH

SEQ ID NO: 76716 - DNA, 1351 bp, Arabidopsis thaliana
  misc_feature (1)..(1351): Ceres Seq. ID no. 11033748
  misc_feature: MA Experiment ID: 20000180 Result: Up-regulated in Transcription
  misc_feature: MA Experiment 20000180 PARAMETER Experiment Name: At_Germinating_Seeds_P Parameter: Age (hr) Value: 24 vs. 0
  misc_feature: MA Experiment 20000180 PARAMETER Experiment Name: At_Germinating_Seeds_P Parameter: Tissue Value: Germinating Seeds
  misc_feature: MA Experiment ID: 20000184 Result: Up-regulated in Transcription
  misc_feature: MA Experiment 20000184 PARAMETER Experiment Name: At_Shoots__P Parameter: Age (day) Value: 7
  misc_feature: MA Experiment 20000184 PARAMETER Experiment Name: At_Shoots__P Parameter: Tissue Value: Shoots vs. Whole Plant
  misc_feature: MA Experiment ID: 20000286 Result: Up-regulated in Transcription
  misc_feature: MA Experiment 20000286 PARAMETER Experiment Name: At_Open_Flower_P Parameter: Age (day) Value: 21
  misc_feature: MA Experiment 20000286 PARAMETER Experiment Name: At_Open_Flower_P Parameter: Plant Line Value: WS
  misc_feature: MA Experiment 20000286 PARAMETER Experiment Name: At_Open_Flower_P Parameter: Tissue Value: Half Open vs. Whole Plant
  misc_feature: MA Experiment ID: 20000438 Result: Up-regulated in Transcription
  misc_feature: MA Experiment 20000438 PARAMETER Experiment Name: At_Shoots__P Parameter: Age (day) Value: 14
  misc_feature: MA Experiment 20000438 PARAMETER Experiment Name: At_Shoots__P Parameter: Tissue Value: Shoots vs. Whole Plant
  misc_feature: MA Experiment ID: 20001248 Result: Down-regulated in Transcription
  misc_feature: MA Experiment 20001248 PARAMETER Experiment Name: At_Far-red-induction_P Parameter: Age (day) Value: 7
  misc_feature: MA Experiment 20001248 PARAMETER Experiment Name: At_Far-red-induction_P Parameter: Light Value: Far-red vs. White
  misc_feature: MA Experiment 20001248 PARAMETER Experiment Name: At_Far-red-induction_P Parameter: Organism Value: A. thaliana
  misc_feature: MA Experiment 20001248 PARAMETER Experiment Name: At_Far-red-induction_P Parameter: Plant Line Value: Columbia
  misc_feature: MA Experiment 20001248 PARAMETER Experiment Name: At_Far-red-induction_P Parameter: Timepoint (hr) Value: 4
  misc_feature: MA Experiment 20001248 PARAMETER Experiment Name: At_Far-red-induction_P Parameter: Tissue Value: Whole Plant
gaaccgagtatattggtggtcaccgaagaatggctcgggttcatcgggtccgacccgaaacctaaccggatccatttcgccactctccccaacatcattccctccgagctcgtccgagccaacgacttcatcgccttcatcgacgccgtcctcaccagattagaagagccgttcgaacagctacttgaccgtctaaactctcctcccaccgcaatcatcgccgatacttacatcatttgggcagtacgtgtaggcacaaaaaggaatattccggtggcttctttctggactacgtcagccacgattctctccctcttcattaactccgatcttctcgcaagtcacggccattttccgatcgaaccatcagaatcaaaactagacgagattgttgattacatccccggtttatctccgacaagactcagtgacttacagatcttacacggctatagtcatcaagtcttcaatatattcaaaaagtctttcggtgagctttataaagctaagtatcttctcttcccttctgcttatgagctcgaaccaaaagccattgactttttcacttccaagtttgatttcccggtttactccactggtccgttaatacccttggaagaactatccgttggaaatgagaatagagaacttgattactttaagtggcttgatgagcaacctgaaagctctgttctttacatatctcaagggagttttctttcagtctccgaagctcagatggaggagattgttgtaggagttagagaggctggagttaagttcttttgggtggctcgtgggggtgagttaaagcttaaggaggctcttgaaggtagcttgggtgttgtggtgagctggtgtgatcagctacgtgttttgtgtcatgcggctataggcgggttttggacgcattgcgggtataactcgacattggaagggatatgttcgggagtaccgttgcttacatttcctgttttttgggatcagtttctgaatgctaagatgattgttgaggagtggagagttggaatggggatcgagaggaagaagcagatggagttgttgatagtgagtgatgagatcaaggaattggtaaaaaggtttatggatggagagagtgaagaagggaaagagatgagaagaaggacttgtgatctcagtgagatatgtcgtggagcggttgcgaaaggtggttcttctgatgctaacatcgatgctttcattaaagatattactaagatcgtgtgagttctattgttgttaatgattcaagtctatattagtatttgtataagtttgttaaagattcaaactttgtagagatttaagattgtttgtaaaactgttattt

SEQ ID NO: 76717 - protein, 415 aa, Arabidopsis thaliana
  peptide (1)..(415): Ceres Seq. ID no. 11033749
  misc_feature (6)..(415): Pfam Name: UDP-glucoronosyl and UDP-glucosyl transferase Pfam Description: UDP-glucoronosyl and UDP-glucosyl transferase
  misc_feature (6)..(415): Homolog of NCBI NO: 15227717 NR Description: putative glucosyltransferase; protein id:
  misc_feature (6)..(412): Homolog of NCBI NO: 15227716 NR Description: putative glucosyltransferase; protein id: supported by cDNA: gi_20260553 [Arabidopsis thaliana]
  misc_feature (247)..(415): Homolog of NCBI NO: 22530984 NR Description: putative glucosyltransferase [Arabidopsis >gi|23197784|gb|AAN15419.1| putative glucosyltransferase
  misc_feature (5)..(411): Homolog of NCBI NO: 34909046 NR Description: putative glucosyltransferase [Oryza sativa
  misc_feature (6)..(411): Homolog of NCBI NO: 34909048 NR Description: putative glucosyltransferase [Oryza sativa
  misc_feature (24)..(411): Homolog of NCBI NO: 15228063 NR Description: putative glucosyltransferase; protein id: supported by cDNA: gi_15809993 [Arabidopsis thaliana]
  misc_feature (39)..(414): Homolog of NCBI NO: 7385017 NR Description: UDP-glucose:salicylic acid glucosyltransferase
  misc_feature (24)..(413): Homolog of NCBI NO: 37534766 NR Description: putative putative glucosyltransferase [Oryza
  misc_feature (24)..(408): Homolog of NCBI NO: 15226332 NR Description: putative glucosyltransferase; protein id: supported by cDNA: 13761. [Arabidopsis thaliana]
  misc_feature (24)..(408): Homolog of NCBI NO: 21537408 NR Description: putative glucosyltransferase [Arabidopsis
EPSILVVTEEWLGFIGSDPKPNRIHFATLPNIIPSELVRANDFIAFIDAVLTRLEEPFEQLLDRLNSPPTAIIADTYIIWAVRVGTKRNIPVASFWTTSATILSLFINSDLLASHGHFPIEPSESKLDEIVDYIPGLSPTRLSDLQILHGYSHQVFNIFKKSFGELYKAKYLLFPSAYELEPKAIDFFTSKFDFPVYSTGPLIPLEELSVGNENRELDYFKWLDEQPESSVLYISQGSFLSVSEAQMEEIVVGVREAGVKFFWVARGGELKLKEALEGSLGVVVSWCDQLRVLCHAAIGGFWTHCGYNSTLEGICSGVPLLTFPVFWDQFLNAKMIVEEWRVGMGIERKKQMELLIVSDEIKELVKRFMDGESEEGKEMRRRTCDLSEICRGAVAKGGSSDANIDAFIKDITKIV

SEQ ID NO: 76718 - DNA, 809 bp, Arabidopsis thaliana
  misc_feature (1)..(809): Ceres Seq. ID no. 11033782
  misc_feature: MA Experiment ID: 108464 Result: Up-regulated in Transcription
  misc_feature: MA Experiment 108464 PARAMETER Experiment Name: At_Germinating_Seeds_cDNA_P Parameter: Age (day) Value: 4 vs. 0
  misc_feature: MA Experiment 108464 PARAMETER Experiment Name: At_Germinating_Seeds_cDNA_P Parameter: Tissue Value: Germinating Seeds
  misc_feature: MA Experiment ID: 108488 Result: Down-regulated in Transcription
  misc_feature: MA Experiment ID: 108573 Result: Down-regulated in Transcription
  misc_feature: MA Experiment 108573 PARAMETER Experiment Name: At_Drought_cDNA_P Parameter: Timepoint (hr) Value: 6
  misc_feature: MA Experiment 108573 PARAMETER Experiment Name: At_Drought_cDNA_P Parameter: Tissue Value: Aerial
  misc_feature: MA Experiment 108573 PARAMETER Experiment Name: At_Drought_cDNA_P Parameter: Treatment Value: Drought vs. No Drought
  misc_feature: MA Experiment ID: 108595 Result: Up-regulated in Transcription
  misc_feature: MA Experiment 108595 PARAMETER Experiment Name: At_Ler-pi_Ovule_cDNA_P Parameter: Plant Line Value: null
  misc_feature: MA Experiment ID: 20000069 Result: Up-regulated in Transcription
  misc_feature: MA Experiment 20000069 PARAMETER Experiment Name: At_100uM_ABA_Mutants_cDNA_P Parameter: Plant Line Value: CS23
  misc_feature: MA Experiment 20000069 PARAMETER Experiment Name: At_100uM_ABA_Mutants_cDNA_P Parameter: Timepoint (hr) Value: 6
  misc_feature: MA Experiment 20000069 PARAMETER Experiment Name: At_100uM_ABA_Mutants_cDNA_P Parameter: Tissue Value: Aerial
  misc_feature: MA Experiment 20000069 PARAMETER Experiment Name: At_100uM_ABA_Mutants_cDNA_P Parameter: Treatment Value: 100uM ABA vs. No Treatment
  misc_feature: MA Experiment ID: 20000070 Result: Up-regulated in Transcription
  misc_feature: MA Experiment 20000070 PARAMETER Experiment Name: At_100uM_ABA_Mutants_cDNA_P Parameter: Plant Line Value: CS24
  misc_feature: MA Experiment 20000070 PARAMETER Experiment Name: At_100uM_ABA_Mutants_cDNA_P Parameter: Timepoint (hr) Value: 6
  misc_feature: MA Experiment 20000070 PARAMETER Experiment Name: At_100uM_ABA_Mutants_cDNA_P Parameter: Tissue Value: Aerial
  misc_feature: MA Experiment 20000070 PARAMETER Experiment Name: At_100uM_ABA_Mutants_cDNA_P Parameter: Treatment Value: 100uM ABA vs. No Treatment
  misc_feature: MA Experiment ID: 20000071 Result: Up-regulated in Transcription
  misc_feature: MA Experiment 20000071 PARAMETER Experiment Name: At_100uM_ABA_Mutants_cDNA_P Parameter: Plant Line Value: CS8104
  misc_feature: MA Experiment 20000071 PARAMETER Experiment Name: At_100uM_ABA_Mutants_cDNA_P Parameter: Timepoint (hr) Value: 6
  misc_feature: MA Experiment 20000071 PARAMETER Experiment Name: At_100uM_ABA_Mutants_cDNA_P Parameter: Tissue Value: Aerial
  misc_feature: MA Experiment 20000071 PARAMETER Experiment Name: At_100uM_ABA_Mutants_cDNA_P Parameter: Treatment Value: 100uM ABA vs. No Treatment
  misc_feature: MA Experiment ID: 20000072 Result: Up-regulated in Transcription
  misc_feature: MA Experiment 20000072 PARAMETER Experiment Name: At_100uM_ABA_Mutants_cDNA_P Parameter: Plant Line Value: CS8105
  misc_feature: MA Experiment 20000072 PARAMETER Experiment Name: At_100uM_ABA_Mutants_cDNA_P Parameter: Timepoint (hr) Value: 6
  misc_feature: MA Experiment 20000072 PARAMETER Experiment Name: At_100uM_ABA_Mutants_cDNA_P Parameter: Tissue Value: Aerial
  misc_feature: MA Experiment 20000072 PARAMETER Experiment Name: At_100uM_ABA_Mutants_cDNA_P Parameter: Treatment Value: 100uM ABA vs. No Treatment
  misc_feature: MA Experiment ID: 20000087 Result: Up-regulated in Transcription
  misc_feature: MA Experiment 20000087 PARAMETER Experiment Name: At_100uM_ABA_Mutants_cDNA_P Parameter: Plant Line Value: WS
  misc_feature: MA Experiment 20000087 PARAMETER Experiment Name: At_100uM_ABA_Mutants_cDNA_P Parameter: Timepoint (hr) Value: 6
  misc_feature: MA Experiment 20000087 PARAMETER Experiment Name: At_100uM_ABA_Mutants_cDNA_P Parameter: Tissue Value: Aerial
  misc_feature: MA Experiment 20000087 PARAMETER Experiment Name: At_100uM_ABA_Mutants_cDNA_P Parameter: Treatment Value: 100uM ABA vs. No Treatment
  misc_feature: MA Experiment ID: 20000088 Result: Up-regulated in Transcription
  misc_feature: MA Experiment 20000088 PARAMETER Experiment Name: At_100uM_ABA_Mutants_cDNA_P Parameter: Plant Line Value: Landsberg
  misc_feature: MA Experiment 20000088 PARAMETER Experiment Name: At_100uM_ABA_Mutants_cDNA_P Parameter: Timepoint (hr) Value: 6
  misc_feature: MA Experiment 20000088 PARAMETER Experiment Name: At_100uM_ABA_Mutants_cDNA_P Parameter: Tissue Value: Aerial
  misc_feature: MA Experiment 20000088 PARAMETER Experiment Name: At_100uM_ABA_Mutants_cDNA_P Parameter: Treatment Value: 100uM ABA vs. No Treatment
  misc_feature: MA Experiment ID: 20000089 Result: Up-regulated in Transcription
  misc_feature: MA Experiment ID: 20000090 Result: Up-regulated in Transcription
  misc_feature: MA Experiment ID: 20000111 Result: Down-regulated in Transcription
  misc_feature: MA Experiment 20000111 PARAMETER Experiment Name: At_42deg_Heat_cDNA_P Parameter: Temperature (deg C) Value: 42 vs. 22
  misc_feature: MA Experiment 20000111 PARAMETER Experiment Name: At_42deg_Heat_cDNA_P Parameter: Timepoint (hr) Value: 6
  misc_feature: MA Experiment 20000111 PARAMETER Experiment Name: At_42deg_Heat_cDNA_P Parameter: Tissue Value: Aerial
  misc_feature: MA Experiment ID: 20000113 Result: Down-regulated in Transcription
  misc_feature: MA Experiment 20000113 PARAMETER Experiment Name: At_42deg_Heat_cDNA_P Parameter: Temperature (deg C) Value: 42 vs. 22
  misc_feature: MA Experiment 20000113 PARAMETER Experiment Name: At_42deg_Heat_cDNA_P Parameter: Timepoint (hr) Value: 8
  misc_feature: MA Experiment 20000113 PARAMETER Experiment Name: At_42deg_Heat_cDNA_P Parameter: Tissue Value: Aerial
  misc_feature: MA Experiment ID: 20000117 Result: Up-regulated in Transcription
  misc_feature: MA Experiment 20000117 PARAMETER Experiment Name: At_100uM_ABA_Mutants_cDNA_P Parameter: Plant Line Value: Columbia
  misc_feature: MA Experiment 20000117 PARAMETER Experiment Name: At_100uM_ABA_Mutants_cDNA_P Parameter: Timepoint (hr) Value: 6
  misc_feature: MA Experiment 20000117 PARAMETER Experiment Name: At_100uM_ABA_Mutants_cDNA_P Parameter: Tissue Value: Aerial
  misc_feature: MA Experiment 20000117 PARAMETER Experiment Name: At_100uM_ABA_Mutants_cDNA_P Parameter: Treatment Value: 100uM ABA vs. No Treatment
  misc_feature: MA Experiment ID: 20000173 Result: Down-regulated in Transcription
  misc_feature: MA Experiment 20000173 PARAMETER Experiment Name: At_42deg_Heat_P Parameter: Age (day) Value: 14
  misc_feature: MA Experiment 20000173 PARAMETER Experiment Name: At_42deg_Heat_P Parameter: Organism Value: A. thaliana
  misc_feature: MA Experiment 20000173 PARAMETER Experiment Name: At_42deg_Heat_P Parameter: Plant Line Value: WS
  misc_feature: MA Experiment 20000173 PARAMETER Experiment Name: At_42deg_Heat_P Parameter: Temperature (deg C) Value: 42 vs. 22
  misc_feature: MA Experiment 20000173 PARAMETER Experiment Name: At_42deg_Heat_P Parameter: Timepoint (hr) Value: 6
  misc_feature: MA Experiment 20000173 PARAMETER Experiment Name: At_42deg_Heat_P Parameter: Tissue Value: Aerial
  misc_feature: MA Experiment ID: 20000235 Result: Down-regulated in Transcription
  misc_feature: MA Experiment 20000235 PARAMETER Experiment Name: At_Siliques_P Parameter: Age (day) Value: 21
  misc_feature: MA Experiment 20000235 PARAMETER Experiment Name: At_Siliques_P Parameter: Organism Value: A. thaliana
  misc_feature: MA Experiment 20000235 PARAMETER Experiment Name: At_Siliques_P Parameter: Plant Line Value: WS
  misc_feature: MA Experiment 20000235 PARAMETER Experiment Name: At_Siliques_P Parameter: Tissue Value: 5-10mm Siliques vs. Whole Plant
  misc_feature: MA Experiment ID: 20000437 Result: Up-regulated in Transcription
  misc_feature: MA Experiment 20000437 PARAMETER Experiment Name: At_Drought_P Parameter: Age (day) Value: 8
  misc_feature: MA Experiment 20000437 PARAMETER Experiment Name: At_Drought_P Parameter: Organism Value: A. thaliana
  misc_feature: MA Experiment 20000437 PARAMETER Experiment Name: At_Drought_P Parameter: Plant Line Value: WS
  misc_feature: MA Experiment 20000437 PARAMETER Experiment Name: At_Drought_P Parameter: Timepoint (hr) Value: 24
  misc_feature: MA Experiment 20000437 PARAMETER Experiment Name: At_Drought_P Parameter: Tissue Value: Whole Plant
  misc_feature: MA Experiment 20000437 PARAMETER Experiment Name: At_Drought_P Parameter: Treatment Value: Drought vs. No Drought
  misc_feature: MA Experiment ID: 20001248 Result: Up-regulated in Transcription
  misc_feature: MA Experiment 20001248 PARAMETER Experiment Name: At_Far-red-induction_P Parameter: Age (day) Value: 7
  misc_feature: MA Experiment 20001248 PARAMETER Experiment Name: At_Far-red-induction_P Parameter: Light Value: Far-red vs. White
  misc_feature: MA Experiment 20001248 PARAMETER Experiment Name: At_Far-red-induction_P Parameter: Organism Value: A. thaliana
  misc_feature: MA Experiment 20001248 PARAMETER Experiment Name: At_Far-red-induction_P Parameter: Plant Line Value: Columbia
  misc_feature: MA Experiment 20001248 PARAMETER Experiment Name: At_Far-red-induction_P Parameter: Timepoint (hr) Value: 4
  misc_feature: MA Experiment 20001248 PARAMETER Experiment Name: At_Far-red-induction_P Parameter: Tissue Value: Whole Plant
  misc_feature: MA Experiment ID: 20001451 Result: Up-regulated in Transcription
  misc_feature: MA Experiment 20001451 PARAMETER Experiment Name: At_Far-red-induction_P Parameter: Age (day) Value: 7
  misc_feature: MA Experiment 20001451 PARAMETER Experiment Name: At_Far-red-induction_P Parameter: Light Value: Far-red vs. White
  misc_feature: MA Experiment 20001451 PARAMETER Experiment Name: At_Far-red-induction_P Parameter: Organism Value: A. thaliana
  misc_feature: MA Experiment 20001451 PARAMETER Experiment Name: At_Far-red-induction_P Parameter: Plant Line Value: Columbia
  misc_feature: MA Experiment 20001451 PARAMETER Experiment Name: At_Far-red-induction_P Parameter: Timepoint (hr) Value: 24
  misc_feature: MA Experiment 20001451 PARAMETER Experiment Name: At_Far-red-induction_P Parameter: Tissue Value: Whole Plant
  misc_feature: MA Experiment ID: 20001558 Result: Down-regulated in Transcription
  misc_feature: MA Experiment 20001558 PARAMETER Experiment Name: At_Drought_Soil_Dry_P Parameter: Age (day) Value: 27
  misc_feature: MA Experiment 20001558 PARAMETER Experiment Name: At_Drought_Soil_Dry_P Parameter: Organism Value: A. thaliana
  misc_feature: MA Experiment 20001558 PARAMETER Experiment Name: At_Drought_Soil_Dry_P Parameter: Plant Line Value: WS
  misc_feature: MA Experiment 20001558 PARAMETER Experiment Name: At_Drought_Soil_Dry_P Parameter: Post Timepoint (hr) Value: 6
  misc_feature: MA Experiment 20001558 PARAMETER Experiment Name: At_Drought_Soil_Dry_P Parameter: Post-Treatment Value: Re-Water vs. No Drought
  misc_feature: MA Experiment 20001558 PARAMETER Experiment Name: At_Drought_Soil_Dry_P Parameter: Timepoint (day) Value: 13
  misc_feature: MA Experiment 20001558 PARAMETER Experiment Name: At_Drought_Soil_Dry_P Parameter: Treatment Value: Drought vs. No Drought
tccccccccccccgacaaagcgtacaaatcacaaacacgtagttattctctctttactctctctatttctctctcttcaaaccctacgaagatcttcttcttcttcttcaagaatcgatcatgaaaggagctaaatctaaggctgaaaccaggagcacaaagctctctgtgactaagaagcctgctaagggagccaaaggtgctgctaaagatccaaacaaacctaagaggccttccagtgccttcttcgttttcatggaagatttccgtgtgacgtacaaggaggagcaccctaagaacaagtctgttgctgctgttggcaaagctggtggtgaaaagtggaaatccttgtctgactctgagaaggctccttatgtggctaaggctgacaagcgcaaggttgagtatgagaagaacatgaaagcctacaacaagaaattggaggaaggccctaaggaggatgaggaatctgacaagtcagtttcagaggttaacgatgaggatgatgctgaggatggcagtgaagaggaggaagacgatgattaagaagttgaagttgtggtagcgtaatatagaaggctgcaaggaatctctcggatgtttttatctcctctcttaaaatgttaattcgggtggttaaagtggtttttttttttttctttttctttttcttactgatgtttcgttttagtaaactattacctatctcccactgattctacgggtaatggaaaaagtgaatgtagaatgtttagatggtgaaatgagagatttgtagctctatataatgaatgatttagtttttaatt

SEQ ID NO: 76719 - protein, 141 aa, Arabidopsis thaliana; identical to SEQ ID NO: 28781
  peptide (1)..(141): Ceres Seq. ID no. 11033783
  misc_feature (35)..(104): Pfam Name: HMG (high mobility group) box Pfam Description: HMG (high mobility group) box
  misc_feature (1)..(141): Homolog of NCBI NO: 25402921 NR Description: protein F2D10.18 [imported] - Arabidopsis >gi|8886929|gb|AAF80615.1|AC069251_8 F2D10.18 [Arabidopsis
  misc_feature (1)..(141): Homolog of NCBI NO: 18394900 NR Description: Expressed protein; protein id: At1g20696.1, by cDNA: 11938., supported by cDNA: gi_15724173, supported by gi_20453324 [Arabidopsis thaliana] >gi|11346369|pir||T51598 high
  misc_feature (1)..(141): Homolog of NCBI NO: 18394898 NR Description: Expressed protein; protein id: At1g20693.1, by cDNA: 11615., supported by cDNA: gi_17104698 [Arabidopsis
  misc_feature (1)..(136): Homolog of NCBI NO: 25402921 NR Description: protein F2D10.18 [imported] - Arabidopsis >gi|8886929|gb|AAF80615.1|AC069251_8 F2D10.18 [Arabidopsis
  misc_feature (1)..(140): Homolog of NCBI NO: 7446212 NR Description: high mobility group protein - potato

SEQ ID NO: 76720 - protein, 96 aa, Arabidopsis thaliana; identical to SEQ ID NO: 28782
  peptide (1)..(96): Ceres Seq. ID no. 11033784
  misc_feature (1)..(59): Pfam Name: HMG (high mobility group) box Pfam Description: HMG (high mobility group) box
  misc_feature (1)..(96): Homolog of NCBI NO: 25402921 NR Description: protein F2D10.18 [imported] - Arabidopsis >gi|8886929|gb|AAF80615.1|AC069251_8 F2D10.18 [Arabidopsis
  misc_feature (1)..(96): Homolog of NCBI NO: 18394900 NR Description: Expressed protein; protein id: At1g20696.1, by cDNA: 11938., supported by cDNA: gi_15724173, supported by gi_20453324 [Arabidopsis thaliana] >gi|11346369|pir||T51598 high
  misc_feature (1)..(96): Homolog of NCBI NO: 18394898 NR Description: Expressed protein; protein id: At1g20693.1, by cDNA: 11615., supported by cDNA: gi_17104698 [Arabidopsis
  misc_feature (1)..(91): Homolog of NCBI NO: 25402921 NR Description: protein F2D10.18 [imported] - Arabidopsis >gi|8886929|gb|AAF80615.1|AC069251_8 F2D10.18 [Arabidopsis
  misc_feature (1)..(95): Homolog of NCBI NO: 7446212 NR Description: high mobility group protein - potato

SEQ ID NO: 76721 - DNA, 1251 bp, Arabidopsis thaliana
  misc_feature (1)..(1251): Ceres Seq. ID no. 11034106
  misc_feature: MA Experiment ID: 108579 Result: Down-regulated in Transcription
  misc_feature: MA Experiment 108579 PARAMETER Experiment Name: At_4deg_Cold_cDNA_P Parameter: Temperature (deg C) Value: 4 vs. 22
  misc_feature: MA Experiment 108579 PARAMETER Experiment Name: At_4deg_Cold_cDNA_P Parameter: Timepoint (hr) Value: 6
  misc_feature: MA Experiment 108579 PARAMETER Experiment Name: At_4deg_Cold_cDNA_P Parameter: Tissue Value: Aerial
  misc_feature: MA Experiment ID: 20001451 Result: Up-regulated in Transcription
  misc_feature: MA Experiment 20001451 PARAMETER Experiment Name: At_Far-red-induction_P Parameter: Age (day) Value: 7
  misc_feature: MA Experiment 20001451 PARAMETER Experiment Name: At_Far-red-induction_P Parameter: Light Value: Far-red vs. White
  misc_feature: MA Experiment 20001451 PARAMETER Experiment Name: At_Far-red-induction_P Parameter: Organism Value: A. thaliana
  misc_feature: MA Experiment 20001451 PARAMETER Experiment Name: At_Far-red-induction_P Parameter: Plant Line Value: Columbia
  misc_feature: MA Experiment 20001451 PARAMETER Experiment Name: At_Far-red-induction_P Parameter: Timepoint (hr) Value: 24
  misc_feature: MA Experiment 20001451 PARAMETER Experiment Name: At_Far-red-induction_P Parameter: Tissue Value: Whole Plant
  misc_feature: Pfam Name: adh_short Pfam Description: short chain dehydrogenase
aatccgagaaaatgctgactctactcttcttctctctcggagcgcttcttcttatcgttctgctcttcaaatttgcattcgccgatggagattttaccttgatttcgaagaagcatgtgaagcgtgaggccatacaaggcaaggtcgtctggatcacaggggctagccgtggaattggtgaaattcttgctaaacagtttgcaagtttagatgccaagcttattctctctgctaggaataaagctgaactggatcgggttaagagtgagcttaaaggtaaatttgcaccagaagatgtcaaggttttgcctttagatttagctagcggcgaagagtcactcaaacatgttgtagagcaagcagtgtcgcttttccctggagctggtgttgattatttggttcacaatgctgcctttgagcgtccgaaatccaaggcatcggatgcaagtgaggaaactctcaagactacattcgatgttaatgtctttgggacgatatctctgacaaagttggtagctcctcatatgctaaaacaaggagggggtcattttgttgtgataagcagtgctgcaggaaaggtaccatcacctggacaggctatatattctgcttcaaaacatgctcttcatggctacttccacagcttgcgttctgagttctgtcagaagggaatcaaggttaccgtcgtttgtcctggtccaatagaaacctggaatggtacaggaacatcaacttcggaagacagcaagtctcctgagaaacgtgtgtcatctgaacgatgtgcagagctgactataatcgctgcatctcataacttgaaggaagcttggatttcatatcagccagtactactcgtgatgtatctagtgcagtacatgccttcccttggcttctggctcatggacaaggttggaggaaagcgtgtggaggtcgcggaaaagaaaggcaacacatactcgtgggatttactgttcgggaagaagactaaaacaaactgaagctgattctctagaagatacacatagatgtggttggttgagccttagtccgtaaatgtggttggtgtttgtttgctagtttgattgttaaataactaccaaagcgtcgaaaaatgttttgttgccaaaaaaaaaaaacaattcactcaggtactggacacattgataatgataatcgctgaatggtgacttgcatggctggtagtcattaaggatgatctgcgagcaaggcacaatgctggatataattgtg

SEQ ID NO: 76722 - protein, 331 aa, Arabidopsis thaliana
  peptide (1)..(331): Ceres Seq. ID no. 11034107
  misc_feature: Pfam Name: adh_short Pfam Description: short chain dehydrogenase
  misc_feature (4)..(331): Homolog of NCBI NO: 30678824 NR Description: short-chain dehydrogenase/reductase family [Arabidopsis thaliana] >gi|22022575|gb|AAM83244.1| [Arabidopsis thaliana] >gi|23308299|gb|AAN18119.1|
  misc_feature (4)..(252): Homolog of NCBI NO: 6017123 NR Description: unknown protein [Arabidopsis thaliana]
  misc_feature (252)..(331): Homolog of NCBI NO: 6017123 NR Description: unknown protein [Arabidopsis thaliana]
  misc_feature (3)..(309): Homolog of NCBI NO: 7706318 NR Description: CGI-86 protein [Homo sapiens]
  misc_feature (142)..(252): Homolog of NCBI NO: 22330816 NR Description: unknown protein; protein id: At3g03350.1
  misc_feature (48)..(309): Homolog of NCBI NO: 6318548 NR Description: retinal short-chain dehydrogenase/reductase
  misc_feature (11)..(311): Homolog of NCBI NO: 34865689 NR Description: similar to CGI-86 protein [Rattus norvegicus]
  misc_feature (5)..(309): Homolog of NCBI NO: 34395851 NR Description: Retinal short-chain dehydrogenase/reductase 4
  misc_feature (5)..(309): Homolog of NCBI NO: 34865424 NR Description: similar to retinal short-chain
  misc_feature (48)..(309): Homolog of NCBI NO: 21313492 NR Description: RIKEN cDNA 2310016E22 [Mus musculus] unnamed protein product [Mus musculus]
SEKMLTLLFFSLGALLLIVLLFKFAFADGDFTLISKKHVKREAIQGKVVWITGASRGIGEILAKQFASLDAKLILSARNKAELDRVKSELKGKFAPEDVKVLPLDLASGEESLKHVVEQAVSLFPGAGVDYLVHNAAFERPKSKASDASEETLKTTFDVNVFGTISLTKLVAPHMLKQGGGHFVVISSAAGKVPSPGQAIYSASKHALHGYFHSLRSEFCQKGIKVTVVCPGPIETWNGTGTSTSEDSKSPEKRVSSERCAELTIIAASHNLKEAWISYQPVLLVMYLVQYMPSLGFWLMDKVGGKRVEVAEKKGNTYSWDLLFGKKTKTN

SEQ ID NO: 76723 - protein, 328 aa, Arabidopsis thaliana; identical to SEQ ID NO: 35978
  peptide (1)..(328): Ceres Seq. ID no. 11034108
  misc_feature: Pfam Name: adh_short Pfam Description: short chain dehydrogenase
  misc_feature (1)..(328): Homolog of NCBI NO: 30678824 NR Description: short-chain dehydrogenase/reductase family [Arabidopsis thaliana] >gi|22022575|gb|AAM83244.1| [Arabidopsis thaliana] >gi|23308299|gb|AAN18119.1|
  misc_feature (1)..(249): Homolog of NCBI NO: 6017123 NR Description: unknown protein [Arabidopsis thaliana]
  misc_feature (249)..(328): Homolog of NCBI NO: 6017123 NR Description: unknown protein [Arabidopsis thaliana]
  misc_feature (1)..(306): Homolog of NCBI NO: 7706318 NR Description: CGI-86 protein [Homo sapiens]
  misc_feature (139)..(249): Homolog of NCBI NO: 22330816 NR Description: unknown protein; protein id: At3g03350.1
  misc_feature (45)..(306): Homolog of NCBI NO: 6318548 NR Description: retinal short-chain dehydrogenase/reductase
  misc_feature (8)..(308): Homolog of NCBI NO: 34865689 NR Description: similar to CGI-86 protein [Rattus norvegicus]
  misc_feature (2)..(306): Homolog of NCBI NO: 34395851 NR Description: Retinal short-chain dehydrogenase/reductase 4
  misc_feature (2)..(306): Homolog of NCBI NO: 34865424 NR Description: similar to retinal short-chain
  misc_feature (45)..(306): Homolog of NCBI NO: 21313492 NR Description: RIKEN cDNA 2310016E22 [Mus musculus] unnamed protein product [Mus musculus]

SEQ ID NO: 76724 - DNA, 3816 bp, Arabidopsis thaliana
  misc_feature (1)..(3816): Ceres Seq. ID no. 11034675
  misc_feature: MA Experiment ID: 20000436 Result: Up-regulated in Transcription
  misc_feature: MA Experiment 20000436 PARAMETER Experiment Name: At_Drought_P Parameter: Age (day) Value: 7
  misc_feature: MA Experiment 20000436 PARAMETER Experiment Name: At_Drought_P Parameter: Organism Value: A. thaliana
  misc_feature: MA Experiment 20000436 PARAMETER Experiment Name: At_Drought_P Parameter: Plant Line Value: WS
  misc_feature: MA Experiment 20000436 PARAMETER Experiment Name: At_Drought_P Parameter: Timepoint (hr) Value: 12
  misc_feature: MA Experiment 20000436 PARAMETER Experiment Name: At_Drought_P Parameter: Tissue Value: Whole Plant
  misc_feature: MA Experiment 20000436 PARAMETER Experiment Name: At_Drought_P Parameter: Treatment Value: Drought vs. No Drought
  misc_feature: MA Experiment ID: 20000437 Result: Up-regulated in Transcription
  misc_feature: MA Experiment 20000437 PARAMETER Experiment Name: At_Drought_P Parameter: Age (day) Value: 8
  misc_feature: MA Experiment 20000437 PARAMETER Experiment Name: At_Drought_P Parameter: Organism Value: A. thaliana
  misc_feature: MA Experiment 20000437 PARAMETER Experiment Name: At_Drought_P Parameter: Plant Line Value: WS
  misc_feature: MA Experiment 20000437 PARAMETER Experiment Name: At_Drought_P Parameter: Timepoint (hr) Value: 24
  misc_feature: MA Experiment 20000437 PARAMETER Experiment Name: At_Drought_P Parameter: Tissue Value: Whole Plant
  misc_feature: MA Experiment 20000437 PARAMETER Experiment Name: At_Drought_P Parameter: Treatment Value: Drought vs. No Drought
  misc_feature: MA Experiment ID: 20001248 Result: Up-regulated in Transcription
  misc_feature: MA Experiment 20001248 PARAMETER Experiment Name: At_Far-red-induction_P Parameter: Age (day) Value: 7
  misc_feature: MA Experiment 20001248 PARAMETER Experiment Name: At_Far-red-induction_P Parameter: Light Value: Far-red vs. White
  misc_feature: MA Experiment 20001248 PARAMETER Experiment Name: At_Far-red-induction_P Parameter: Organism Value: A. thaliana
  misc_feature: MA Experiment 20001248 PARAMETER Experiment Name: At_Far-red-induction_P Parameter: Plant Line Value: Columbia
  misc_feature: MA Experiment 20001248 PARAMETER Experiment Name: At_Far-red-induction_P Parameter: Timepoint (hr) Value: 4
  misc_feature: MA Experiment 20001248 PARAMETER Experiment Name: At_Far-red-induction_P Parameter: Tissue Value: Whole Plant
  misc_feature: MA Experiment ID: 20001450 Result: Up-regulated in Transcription
  misc_feature: MA Experiment 20001450 PARAMETER Experiment Name: At_Far-red-induction_P Parameter: Age (day) Value: 7
  misc_feature: MA Experiment 20001450 PARAMETER Experiment Name: At_Far-red-induction_P Parameter: Light Value: Far-red vs. White
  misc_feature: MA Experiment 20001450 PARAMETER Experiment Name: At_Far-red-induction_P Parameter: Organism Value: A. thaliana
  misc_feature: MA Experiment 20001450 PARAMETER Experiment Name: At_Far-red-induction_P Parameter: Plant Line Value: Columbia
  misc_feature: MA Experiment 20001450 PARAMETER Experiment Name: At_Far-red-induction_P Parameter: Timepoint (hr) Value: 8
  misc_feature: MA Experiment 20001450 PARAMETER Experiment Name: At_Far-red-induction_P Parameter: Tissue Value: Whole Plant
  misc_feature: MA Experiment ID: 20001904 Result: Up-regulated in Transcription
  misc_feature: MA Experiment 20001904 PARAMETER Experiment Name: At_Drought_Reproduction_P Parameter: Age (day) Value: 37
  misc_feature: MA Experiment 20001904 PARAMETER Experiment Name: At_Drought_Reproduction_P Parameter: Organism Value: A. thaliana
  misc_feature: MA Experiment 20001904 PARAMETER Experiment Name: At_Drought_Reproduction_P Parameter: Plant Line Value: WS
  misc_feature: MA Experiment 20001904 PARAMETER Experiment Name: At_Drought_Reproduction_P Parameter: Timepoint (day) Value: 7
  misc_feature: MA Experiment 20001904 PARAMETER Experiment Name: At_Drought_Reproduction_P Parameter: Tissue Value: Rosettes
  misc_feature: MA Experiment 20001904 PARAMETER Experiment Name: At_Drought_Reproduction_P Parameter: Treatment Value: Drought vs. No Drought
actcaaaagtagtaacaactaagaatggaagatatcatcatcggcgtggtggctctcgccgcggttctccttttcttcctctaccaaaaaccgaaaaccaaacggtacaagctacctccagggccatcaccacttccggtgatcggaaacctccttcagcttcagaagcttaacccacaacgcttcttcgctggatgggccaaaaaatacggtccaatcttgtcatacaggataggaagcagaacaatggtggtgatatcttcagctgagctagctaaagagcttctcaagacgcaagatgtcaactttgcggaccggcctccacatcgtggccatgagttcatatcctacggcaggcgtgacatggcattaaaccactacacaccgtattaccgagagataaggaagatggggatgaaccacttgttctcaccaacacgtgtggccacctttaagcatgtacgagaggaagaggctaggaggatgatggataagatcaacaaggccgcggataaatccgaagtagtcgatataagtgagcttatgttgaccttcacgaactcggttgtgtgtagacaagcgttcgggaagaagtacaatgaagatggagaagagatgaagaggttcatcaagattctttatgggactcaaagcgttttggggaagatctttttctctgattttttcccatattgtggctttcttgatgatttatcaggcctcacagcttatatgaaagagtgtttcgaaagacaagacacttatattcaagaggttgtcaatgagacgcttgatcctaagagagtcaagcccgaaaccgagagcatgattgatctcttgatggggatctacaaagaacaacctttcgcttctgagtttactgtagataatgtcaaagccgtcatcttggatattgtagtggcgggaacagatactgcagctgcggcggttgtgtgggggatgacgtatctaatgaagtacccacaagtgttgaagaaagctcaagcagaagtgagagagtatatgaaagagaaaggttcaacgttcgttactgaagacgatgtcaagaaccttccttacttcagagccttagttaaagaaaccctaaggatcgaaccagtgattcctctccttatccctcgtgcttgcattcaagataccaagatcgccggttacgacatccccgcaggaacaacggtcaacgtcaacgcgtgggccgtgtcacgtgacgagaaagaatggggaccgaaccctgatgagtttaggcccgagaggtttcttgagaaggaagttgacttcaaaggcacggactacgagtttataccgttcgggtcaggccggagaatgtgcccgggaatgcgtcttggggccgcgatgcttgaggttccttatgcgaaccttctcctcagcttcaactttaaacttcctaatgggatgaaaccagatgatatcaatatggatgtcatgactggtcttgctatgcacaagtcgcagcatctcaagcttgttccagagaaagtgaacaagtattagctaatatatatcaaataaatctaccttctctgattatatagtatatgttcctccagtgtattctgtttcaatgtttggtttctttcttaaatggcaatcgtctctccaaaaaaaaaaaaaaaagagctcttggatccaacgattgtctttacacctatctccctccttgacgccgtcgccgtcgttaccgttggtgcagacggagacgtgttcggcgaggtcgaagaagctggatgtcaacggcgaagctttgtcgctgtatatgagaggaaaacatatagatatacaagagaaaattttcgactttttcaattcccgacccgatttgcagacgccgatcgagatctccaaggatgatcatcgggaattgtgtatgaatcagcttatagggcttgttagagaagctggggtaaggccgtttaggtatgttgctgatgatcctgagaagtatttcgcaatcatggaagctgttggaagtgttgatatgtcccttgggattaagatgggcgttcaatacagtctctggggaggctctgtgatcaatttagggactaagaagcatagagacaagtattttgaaggcattgacaatcttgattacaccggttgctttgccatgactgaattacaccatgggtcaaatgtgcaaggtcttcagaccacggcgacattcgatccacttaaagacgaatttgtgatcgatacacctaatgatggagctatcaaatggtggattggaaatgctgcagttcatgggaagtttgccactgtttttgccaggcttatacttccaactcatgattccaaaggagtctcggatatgggtgttcacgccttcattgttccgataagggatatgaaaacacaccagacactccctggtgttgaaatccaagattgtggacataaagtgggacttaatggagtggataatggtgcgttgagattccgttctgtgagaataccccgtgataatcttctcaatcgttttggagatgtgtcccgagatgggacgtatacaagtagtttgccaacaatcaataaaagatttggtgcaacactcggtgagcttgtaggtggtcgagttggccttgcctatgcatctgttggcgtccttaaaatctctgcaacgattgccattcgttattctcttctaagacaacaattcgggcctccaaagcaacctgaggtcagtattctcgattaccagtctcaacaacacaagctcatgccgatgttagcctccacctatgcataccattttgcaactgtataccttgtggagaaatattcagagatgaagaagactcacgatgagcaattggttgctgatgtccatgcactctctgctgggctcaaatcttatgtgacgtcttacaccgccaaggcgctctcggtctgcagagaagcctgtggaggtcatggttacgcagctgttaaccgatttggaagcttgagaaatgatcatgacattttccaaacatttgaaggagacaacactgtacttctgcaacaggtggctgctgatttattgaagcgttataaagaaaagttccaaggcgggacattgacagttacatggagctacttgagagaatcaatgaacacttatttgtctcagccaaatcccgttacagcgcgttgggaaggtgaagatcatctaagagatcctaaattccaactagatgctttccggtatcgaacatcgcgattgctacaaaatgtggcagcgagattgcagaagcattcaaagactcttggtggtttcggggcatggaacagatgcttgaatcatcttttaacgcttgcagaatctcacattgaaacagtcattcttgccaagttcatcgaagctgttaaaaactgcccggacccaagtgcaaaagctgctctgaaactagcatgtgatctttacgcattggaccgaatctggaaagatataggaacgtaccgtaacgtggattatgtggcgcctaacaaagctaaggcgattcataaactgacagagtatttgagttttcaagtaaggaatgtggccaaggaactagtggatgcgttcgagctccctgatcatgttactcgagcaccaattgctatgcagtccgatgcttattcccagtatactcaagttgttggattctaaaaacacaagaacaaaacatatatcatcacaatgatcttttaattcgaagcaaaaaaaagatgaaaaacaatttacagggggtacaaaagaatctgcagtcctttgtatgtgtttttagttgttgtttgttttcacaggag

SEQ ID NO: 76725 - protein, 690 aa, Arabidopsis thaliana
  peptide (1)..(690): Ceres Seq. ID no. 11034676
  misc_feature (324)..(488): Pfam Name: Acyl-CoA dehydrogenase, C-terminal domain Pfam Description: Acyl-CoA dehydrogenase, C-terminal domain
  misc_feature (22)..(690): Homolog of NCBI NO: 6503198 NR Description: acyl-CoA oxidase [Petroselinum crispum]
  misc_feature (22)..(690): Homolog of NCBI NO: 7431668 NR Description: acyl CoA oxidase homolog - cucurbit
  misc_feature (22)..(690): Homolog of NCBI NO: 1575556 NR Description: acyl-CoA oxidase homolog [Phalaenopsis sp. 'True
  misc_feature (56)..(686): Homolog of NCBI NO: 23019011 NR Description: hypothetical protein [Thermobifida fusca]
  misc_feature (132)..(673): Homolog of NCBI NO: 21311885 NR Description: RIKEN cDNA 1200014P05 [Mus musculus]
  misc_feature (95)..(667): Homolog of NCBI NO: 22329367 NR Description: acyl-CoA oxidase ACX3, putative; protein id: supported by cDNA: gi_20466226, supported by cDNA: gi_8163757, by cDNA: gi_8515708 [Arabidopsis thaliana]
  misc_feature (63)..(667): Homolog of NCBI NO: 8163758 NR Description: acyl-CoA oxidase ACX3 [Arabidopsis thaliana]
  misc_feature (63)..(667): Homolog of NCBI NO: 15220946 NR Description: acyl-CoA oxidase, putative; protein id:
  misc_feature (155)..(679): Homolog of NCBI NO: 14250616 NR Description: Similar to acyl-Coenzyme A oxidase 1, palmitoyl
  misc_feature (155)..(667): Homolog of NCBI NO: 2117541 NR Description: acyl-CoA oxidase (EC 1.3.3.6), peroxisomal - human
MFGFFLKWQSSLQKKKKKSSWIQRLSLHLSPSLTPSPSLPLVQTETCSARSKKLDVNGEALSLYMRGKHIDIQEKIFDFFNSRPDLQTPIEISKDDHRELCMNQLIGLVREAGVRPFRYVADDPEKYFAIMEAVGSVDMSLGIKMGVQYSLWGGSVINLGTKKHRDKYFEGIDNLDYTGCFAMTELHHGSNVQGLQTTATFDPLKDEFVIDTPNDGAIKWWIGNAAVHGKFATVFARLILPTHDSKGVSDMGVHAFIVPIRDMKTHQTLPGVEIQDCGHKVGLNGVDNGALRFRSVRIPRDNLLNRFGDVSRDGTYTSSLPTINKRFGATLGELVGGRVGLAYASVGVLKISATIAIRYSLLRQQFGPPKQPEVSILDYQSQQHKLMPMLASTYAYHFATVYLVEKYSEMKKTHDEQLVADVHALSAGLKSYVTSYTAKALSVCREACGGHGYAAVNRFGSLRNDHDIFQTFEGDNTVLLQQVAADLLKRYKEKFQGGTLTVTWSYLRESMNTYLSQPNPVTARWEGEDHLRDPKFQLDAFRYRTSRLLQNVAARLQKHSKTLGGFGAWNRCLNHLLTLAESHIETVILAKFIEAVKNCPDPSAKAALKLACDLYALDRIWKDIGTYRNVDYVAPNKAKAIHKLTEYLSFQVRNVAKELVDAFELPDHVTRAPIAMQSDAYSQYTQVVGF

SEQ ID NO: 76726 - protein, 626 aa, Arabidopsis thaliana
  peptide (1)..(626): Ceres Seq. ID no. 11034677
  misc_feature (260)..(424): Pfam Name: Acyl-CoA dehydrogenase, C-terminal domain Pfam Description: Acyl-CoA dehydrogenase, C-terminal domain
  misc_feature (1)..(626): Homolog of NCBI NO: 6503198 NR Description: acyl-CoA oxidase [Petroselinum crispum]
  misc_feature (1)..(626): Homolog of NCBI NO: 7431668 NR Description: acyl CoA oxidase homolog - cucurbit
  misc_feature (1)..(626): Homolog of NCBI NO: 1575556 NR Description: acyl-CoA oxidase homolog [Phalaenopsis sp. 'True
  misc_feature (1)..(622): Homolog of NCBI NO: 23019011 NR Description: hypothetical protein [Thermobifida fusca]
  misc_feature (68)..(609): Homolog of NCBI NO: 21311885 NR Description: RIKEN cDNA 1200014P05 [Mus musculus]
  misc_feature (31)..(603): Homolog of NCBI NO: 22329367 NR Description: acyl-CoA oxidase ACX3, putative; protein id: supported by cDNA: gi_20466226, supported by cDNA: gi_8163757, by cDNA: gi_8515708 [Arabidopsis thaliana]
  misc_feature (1)..(603): Homolog of NCBI NO: 8163758 NR Description: acyl-CoA oxidase ACX3 [Arabidopsis thaliana]
  misc_feature (1)..(603): Homolog of NCBI NO: 15220946 NR Description: acyl-CoA oxidase, putative; protein id:
  misc_feature (91)..(615): Homolog of NCBI NO: 14250616 NR Description: Similar to acyl-Coenzyme A oxidase 1, palmitoyl
  misc_feature (91)..(603): Homolog of NCBI NO: 2117541 NR Description: acyl-CoA oxidase (EC 1.3.3.6), peroxisomal - human
MRGKHIDIQEKIFDFFNSRPDLQTPIEISKDDHRELCMNQLIGLVREAGVRPFRYVADDPEKYFAIMEAVGSVDMSLGIKMGVQYSLWGGSVINLGTKKHRDKYFEGIDNLDYTGCFAMTELHHGSNVQGLQTTATFDPLKDEFVIDTPNDGAIKWWIGNAAVHGKFATVFARLILPTHDSKGVSDMGVHAFIVPIRDMKTHQTLPGVEIQDCGHKVGLNGVDNGALRFRSVRIPRDNLLNRFGDVSRDGTYTSSLPTINKRFGATLGELVGGRVGLAYASVGVLKISATIAIRYSLLRQQFGPPKQPEVSILDYQSQQHKLMPMLASTYAYHFATVYLVEKYSEMKKTHDEQLVADVHALSAGLKSYVTSYTAKALSVCREACGGHGYAAVNRFGSLRNDHDIFQTFEGDNTVLLQQVAADLLKRYKEKFQGGTLTVTWSYLRESMNTYLSQPNPVTARWEGEDHLRDPKFQLDAFRYRTSRLLQNVAARLQKHSKTLGGFGAWNRCLNHLLTLAESHIETVILAKFIEAVKNCPDPSAKAALKLACDLYALDRIWKDIGTYRNVDYVAPNKAKAIHKLTEYLSFQVRNVAKELVDAFELPDHVTRAPIAMQSDAYSQYTQVVGF

SEQ ID NO: 76727 - protein, 589 aa, Arabidopsis thaliana
  peptide (1)..(589): Ceres Seq. ID no. 11034678
  misc_feature (223)..(387): Pfam Name: Acyl-CoA dehydrogenase, C-terminal domain Pfam Description: Acyl-CoA dehydrogenase, C-terminal domain
  misc_feature (1)..(589): Homolog of NCBI NO: 6503198 NR Description: acyl-CoA oxidase [Petroselinum crispum]
  misc_feature (1)..(589): Homolog of NCBI NO: 7431668 NR Description: acyl CoA oxidase homolog - cucurbit
  misc_feature (1)..(589): Homolog of NCBI NO: 1575556 NR Description: acyl-CoA oxidase homolog [Phalaenopsis sp. 'True
  misc_feature (1)..(585): Homolog of NCBI NO: 23019011 NR Description: hypothetical protein [Thermobifida fusca]
  misc_feature (31)..(572): Homolog of NCBI NO: 21311885 NR Description: RIKEN cDNA 1200014P05 [Mus musculus]
  misc_feature (1)..(566): Homolog of NCBI NO: 22329367 NR Description: acyl-CoA oxidase ACX3, putative; protein id: supported by cDNA: gi_20466226, supported by cDNA: gi_8163757, by cDNA: gi_8515708 [Arabidopsis thaliana]
  misc_feature (1)..(566): Homolog of NCBI NO: 8163758 NR Description: acyl-CoA oxidase ACX3 [Arabidopsis thaliana]
  misc_feature (1)..(566): Homolog of NCBI NO: 15220946 NR Description: acyl-CoA oxidase, putative; protein id:
  misc_feature (54)..(578): Homolog of NCBI NO: 14250616 NR Description: Similar to acyl-Coenzyme A oxidase 1, palmitoyl
  misc_feature (54)..(566): Homolog of NCBI NO: 2117541 NR Description: acyl-CoA oxidase (EC 1.3.3.6), peroxisomal - human
MNQLIGLVREAGVRPFRYVADDPEKYFAIMEAVGSVDMSLGIKMGVQYSLWGGSVINLGTKKHRDKYFEGIDNLDYTGCFAMTELHHGSNVQGLQTTATFDPLKDEFVIDTPNDGAIKWWIGNAAVHGKFATVFARLILPTHDSKGVSDMGVHAFIVPIRDMKTHQTLPGVEIQDCGHKVGLNGVDNGALRFRSVRIPRDNLLNRFGDVSRDGTYTSSLPTINKRFGATLGELVGGRVGLAYASVGVLKISATIAIRYSLLRQQFGPPKQPEVSILDYQSQQHKLMPMLASTYAYHFATVYLVEKYSEMKKTHDEQLVADVHALSAGLKSYVTSYTAKALSVCREACGGHGYAAVNRFGSLRNDHDIFQTFEGDNTVLLQQVAADLLKRYKEKFQGGTLTVTWSYLRESMNTYLSQPNPVTARWEGEDHLRDPKFQLDAFRYRTSRLLQNVAARLQKHSKTLGGFGAWNRCLNHLLTLAESHIETVILAKFIEAVKNCPDPSAKAALKLACDLYALDRIWKDIGTYRNVDYVAPNKAKAIHKLTEYLSFQVRNVAKELVDAFELPDHVTRAPIAMQSDAYSQYTQVVGF

SEQ ID NO: 76728 - DNA, 1340 bp, Arabidopsis thaliana
  misc_feature (1)..(1340): Ceres Seq. ID no. 11034962
  misc_feature: MA Experiment ID: 108577 Result: Down-regulated in Transcription
  misc_feature: MA Experiment 108577 PARAMETER Experiment Name: At_42deg_Heat_cDNA_P Parameter: Temperature (deg C) Value: 42 vs. 22
  misc_feature: MA Experiment 108577 PARAMETER Experiment Name: At_42deg_Heat_cDNA_P Parameter: Timepoint (hr) Value: 6
  misc_feature: MA Experiment 108577 PARAMETER Experiment Name: At_42deg_Heat_cDNA_P Parameter: Tissue Value: Aerial
  misc_feature: MA Experiment ID: 108595 Result: Down-regulated in Transcription
  misc_feature: MA Experiment 108595 PARAMETER Experiment Name: At_Ler-pi_Ovule_cDNA_P Parameter: Plant Line Value: null
ttcctcctcatttggagatgtcactaactcatcttctctaattcaccaacatcctaaaacccttttgatcaaaacatggcttccatttccagaatcttaccaacagatggcagattaagtcaatgcagaatcaacacctcgtgggttccttctacaaccagaactcaaactcacttagattttcccaagttagtttctgttagtaactctgggataagtttgaggattcagaatagtaaacctattagccctgtctttgctcttgaagcaacttcctccaggagggttgtttgcaaagctgctgctggtgtgtcaggtgacttacctgagagtactcctaaggaacttagtcagtatgagaagattattgagcttttgacaaccctttttccactttgggttattttgggaacacttgttggcatcttcaagccatccttggttacatggttggaaacagatctctttagtctaggtcttggatttcttatgctttccatgggtttgactcttacgtttgaagatttcagaagatgtttacgtaatccatggacggtgggtgttggttttcttgctcaatatatgatcaagccaattctaggttttctcattgcaatgactcttaagctttcggcacctcttgcgactggccttatcctagtctcatgctgccctggaggacaggcgtcaaacgttgctacttacatttccaaggggaatgtagcgctctctgtactcatgacaacgtgttcaaccattggggctattataatgactcctcttcttactaagcttcttgctggtcagcttgttcccgttgacgctgctggacttgctcttagtacgttccaagtagtgttggttcctaccataattggagttctggcaaatgagttctttcctaaatttacgtctaagatcataacagtgacgcctctaatcggagtcattctgactactctgctctgtgccagccctattggacaagttgcagatgttttgaaaacccaaggagctcaacttatactcccggtggcactccttcatgctgcagcctttgctattggctattggatttcaaagttttctttcggcgagtccacttcgcgtaccatttctatagaatgtggaatgcaaagttcagcgctcgggttcttgcttgcacaaaagcatttcacaaaccctctagttgctgttccttctgcagtcagtgttgtctgtatggcgcttggcgggagcggcctggccgtgttctggagaaacctaccgattccggcagatgacaaggatgacttcaaagagtaaatgaaggaggaaaggcggtttgcataatcactagt

SEQ ID NO: 76729 - protein, 409 aa, Arabidopsis thaliana
  peptide (1)..(409): Ceres Seq. ID no. 11034963
  misc_feature (132)..(309): Pfam Name: Sodium Bile acid symporter family Pfam Description: Sodium Bile acid symporter family
  misc_feature (1)..(409): Homolog of NCBI NO: 20269901 NR Description: putative sodium-dependent bile acid symporter
  misc_feature (1)..(409): Homolog of NCBI NO: 30683305 NR Description: bile acid:sodium symporter family [Arabidopsis
  misc_feature (67)..(385): Homolog of NCBI NO: 7485401 NR Description: hypothetical protein At2g26900 [imported] - thaliana >gi|3426051|gb|AAC32250.1| putative Na+ dependent ileal
  misc_feature (1)..(38): Homolog of NCBI NO: 7485401 NR Description: hypothetical protein At2g26900 [imported] - thaliana >gi|3426051|gb|AAC32250.1| putative Na+ dependent ileal
  misc_feature (62)..(409): Homolog of NCBI NO: 34911708 NR Description: P0707D10.18 [Oryza sativa (japonica
  misc_feature (139)..(409): Homolog of NCBI NO: 28393076 NR Description: putative Na+ dependent ileal bile acid
  misc_feature (41)..(403): Homolog of NCBI NO: 18412023 NR Description: expressed protein; protein id: At1g78560.1, by cDNA: 41311., supported by cDNA: gi_16648876 [Arabidopsis >gi|16648877|gb|AAL24290.1| Unknown protein [Arabidopsis
  misc_feature (47)..(402): Homolog of NCBI NO: 38346633 NR Description: OSJNBa0072D21.3 [Oryza sativa (japonica
  misc_feature (92)..(397): Homolog of NCBI NO: 24217327 NR Description: conserved hypothetical protein [Leptospira serovar lai str. 56601] >gi|24202399|gb|AAN51825.1|AE011614_2 hypothetical protein [Leptospira interrogans serovar lai str.
  misc_feature (98)..(395): Homolog of NCBI NO: 33865169 NR Description: Sodium/bile acid cotransporter family sp. WH 8102] >gi|33638853|emb|CAE07150.1| Sodium/bile acid
MASISRILPTDGRLSQCRINTSWVPSTTRTQTHLDFPKLVSVSNSGISLRIQNSKPISPVFALEATSSRRVVCKAAAGVSGDLPESTPKELSQYEKIIELLTTLFPLWVILGTLVGIFKPSLVTWLETDLFSLGLGFLMLSMGLTLTFEDFRRCLRNPWTVGVGFLAQYMIKPILGFLIAMTLKLSAPLATGLILVSCCPGGQASNVATYISKGNVALSVLMTTCSTIGAIIMTPLLTKLLAGQLVPVDAAGLALSTFQVVLVPTIIGVLANEFFPKFTSKIITVTPLIGVILTTLLCASPIGQVADVLKTQGAQLILPVALLHAAAFAIGYWISKFSFGESTSRTISIECGMQSSALGFLLAQKHFTNPLVAVPSAVSVVCMALGGSGLAVFWRNLPIPADDKDDFKE

SEQ ID NO: 76730 - protein, 271 aa, Arabidopsis thaliana; identical to SEQ ID NO: 22581
  peptide (1)..(271): Ceres Seq. ID no. 11034964
  misc_feature (1)..(171): Pfam Name: Sodium Bile acid symporter family Pfam Description: Sodium Bile acid symporter family
  misc_feature (1)..(271): Homolog of NCBI NO: 20269901 NR Description: putative sodium-dependent bile acid symporter
  misc_feature (1)..(271): Homolog of NCBI NO: 30683305 NR Description: bile acid:sodium symporter family [Arabidopsis
  misc_feature (1)..(247): Homolog of NCBI NO: 7485401 NR Description: hypothetical protein At2g26900 [imported] - thaliana >gi|3426051|gb|AAC32250.1| putative Na+ dependent ileal
  misc_feature (1)..(271): Homolog of NCBI NO: 34911708 NR Description: P0707D10.18 [Oryza sativa (japonica
  misc_feature (1)..(271): Homolog of NCBI NO: 28393076 NR Description: putative Na+ dependent ileal bile acid
  misc_feature (1)..(265): Homolog of NCBI NO: 18412023 NR Description: expressed protein; protein id: At1g78560.1, by cDNA: 41311., supported by cDNA: gi_16648876 [Arabidopsis >gi|16648877|gb|AAL24290.1| Unknown protein [Arabidopsis
  misc_feature (1)..(264): Homolog of NCBI NO: 38346633 NR Description: OSJNBa0072D21.3 [Oryza sativa (japonica
  misc_feature (1)..(259): Homolog of NCBI NO: 24217327 NR Description: conserved hypothetical protein [Leptospira serovar lai str. 56601] >gi|24202399|gb|AAN51825.1|AE011614_2 hypothetical protein [Leptospira interrogans serovar lai str.
  misc_feature (1)..(257): Homolog of NCBI NO: 33865169 NR Description: Sodium/bile acid cotransporter family sp. WH 8102] >gi|33638853|emb|CAE07150.1| Sodium/bile acid
  misc_feature (1)..(257): Homolog of NCBI NO: 22298669 NR Description: ORF_ID:tll1126~probable sodium-dependent

SEQ ID NO: 76731 - protein, 268 aa, Arabidopsis thaliana; identical to SEQ ID NO: 22582
  peptide (1)..(268): Ceres Seq. ID no. 11034965
  misc_feature (1)..(168): Pfam Name: Sodium Bile acid symporter family Pfam Description: Sodium Bile acid symporter family
  misc_feature (1)..(268): Homolog of NCBI NO: 20269901 NR Description: putative sodium-dependent bile acid symporter
  misc_feature (1)..(268): Homolog of NCBI NO: 30683305 NR Description: bile acid:sodium symporter family [Arabidopsis
  misc_feature (1)..(244): Homolog of NCBI NO: 7485401 NR Description: hypothetical protein At2g26900 [imported] - thaliana >gi|3426051|gb|AAC32250.1| putative Na+ dependent ileal
  misc_feature (1)..(268): Homolog of NCBI NO: 34911708 NR Description: P0707D10.18 [Oryza sativa (japonica
  misc_feature (1)..(268): Homolog of NCBI NO: 28393076 NR Description: putative Na+ dependent ileal bile acid
  misc_feature (1)..(262): Homolog of NCBI NO: 18412023 NR Description: expressed protein; protein id: At1g78560.1, by cDNA: 41311., supported by cDNA: gi_16648876 [Arabidopsis >gi|16648877|gb|AAL24290.1| Unknown protein [Arabidopsis
  misc_feature (1)..(261): Homolog of NCBI NO: 38346633 NR Description: OSJNBa0072D21.3 [Oryza sativa (japonica
  misc_feature (1)..(256): Homolog of NCBI NO: 24217327 NR Description: conserved hypothetical protein [Leptospira serovar lai str. 56601] >gi|24202399|gb|AAN51825.1|AE011614_2 hypothetical protein [Leptospira interrogans serovar lai str.
  misc_feature (1)..(254): Homolog of NCBI NO: 33865169 NR Description: Sodium/bile acid cotransporter family sp. WH 8102] >gi|33638853|emb|CAE07150.1| Sodium/bile acid
  misc_feature (1)..(254): Homolog of NCBI NO: 22298669 NR Description: ORF_ID:tll1126~probable sodium-dependent

SEQ ID NO: 76732 - DNA, 865 bp, Arabidopsis thaliana
  misc_feature (1)..(865): Ceres Seq. ID no. 11034973
  misc_feature: MA Experiment ID: 108434 Result: Up-regulated in Transcription
  misc_feature: MA Experiment 108434 PARAMETER Experiment Name: At_Root_Tips_cDNA_P Parameter: Tissue Value: Root Tips
  misc_feature: MA Experiment ID: 108435 Result: Up-regulated in Transcription
  misc_feature: MA Experiment 108435 PARAMETER Experiment Name: At_stm_Mutants_cDNA_P Parameter: Plant Line Value: wt Landsburg vs stm
  misc_feature: MA Experiment 108435 PARAMETER Experiment Name: At_stm_Mutants_cDNA_P Parameter: Tissue Value: Shoot Apical Meristem Region
  misc_feature: MA Experiment ID: 108461 Result: Up-regulated in Transcription
  misc_feature: MA Experiment 108461 PARAMETER Experiment Name: At_Germinating_Seeds_cDNA_P Parameter: Age (day) Value: 1 vs. 0
  misc_feature: MA Experiment 108461 PARAMETER Experiment Name: At_Germinating_Seeds_cDNA_P Parameter: Tissue Value: Germinating Seeds
  misc_feature: MA Experiment ID: 20000144 Result: Down-regulated in Transcription
  misc_feature: MA Experiment 20000144 PARAMETER Experiment Name: At_42deg_Heat_cDNA_P Parameter: Temperature (deg C) Value: 42 vs. 22
  misc_feature: MA Experiment 20000144 PARAMETER Experiment Name: At_42deg_Heat_cDNA_P Parameter: Timepoint (hr) Value: 1
  misc_feature: MA Experiment 20000144 PARAMETER Experiment Name: At_42deg_Heat_cDNA_P Parameter: Tissue Value: Aerial
  misc_feature: MA Experiment ID: 20000171 Result: Down-regulated in Transcription
  misc_feature: MA Experiment 20000171 PARAMETER Experiment Name: At_42deg_Heat_P Parameter: Age (day) Value: 14
  misc_feature: MA Experiment 20000171 PARAMETER Experiment Name: At_42deg_Heat_P Parameter: Organism Value: A. thaliana
  misc_feature: MA Experiment 20000171 PARAMETER Experiment Name: At_42deg_Heat_P Parameter: Plant Line Value: WS
  misc_feature: MA Experiment 20000171 PARAMETER Experiment Name: At_42deg_Heat_P Parameter: Temperature (deg C) Value: 42 vs. 22
  misc_feature: MA Experiment 20000171 PARAMETER Experiment Name: At_42deg_Heat_P Parameter: Timepoint (hr) Value: 1
  misc_feature: MA Experiment 20000171 PARAMETER Experiment Name: At_42deg_Heat_P Parameter: Tissue Value: Aerial
  misc_feature: MA Experiment ID: 20000173 Result: Down-regulated in Transcription
  misc_feature: MA Experiment 20000173 PARAMETER Experiment Name: At_42deg_Heat_P Parameter: Age (day) Value: 14
  misc_feature: MA Experiment 20000173 PARAMETER Experiment Name: At_42deg_Heat_P Parameter: Organism Value: A. thaliana
  misc_feature: MA Experiment 20000173 PARAMETER Experiment Name: At_42deg_Heat_P Parameter: Plant Line Value: WS
  misc_feature: MA Experiment 20000173 PARAMETER Experiment Name: At_42deg_Heat_P Parameter: Temperature (deg C) Value: 42 vs. 22
  misc_feature: MA Experiment 20000173 PARAMETER Experiment Name: At_42deg_Heat_P Parameter: Timepoint (hr) Value: 6
  misc_feature: MA Experiment 20000173 PARAMETER Experiment Name: At_42deg_Heat_P Parameter: Tissue Value: Aerial
  misc_feature: MA Experiment ID: 20000234 Result: Up-regulated in Transcription
  misc_feature: MA Experiment 20000234 PARAMETER Experiment Name: At_Siliques_P Parameter: Age (day) Value: 21
  misc_feature: MA Experiment 20000234 PARAMETER Experiment Name: At_Siliques_P Parameter: Organism Value: A. thaliana
  misc_feature: MA Experiment 20000234 PARAMETER Experiment Name: At_Siliques_P Parameter: Plant Line Value: WS
  misc_feature: MA Experiment 20000234 PARAMETER Experiment Name: At_Siliques_P Parameter: Tissue Value: Less Than 5mm Siliques vs. Whole Plant
  misc_feature: MA Experiment ID: 20000264 Result: Up-regulated in Transcription
  misc_feature: MA Experiment 20000264 PARAMETER Experiment Name: At_Open_Flower_P Parameter: Age (day) Value: 21
  misc_feature: MA Experiment 20000264 PARAMETER Experiment Name: At_Open_Flower_P Parameter: Plant Line Value: WS
  misc_feature: MA Experiment 20000264 PARAMETER Experiment Name: At_Open_Flower_P Parameter: Tissue Value: Open Flower vs. Whole Plant
  misc_feature: MA Experiment ID: 20000265 Result: Up-regulated in Transcription
  misc_feature: MA Experiment 20000265 PARAMETER Experiment Name: At_Open_Flower_P Parameter: Age (day) Value: 21
  misc_feature: MA Experiment 20000265 PARAMETER Experiment Name: At_Open_Flower_P Parameter: Plant Line Value: WS
  misc_feature: MA Experiment 20000265 PARAMETER Experiment Name: At_Open_Flower_P Parameter: Tissue Value: Closed Flower vs. Whole Plant
  misc_feature: MA Experiment ID: 20000437 Result: Down-regulated in Transcription
  misc_feature: MA Experiment 20000437 PARAMETER Experiment Name: At_Drought_P Parameter: Age (day) Value: 8
  misc_feature: MA Experiment 20000437 PARAMETER Experiment Name: At_Drought_P Parameter: Organism Value: A. thaliana
  misc_feature: MA Experiment 20000437 PARAMETER Experiment Name: At_Drought_P Parameter: Plant Line Value: WS
  misc_feature: MA Experiment 20000437 PARAMETER Experiment Name: At_Drought_P Parameter: Timepoint (hr) Value: 24
  misc_feature: MA Experiment 20000437 PARAMETER Experiment Name: At_Drought_P Parameter: Tissue Value: Whole Plant
  misc_feature: MA Experiment 20000437 PARAMETER Experiment Name: At_Drought_P Parameter: Treatment Value: Drought vs. No Drought
  misc_feature: MA Experiment ID: 20000495 Result: Up-regulated in Transcription
  misc_feature: MA Experiment 20000495 PARAMETER Experiment Name: At_Guard_Cells_P Parameter: Harvest Date Value: 8/2/2002
  misc_feature: MA Experiment 20000495 PARAMETER Experiment Name: At_Guard_Cells_P Parameter: Organism Value: A. thaliana
  misc_feature: MA Experiment 20000495 PARAMETER Experiment Name: At_Guard_Cells_P Parameter: Tissue Value: Guard Cells vs. Leaves
  misc_feature: MA Experiment ID: 20001450 Result: Down-regulated in Transcription
  misc_feature: MA Experiment 20001450 PARAMETER Experiment Name: At_Far-red-induction_P Parameter: Age (day) Value: 7
  misc_feature: MA Experiment 20001450 PARAMETER Experiment Name: At_Far-red-induction_P Parameter: Light Value: Far-red vs. White
  misc_feature: MA Experiment 20001450 PARAMETER Experiment Name: At_Far-red-induction_P Parameter: Organism Value: A. thaliana
  misc_feature: MA Experiment 20001450 PARAMETER Experiment Name: At_Far-red-induction_P Parameter: Plant Line Value: Columbia
  misc_feature: MA Experiment 20001450 PARAMETER Experiment Name: At_Far-red-induction_P Parameter: Timepoint (hr) Value: 8
  misc_feature: MA Experiment 20001450 PARAMETER Experiment Name: At_Far-red-induction_P Parameter: Tissue Value: Whole Plant
  misc_feature: MA Experiment ID: 20001451 Result: Down-regulated in Transcription
  misc_feature: MA Experiment 20001451 PARAMETER Experiment Name: At_Far-red-induction_P Parameter: Age (day) Value: 7
  misc_feature: MA Experiment 20001451 PARAMETER Experiment Name: At_Far-red-induction_P Parameter: Light Value: Far-red vs. White
  misc_feature: MA Experiment 20001451 PARAMETER Experiment Name: At_Far-red-induction_P Parameter: Organism Value: A. thaliana
  misc_feature: MA Experiment 20001451 PARAMETER Experiment Name: At_Far-red-induction_P Parameter: Plant Line Value: Columbia
  misc_feature: MA Experiment 20001451 PARAMETER Experiment Name: At_Far-red-induction_P Parameter: Timepoint (hr) Value: 24
  misc_feature: MA Experiment 20001451 PARAMETER Experiment Name: At_Far-red-induction_P Parameter: Tissue Value: Whole Plant
  misc_feature: MA Experiment ID: 20001560 Result: Up-regulated in Transcription
  misc_feature: MA Experiment 20001560 PARAMETER Experiment Name: At_Drought_Soil_Dry_P Parameter: Age (day) Value: 28
  misc_feature: MA Experiment 20001560 PARAMETER Experiment Name: At_Drought_Soil_Dry_P Parameter: Organism Value: A. thaliana
  misc_feature: MA Experiment 20001560 PARAMETER Experiment Name: At_Drought_Soil_Dry_P Parameter: Plant Line Value: WS
  misc_feature: MA Experiment 20001560 PARAMETER Experiment Name: At_Drought_Soil_Dry_P Parameter: Post Timepoint (hr) Value: None
  misc_feature: MA Experiment 20001560 PARAMETER Experiment Name: At_Drought_Soil_Dry_P Parameter: Post-Treatment Value: None
  misc_feature: MA Experiment 20001560 PARAMETER Experiment Name: At_Drought_Soil_Dry_P Parameter: Timepoint (day) Value: 14
  misc_feature: MA Experiment 20001560 PARAMETER Experiment Name: At_Drought_Soil_Dry_P Parameter: Treatment Value: Drought vs. No Drought
  misc_feature: MA Experiment ID: 20001911 Result: Down-regulated in Transcription
  misc_feature: MA Experiment 20001911 PARAMETER Experiment Name: At_Drought_Reproduction_P Parameter: Age (day) Value: 40
  misc_feature: MA Experiment 20001911 PARAMETER Experiment Name: At_Drought_Reproduction_P Parameter: Organism Value: A. thaliana
  misc_feature: MA Experiment 20001911 PARAMETER Experiment Name: At_Drought_Reproduction_P Parameter: Plant Line Value: WS
  misc_feature: MA Experiment 20001911 PARAMETER Experiment Name: At_Drought_Reproduction_P Parameter: Timepoint (day) Value: 10
  misc_feature: MA Experiment 20001911 PARAMETER Experiment Name: At_Drought_Reproduction_P Parameter: Tissue Value: Flowers
  misc_feature: MA Experiment 20001911 PARAMETER Experiment Name: At_Drought_Reproduction_P Parameter: Treatment Value: Drought vs. No Drought
  misc_feature: Pfam Name: UQ_con Pfam Description: Ubiquitin-conjugating enzyme
ggaattcggcacgagctttgttttcttcctcttctccttcttctactttcgaacactcgtgaatctgattctactctagtctaattgggtgctttcgatttctgaataaaaattcgattttggtctgacgattaagaaagcgaaagtgatggccgccgtaaatggatatcagggaaatactccggcagatcctccggcgtctaatggatcaaaacaacctgcggctccgaccaagactgttgacagccaatctgttctcaaaagactgcaatctgaattgatgggcttgatgatgggcggtggtccaggaatatcggctttccctgaggaagacaacatattctgctggaaagggacaataacaggaagcaaagatactgtgtttgaaggaactgagtacagactctcactctctttctccaatgactatcctttcaagcctccaaaggttaagtttgagacatgttgcttccaccccaatgttgatgtctatggcaatatctgcttagacattcttcaggataagtggtcatctgcttacgatgtgaggacgatactactatcgattcagagcctcctgggagaaccgaacatcagttcaccattgaacactcaagcagctcagctttggagtaaccaagaagagtacaggaagatggttgagaagctttacaagcctccaagtgcatgatttctgcaagctggtctgattcataaatctccaatgcctctgatgatttcacataaaacgatttttcagaagaaaacactgtcattcatttgctttattctttgtttttgaacatcagaagttctatctgtaacgttaccttgagttcaaataatgagtagtatttcagagatt

SEQ ID NO: 76733 - protein, 180 aa, Arabidopsis thaliana
  peptide (1)..(180): Ceres Seq. ID no. 11034974
  misc_feature: Pfam Name: UQ_con Pfam Description: Ubiquitin-conjugating enzyme
  misc_feature (1)..(180): Homolog of NCBI NO: 18403097 NR Description: E2, ubiquitin-conjugating enzyme, putative;
  misc_feature (1)..(180): Homolog of NCBI NO: 21618179 NR Description: E2, ubiquitin-conjugating enzyme, putative
  misc_feature (1)..(180): Homolog of NCBI NO: 25293673 NR Description: hypothetical protein F17J6.3 [imported] -
  misc_feature (36)..(180): Homolog of NCBI NO: 9454557 NR Description: Putative ubiquitin carrier protein [Arabidopsis
  misc_feature (1)..(180): Homolog of NCBI NO: 18402475 NR Description: E2, ubiquitin-conjugating enzyme, putative; id: At3g20060.1 [Arabidopsis thaliana]
  misc_feature (10)..(177): Homolog of NCBI NO: 34903234 NR Description: unnamed protein product [Oryza sativa (japonica group)] >gi|6815106|dbj|BAA90392.1| unnamed protein product
  misc_feature (16)..(176): Homolog of NCBI NO: 3915196 NR Description: Ubiquitin-conjugating enzyme E2-C
  misc_feature (28)..(176): Homolog of NCBI NO: 4388942 NR Description: E2-C, An Ubiquitin Conjugating Enzyme Required
  misc_feature (20)..(176): Homolog of NCBI NO: 24663332 NR Description: vihar CG10682-PA >gi|7294569|gb|AAF49909.1|
  misc_feature (15)..(171): Homolog of NCBI NO: 40743465 NR Description: hypothetical protein AN5495.2 [Aspergillus
MAAVNGYQGNTPADPPASNGSKQPAAPTKTVDSQSVLKRLQSELMGLMMGGGPGISAFPEEDNIFCWKGTITGSKDTVFEGTEYRLSLSFSNDYPFKPPKVKFETCCFHPNVDVYGNICLDILQDKWSSAYDVRTILLSIQSLLGEPNISSPLNTQAAQLWSNQEEYRKMVEKLYKPPSA

SEQ ID NO: 76734 - protein, 136 aa, Arabidopsis thaliana
  peptide (1)..(136): Ceres Seq. ID no. 11034975
  misc_feature: Pfam Name: UQ_con Pfam Description: Ubiquitin-conjugating enzyme
  misc_feature (1)..(136): Homolog of NCBI NO: 18403097 NR Description: E2, ubiquitin-conjugating enzyme, putative;
  misc_feature (1)..(136): Homolog of NCBI NO: 21618179 NR Description: E2, ubiquitin-conjugating enzyme, putative
  misc_feature (1)..(136): Homolog of NCBI NO: 25293673 NR Description: hypothetical protein F17J6.3 [imported] -
  misc_feature (1)..(136): Homolog of NCBI NO: 9454557 NR Description: Putative ubiquitin carrier protein [Arabidopsis
  misc_feature (1)..(136): Homolog of NCBI NO: 18402475 NR Description: E2, ubiquitin-conjugating enzyme, putative; id: At3g20060.1 [Arabidopsis thaliana]
  misc_feature (1)..(133): Homolog of NCBI NO: 34903234 NR Description: unnamed protein product [Oryza sativa (japonica group)] >gi|6815106|dbj|BAA90392.1| unnamed protein product
  misc_feature (1)..(132): Homolog of NCBI NO: 3915196 NR Description: Ubiquitin-conjugating enzyme E2-C
  misc_feature (1)..(132): Homolog of NCBI NO: 4388942 NR Description: E2-C, An Ubiquitin Conjugating Enzyme Required
  misc_feature (1)..(132): Homolog of NCBI NO: 24663332 NR Description: vihar CG10682-PA >gi|7294569|gb|AAF49909.1|
  misc_feature (1)..(127): Homolog of NCBI NO: 40743465 NR Description: hypothetical protein AN5495.2 [Aspergillus
MGLMMGGGPGISAFPEEDNIFCWKGTITGSKDTVFEGTEYRLSLSFSNDYPFKPPKVKFETCCFHPNVDVYGNICLDILQDKWSSAYDVRTILLSIQSLLGEPNISSPLNTQAAQLWSNQEEYRKMVEKLYKPPSA

SEQ ID NO: 76735 - protein, 133 aa, Arabidopsis thaliana
  peptide (1)..(133): Ceres Seq. ID no. 11034976
  misc_feature: Pfam Name: UQ_con Pfam Description: Ubiquitin-conjugating enzyme
  misc_feature (1)..(133): Homolog of NCBI NO: 18403097 NR Description: E2, ubiquitin-conjugating enzyme, putative;
  misc_feature (1)..(133): Homolog of NCBI NO: 21618179 NR Description: E2, ubiquitin-conjugating enzyme, putative
  misc_feature (1)..(133): Homolog of NCBI NO: 25293673 NR Description: hypothetical protein F17J6.3 [imported] -
  misc_feature (1)..(133): Homolog of NCBI NO: 9454557 NR Description: Putative ubiquitin carrier protein [Arabidopsis
  misc_feature (1)..(133): Homolog of NCBI NO: 18402475 NR Description: E2, ubiquitin-conjugating enzyme, putative; id: At3g20060.1 [Arabidopsis thaliana]
  misc_feature (1)..(130): Homolog of NCBI NO: 34903234 NR Description: unnamed protein product [Oryza sativa (japonica group)] >gi|6815106|dbj|BAA90392.1| unnamed protein product
  misc_feature (1)..(129): Homolog of NCBI NO: 3915196 NR Description: Ubiquitin-conjugating enzyme E2-C
  misc_feature (1)..(129): Homolog of NCBI NO: 4388942 NR Description: E2-C, An Ubiquitin Conjugating Enzyme Required
  misc_feature (1)..(129): Homolog of NCBI NO: 24663332 NR Description: vihar CG10682-PA >gi|7294569|gb|AAF49909.1|
  misc_feature (1)..(124): Homolog of NCBI NO: 40743465 NR Description: hypothetical protein AN5495.2 [Aspergillus
MMGGGPGISAFPEEDNIFCWKGTITGSKDTVFEGTEYRLSLSFSNDYPFKPPKVKFETCCFHPNVDVYGNICLDILQDKWSSAYDVRTILLSIQSLLGEPNISSPLNTQAAQLWSNQEEYRKMVEKLYKPPSA

SEQ ID NO: 76736 - DNA, 830 bp, Arabidopsis thaliana
  misc_feature (1)..(830): Ceres Seq. ID no. 11035332
  misc_feature: MA Experiment ID: 108463 Result: Up-regulated in Transcription
  misc_feature: MA Experiment 108463 PARAMETER Experiment Name: At_Germinating_Seeds_cDNA_P Parameter: Age (day) Value: 3 vs. 0
  misc_feature: MA Experiment 108463 PARAMETER Experiment Name: At_Germinating_Seeds_cDNA_P Parameter: Tissue Value: Germinating Seeds
  misc_feature: MA Experiment ID: 108464 Result: Up-regulated in Transcription
  misc_feature: MA Experiment 108464 PARAMETER Experiment Name: At_Germinating_Seeds_cDNA_P Parameter: Age (day) Value: 4 vs. 0
  misc_feature: MA Experiment 108464 PARAMETER Experiment Name: At_Germinating_Seeds_cDNA_P Parameter: Tissue Value: Germinating Seeds
  misc_feature: MA Experiment ID: 108607 Result: Up-regulated in Transcription
  misc_feature: MA Experiment 108607 PARAMETER Experiment Name: At_100uM_ABA_cDNA_P Parameter: Timepoint (hr) Value: 4
  misc_feature: MA Experiment 108607 PARAMETER Experiment Name: At_100uM_ABA_cDNA_P Parameter: Tissue Value: Aerial
  misc_feature: MA Experiment 108607 PARAMETER Experiment Name: At_100uM_ABA_cDNA_P Parameter: Treatment Value: 100uM ABA vs. No Treatment
  misc_feature: MA Experiment ID: 20000113 Result: Down-regulated in Transcription
  misc_feature: MA Experiment 20000113 PARAMETER Experiment Name: At_42deg_Heat_cDNA_P Parameter: Temperature (deg C) Value: 42 vs. 22
  misc_feature: MA Experiment 20000113 PARAMETER Experiment Name: At_42deg_Heat_cDNA_P Parameter: Timepoint (hr) Value: 8
  misc_feature: MA Experiment 20000113 PARAMETER Experiment Name: At_42deg_Heat_cDNA_P Parameter: Tissue Value: Aerial
  misc_feature: MA Experiment ID: 20000173 Result: Down-regulated in Transcription
  misc_feature: MA Experiment 20000173 PARAMETER Experiment Name: At_42deg_Heat_P Parameter: Age (day) Value: 14
  misc_feature: MA Experiment 20000173 PARAMETER Experiment Name: At_42deg_Heat_P Parameter: Organism Value: A. thaliana
  misc_feature: MA Experiment 20000173 PARAMETER Experiment Name: At_42deg_Heat_P Parameter: Plant Line Value: WS
  misc_feature: MA Experiment 20000173 PARAMETER Experiment Name: At_42deg_Heat_P Parameter: Temperature (deg C) Value: 42 vs. 22
  misc_feature: MA Experiment 20000173 PARAMETER Experiment Name: At_42deg_Heat_P Parameter: Timepoint (hr) Value: 6
  misc_feature: MA Experiment 20000173 PARAMETER Experiment Name: At_42deg_Heat_P Parameter: Tissue Value: Aerial
  misc_feature: MA Experiment ID: 20000179 Result: Up-regulated in Transcription
  misc_feature: MA Experiment 20000179 PARAMETER Experiment Name: At_Germinating_Seeds_P Parameter: Age (hr) Value: 6 vs. 0
  misc_feature: MA Experiment 20000179 PARAMETER Experiment Name: At_Germinating_Seeds_P Parameter: Tissue Value: Germinating Seeds
  misc_feature: MA Experiment ID: 20000180 Result: Up-regulated in Transcription
  misc_feature: MA Experiment 20000180 PARAMETER Experiment Name: At_Germinating_Seeds_P Parameter: Age (hr) Value: 24 vs. 0
  misc_feature: MA Experiment 20000180 PARAMETER Experiment Name: At_Germinating_Seeds_P Parameter: Tissue Value: Germinating Seeds
  misc_feature: MA Experiment ID: 20000184 Result: Down-regulated in Transcription
  misc_feature: MA Experiment 20000184 PARAMETER Experiment Name: At_Shoots__P Parameter: Age (day) Value: 7
  misc_feature: MA Experiment 20000184 PARAMETER Experiment Name: At_Shoots__P Parameter: Tissue Value: Shoots vs. Whole Plant
  misc_feature: MA Experiment ID: 20000224 Result: Up-regulated in Transcription
  misc_feature: MA Experiment ID: 20000264 Result: Up-regulated in Transcription
  misc_feature: MA Experiment 20000264 PARAMETER Experiment Name: At_Open_Flower_P Parameter: Age (day) Value: 21
  misc_feature: MA Experiment 20000264 PARAMETER Experiment Name: At_Open_Flower_P Parameter: Plant Line Value: WS
  misc_feature: MA Experiment 20000264 PARAMETER Experiment Name: At_Open_Flower_P Parameter: Tissue Value: Open Flower vs. Whole Plant
  misc_feature: MA Experiment ID: 20000286 Result: Up-regulated in Transcription
  misc_feature: MA Experiment 20000286 PARAMETER Experiment Name: At_Open_Flower_P Parameter: Age (day) Value: 21
  misc_feature: MA Experiment 20000286 PARAMETER Experiment Name: At_Open_Flower_P Parameter: Plant Line Value: WS
  misc_feature: MA Experiment 20000286 PARAMETER Experiment Name: At_Open_Flower_P Parameter: Tissue Value: Half Open vs. Whole Plant
  misc_feature: MA Experiment ID: 20000573 Result: Down-regulated in Transcription
  misc_feature: MA Experiment 20000573 PARAMETER Experiment Name: At_100uM_ABA_Mutants__P Parameter: Organism Value: A. thaliana
  misc_feature: MA Experiment 20000573 PARAMETER Experiment Name: At_100uM_ABA_Mutants__P Parameter: Plant Line Value: CS22 vs. Ler wt
  misc_feature: MA Experiment 20000573 PARAMETER Experiment Name: At_100uM_ABA_Mutants__P Parameter: Timepoint (hr) Value: N/A
  misc_feature: MA Experiment 20000573 PARAMETER Experiment Name: At_100uM_ABA_Mutants__P Parameter: Tissue Value: Whole Plant
  misc_feature: MA Experiment 20000573 PARAMETER Experiment Name: At_100uM_ABA_Mutants__P Parameter: Treatment Value: None
  misc_feature: MA Experiment ID: 20000574 Result: Down-regulated in Transcription
  misc_feature: MA Experiment 20000574 PARAMETER Experiment Name: At_100uM_ABA_Mutants__P Parameter: Organism Value: A. thaliana
  misc_feature: MA Experiment 20000574 PARAMETER Experiment Name: At_100uM_ABA_Mutants__P Parameter: Plant Line Value: CS23 vs. Ler wt
  misc_feature: MA Experiment 20000574 PARAMETER Experiment Name: At_100uM_ABA_Mutants__P Parameter: Timepoint (hr) Value: N/A
  misc_feature: MA Experiment 20000574 PARAMETER Experiment Name: At_100uM_ABA_Mutants__P Parameter: Tissue Value: Whole Plant
  misc_feature: MA Experiment 20000574 PARAMETER Experiment Name: At_100uM_ABA_Mutants__P Parameter: Treatment Value: None
  misc_feature: MA Experiment ID: 20000794 Result: Up-regulated in Transcription
  misc_feature: MA Experiment 20000794 PARAMETER Experiment Name: At_Petals_P Parameter: Age (day) Value: 23-25 days
  misc_feature: MA Experiment 20000794 PARAMETER Experiment Name: At_Petals_P Parameter: Plant Line Value: WS
  misc_feature: MA Experiment 20000794 PARAMETER Experiment Name: At_Petals_P Parameter: Tissue Value: Petals vs. Whole plant
  misc_feature: MA Experiment ID: 20001911 Result: Down-regulated in Transcription
  misc_feature: MA Experiment 20001911 PARAMETER Experiment Name: At_Drought_Reproduction_P Parameter: Age (day) Value: 40
  misc_feature: MA Experiment 20001911 PARAMETER Experiment Name: At_Drought_Reproduction_P Parameter: Organism Value: A. thaliana
  misc_feature: MA Experiment 20001911 PARAMETER Experiment Name: At_Drought_Reproduction_P Parameter: Plant Line Value: WS
  misc_feature: MA Experiment 20001911 PARAMETER Experiment Name: At_Drought_Reproduction_P Parameter: Timepoint (day) Value: 10
  misc_feature: MA Experiment 20001911 PARAMETER Experiment Name: At_Drought_Reproduction_P Parameter: Tissue Value: Flowers
  misc_feature: MA Experiment 20001911 PARAMETER Experiment Name: At_Drought_Reproduction_P Parameter: Treatment Value: Drought vs. No Drought
cgctttattcagatctgaagaagaagaagaagaagaaacatagttgaagtctctgttaatatgtcttcaacaacaacagattctacagaattgcaaaatctgatcaaactgtttcaaaattgccaaactcatcctcgtcaacattttcctgcaaaatcttcagctgtattagtttgtctataccaagaacaaagagaagacaaaaacgagctacgcgtaatcttaaccaaacgatctactactctctcttctcatcctggggaagtagcattgcctggaggaaaaagagaccaagaagataaagatgatatagctactgcgttgagagaagctcgtgaagaaatcggtttagatccttctcttgttacaatcatttctgttcttgaaccatttgttaacaagaagggaatgtcggtagcaccagttatcggttttctacacgataagaaagcgtttaaacagttaccaaatccagctgaagtggaagagatctttgatgtgccattagagatgttcctcaaggacagaaacaggcgagcagaggaacgagagcatgaaggagagagatatcttcttcaatactttgattactattccgaagataaagagagaagctttatcatatgggcactcactgctggtattctgatcagagttgcctccattgtttatcagagattaccggagtttcaagaacgtaaaccgagtttctggaatcagcctaactgattcttgacttgatctgattgagaaaattgaaacttttatgtataataagcgatacagattgaatcttctttaaatgtgtttcaagaatctatctttactct

SEQ ID NO: 76737 - protein, 222 aa, Arabidopsis thaliana; identical to SEQ ID NO: 74452
  peptide (1)..(222): Ceres Seq. ID no. 11035333
  misc_feature (32)..(170): Pfam Name: NUDIX domain Pfam Description: NUDIX domain
  misc_feature (1)..(222): Homolog of NCBI NO: 15242543 NR Description: putative protein; protein id: At5g45940.1, by cDNA: 141753. [Arabidopsis thaliana] gb|AAF24540.1~gene_id:K15I22.14~similar to unknown protein
  misc_feature (1)..(222): Homolog of NCBI NO: 21553389 NR Description: unknown [Arabidopsis thaliana]
  misc_feature (29)..(217): Homolog of NCBI NO: 18396900 NR Description: Expressed protein; protein id: At1g28960.1,
  misc_feature (29)..(217): Homolog of NCBI NO: 30690557 NR Description: MutT/nudix family protein [Arabidopsis thaliana]
  misc_feature (29)..(217): Homolog of NCBI NO: 26450576 NR Description: unknown protein [Arabidopsis thaliana]
  misc_feature (29)..(217): Homolog of NCBI NO: 10764850 NR Description: F1K23.5 [Arabidopsis thaliana]
  misc_feature (29)..(216): Homolog of NCBI NO: 18403412 NR Description: expressed protein; protein id: At2g33980.1, by cDNA: gi_13430755, supported by cDNA: gi_15293224 [Arabidopsis >gi|13430756|gb|AAK26000.1|AF360290_1 unknown protein
  misc_feature (29)..(221): Homolog of NCBI NO: 40253324 NR Description: putative phosphohydrolase [Oryza sativa (japonica group)] >gi|40253358|dbj|BAD05290.1| putative phosphohydrolase
  misc_feature (27)..(204): Homolog of NCBI NO: 23470438 NR Description: hypothetical protein [Pseudomonas syringae pv.
  misc_feature (28)..(211): Homolog of NCBI NO: 18859595 NR Description: nudix (nucleoside diphosphate linked moiety motif 7; RIKEN cDNA 1300007B24 gene; RIKEN cDNA 2210404C19 gene; A diphosphatase [Mus musculus]

SEQ ID NO: 76738 - DNA, 850 bp, Arabidopsis thaliana
  misc_feature (1)..(850): Ceres Seq. ID no. 11035355
  misc_feature: MA Experiment ID: 108461 Result: Up-regulated in Transcription
  misc_feature: MA Experiment 108461 PARAMETER Experiment Name: At_Germinating_Seeds_cDNA_P Parameter: Age (day) Value: 1 vs. 0
  misc_feature: MA Experiment 108461 PARAMETER Experiment Name: At_Germinating_Seeds_cDNA_P Parameter: Tissue Value: Germinating Seeds
  misc_feature: MA Experiment ID: 108462 Result: Up-regulated in Transcription
  misc_feature: MA Experiment 108462 PARAMETER Experiment Name: At_Germinating_Seeds_cDNA_P Parameter: Age (day) Value: 2 vs. 0
  misc_feature: MA Experiment 108462 PARAMETER Experiment Name: At_Germinating_Seeds_cDNA_P Parameter: Tissue Value: Germinating Seeds
  misc_feature: MA Experiment ID: 108463 Result: Up-regulated in Transcription
  misc_feature: MA Experiment 108463 PARAMETER Experiment Name: At_Germinating_Seeds_cDNA_P Parameter: Age (day) Value: 3 vs. 0
  misc_feature: MA Experiment 108463 PARAMETER Experiment Name: At_Germinating_Seeds_cDNA_P Parameter: Tissue Value: Germinating Seeds
  misc_feature: MA Experiment ID: 108473 Result: Down-regulated in Transcription
  misc_feature: MA Experiment 108473 PARAMETER Experiment Name: At_Drought_Flowers_cDNA_P Parameter: Timepoint (hr) Value: 7 d
  misc_feature: MA Experiment 108473 PARAMETER Experiment Name: At_Drought_Flowers_cDNA_P Parameter: Tissue Value: Flower
  misc_feature: MA Experiment 108473 PARAMETER Experiment Name: At_Drought_Flowers_cDNA_P Parameter: Treatment Value: Drought vs. No Drought
  misc_feature: MA Experiment ID: 108489 Result: Down-regulated in Transcription
  misc_feature: MA Experiment ID: 108576 Result: Down-regulated in Transcription
  misc_feature: MA Experiment 108576 PARAMETER Experiment Name: At_42deg_Heat_cDNA_P Parameter: Temperature (deg C) Value: 42 vs. 22
  misc_feature: MA Experiment 108576 PARAMETER Experiment Name: At_42deg_Heat_cDNA_P Parameter: Timepoint (hr) Value: 1
  misc_feature: MA Experiment 108576 PARAMETER Experiment Name: At_42deg_Heat_cDNA_P Parameter: Tissue Value: Aerial
  misc_feature: MA Experiment ID: 20000090 Result: Down-regulated in Transcription
  misc_feature: MA Experiment ID: 20000111 Result: Down-regulated in Transcription
  misc_feature: MA Experiment 20000111 PARAMETER Experiment Name: At_42deg_Heat_cDNA_P Parameter: Temperature (deg C) Value: 42 vs. 22
  misc_feature: MA Experiment 20000111 PARAMETER Experiment Name: At_42deg_Heat_cDNA_P Parameter: Timepoint (hr) Value: 6
  misc_feature: MA Experiment 20000111 PARAMETER Experiment Name: At_42deg_Heat_cDNA_P Parameter: Tissue Value: Aerial
  misc_feature: MA Experiment ID: 20000112 Result: Down-regulated in Transcription
  misc_feature: MA Experiment 20000112 PARAMETER Experiment Name: At_42deg_Heat_cDNA_P Parameter: Temperature (deg C) Value: 42 vs. 22
  misc_feature: MA Experiment 20000112 PARAMETER Experiment Name: At_42deg_Heat_cDNA_P Parameter: Timepoint (hr) Value: 2
  misc_feature: MA Experiment 20000112 PARAMETER Experiment Name: At_42deg_Heat_cDNA_P Parameter: Tissue Value: Aerial
  misc_feature: MA Experiment ID: 20000113 Result: Down-regulated in Transcription
  misc_feature: MA Experiment 20000113 PARAMETER Experiment Name: At_42deg_Heat_cDNA_P Parameter: Temperature (deg C) Value: 42 vs. 22
  misc_feature: MA Experiment 20000113 PARAMETER Experiment Name: At_42deg_Heat_cDNA_P Parameter: Timepoint (hr) Value: 8
  misc_feature: MA Experiment 20000113 PARAMETER Experiment Name: At_42deg_Heat_cDNA_P Parameter: Tissue Value: Aerial
  misc_feature: MA Experiment ID: 20000144 Result: Down-regulated in Transcription
  misc_feature: MA Experiment 20000144 PARAMETER Experiment Name: At_42deg_Heat_cDNA_P Parameter: Temperature (deg C) Value: 42 vs. 22
  misc_feature: MA Experiment 20000144 PARAMETER Experiment Name: At_42deg_Heat_cDNA_P Parameter: Timepoint (hr) Value: 1
  misc_feature: MA Experiment 20000144 PARAMETER Experiment Name: At_42deg_Heat_cDNA_P Parameter: Tissue Value: Aerial
  misc_feature: MA Experiment ID: 20000224 Result: Up-regulated in Transcription
  misc_feature: MA Experiment ID: 20000307 Result: Up-regulated in Transcription
  misc_feature: MA Experiment 20000307 PARAMETER Experiment Name: At_Germinating_Seeds_Sub_P Parameter: Age (hr) Value: 24 vs. 0
  misc_feature: MA Experiment 20000307 PARAMETER Experiment Name: At_Germinating_Seeds_Sub_P Parameter: Organism Value: A. thaliana
  misc_feature: MA Experiment 20000307 PARAMETER Experiment Name: At_Germinating_Seeds_Sub_P Parameter: Plant Line Value: WS
  misc_feature: MA Experiment 20000307 PARAMETER Experiment Name: At_Germinating_Seeds_Sub_P Parameter: Tissue Value: Germinating Seeds
  misc_feature: MA Experiment ID: 20000314 Result: Down-regulated in Transcription
  misc_feature: MA Experiment 20000314 PARAMETER Experiment Name: At_14day_Shoots-Roots_Sub_P Parameter: Age (day) Value: 14
  misc_feature: MA Experiment 20000314 PARAMETER Experiment Name: At_14day_Shoots-Roots_Sub_P Parameter: Organism Value: A. thaliana
  misc_feature: MA Experiment 20000314 PARAMETER Experiment Name: At_14day_Shoots-Roots_Sub_P Parameter: Plant Line Value: WS
  misc_feature: MA Experiment 20000314 PARAMETER Experiment Name: At_14day_Shoots-Roots_Sub_P Parameter: Tissue Value: Roots vs. Whole Plant
  misc_feature: MA Experiment ID: 20000327 Result: Down-regulated in Transcription
  misc_feature: MA Experiment 20000327 PARAMETER Experiment Name: At_42deg_Heat_Sub_P Parameter: Age (day) Value: 14
  misc_feature: MA Experiment 20000327 PARAMETER Experiment Name: At_42deg_Heat_Sub_P Parameter: Organism Value: A. thaliana
  misc_feature: MA Experiment 20000327 PARAMETER Experiment Name: At_42deg_Heat_Sub_P Parameter: Plant Line Value: WS
  misc_feature: MA Experiment 20000327 PARAMETER Experiment Name: At_42deg_Heat_Sub_P Parameter: Temperature (deg C) Value: 42 vs. 22
  misc_feature: MA Experiment 20000327 PARAMETER Experiment Name: At_42deg_Heat_Sub_P Parameter: Timepoint (hr) Value: 1
  misc_feature: MA Experiment 20000327 PARAMETER Experiment Name: At_42deg_Heat_Sub_P Parameter: Tissue Value: Aerial
  misc_feature: MA Experiment ID: 20000328 Result: Down-regulated in Transcription
  misc_feature: MA Experiment 20000328 PARAMETER Experiment Name: At_42deg_Heat_Sub_P Parameter: Age (day) Value: 14
  misc_feature: MA Experiment 20000328 PARAMETER Experiment Name: At_42deg_Heat_Sub_P Parameter: Organism Value: A. thaliana
  misc_feature: MA Experiment 20000328 PARAMETER Experiment Name: At_42deg_Heat_Sub_P Parameter: Plant Line Value: WS
  misc_feature: MA Experiment 20000328 PARAMETER Experiment Name: At_42deg_Heat_Sub_P Parameter: Temperature (deg C) Value: 42 vs. 22
  misc_feature: MA Experiment 20000328 PARAMETER Experiment Name: At_42deg_Heat_Sub_P Parameter: Timepoint (hr) Value: 6
  misc_feature: MA Experiment 20000328 PARAMETER Experiment Name: At_42deg_Heat_Sub_P Parameter: Tissue Value: Aerial
  misc_feature: MA Experiment ID: 20000355 Result: Up-regulated in Transcription
  misc_feature: MA Experiment 20000355 PARAMETER Experiment Name: At_Siliques_Sub_P Parameter: Age (day) Value: 21
  misc_feature: MA Experiment 20000355 PARAMETER Experiment Name: At_Siliques_Sub_P Parameter: Organism Value: A. thaliana
  misc_feature: MA Experiment 20000355 PARAMETER Experiment Name: At_Siliques_Sub_P Parameter: Plant Line Value: WS
  misc_feature: MA Experiment 20000355 PARAMETER Experiment Name: At_Siliques_Sub_P Parameter: Tissue Value: Less Than 5mm Siliques vs. Whole Plant
  misc_feature: Pfam Name: DUF887 Pfam Description: Eukaryotic protein of unknown function (DUF887)
acaaaattttgccttggcttgcgaaaaaaggagatcaagtgatcatatggaggaagaacaagtaagagcaattaagataatagtatttggagtcatctcatggggtgtggccttcattctcacccggagaatcttctcaagctactcattcagcttcagcaaccgtcttctctccacggctcacgcgactatcgctgtcactttagcaacactctctgttcaagatttgtcttgccctgtttgtccccttgcttctaagccatctcataaacagatggacgtgatggcgttttcgttgtcgtacatgatctacgatctaatatgttgtcatttcgatcaagtgtttagcattgataacgcggttcatcatttcgttagcattcttggttttatagctggacttgcataccaaaagtctggatctgagatcgtggctacactgtgggtagcagagatatcaagtccttttttccaccttagggagattctcaaagagattggatacaaagacaccaaactcaatctagctgccgatgtgtgttttgccactatattcacattggcgagaattgtgtgtggacctttcctcgtttacgtcagtctatcagctgataatcccatcttcatcaaggcaatgggatcaggattacaactcgtgagcatcttttggttctataaaattttcgggatgatgagatataaactttttaagaagccaaagtcaaacaaaaagtctacttagcttagttagagatatacaaaagctgattcaatccaaatatttttttcttatttttatttatggtcatttatctattttattaataaaataataataaaaaaatgtctc

SEQ ID NO: 76739 - protein, 246 aa, Arabidopsis thaliana
  peptide (1)..(246): Ceres Seq. ID no. 11035356
  misc_feature: Pfam Name: DUF887 Pfam Description: Eukaryotic protein of unknown function (DUF887)
  misc_feature (16)..(246): Homolog of NCBI NO: 22330031 NR Description: hypothetical protein; protein id: At1g45010.1, by cDNA: gi_17380925 [Arabidopsis thaliana] unknown protein [Arabidopsis thaliana]
  misc_feature (16)..(245): Homolog of NCBI NO: 30693154 NR Description: expressed protein [Arabidopsis thaliana]
  misc_feature (16)..(210): Homolog of NCBI NO: 15219511 NR Description: hypothetical protein; protein id: At1g35170.1
  misc_feature (16)..(186): Homolog of NCBI NO: 25518603 NR Description: hypothetical protein T32G9.28 - Arabidopsis >gi|12320960|gb|AAG50605.1|AC079605_10 hypothetical protein
  misc_feature (27)..(243): Homolog of NCBI NO: 34903030 NR Description: unnamed protein product [Oryza sativa (japonica group)] >gi|7228458|dbj|BAA92418.1| unnamed protein product
  misc_feature (16)..(91): Homolog of NCBI NO: 25405881 NR Description: protein F27F5.9 [imported] - Arabidopsis thaliana
  misc_feature (135)..(179): Homolog of NCBI NO: 25405881 NR Description: protein F27F5.9 [imported] - Arabidopsis thaliana
  misc_feature (27)..(238): Homolog of NCBI NO: 34535216 NR Description: unnamed protein product [Homo sapiens]
  misc_feature (49)..(240): Homolog of NCBI NO: 27661880 NR Description: hypothetical protein XP_236191 [Rattus norvegicus]
QNFALACEKRRSSDHMEEEQVRAIKIIVFGVISWGVAFILTRRIFSSYSFSFSNRLLSTAHATIAVTLATLSVQDLSCPVCPLASKPSHKQMDVMAFSLSYMIYDLICCHFDQVFSIDNAVHHFVSILGFIAGLAYQKSGSEIVATLWVAEISSPFFHLREILKEIGYKDTKLNLAADVCFATIFTLARIVCGPFLVYVSLSADNPIFIKAMGSGLQLVSIFWFYKIFGMMRYKLFKKPKSNKKST

SEQ ID NO: 76740 - protein, 231 aa, Arabidopsis thaliana; identical to SEQ ID NO: 34728
  peptide (1)..(231): Ceres Seq. ID no. 11035357
  misc_feature: Pfam Name: DUF887 Pfam Description: Eukaryotic protein of unknown function (DUF887)
  misc_feature (1)..(231): Homolog of NCBI NO: 22330031 NR Description: hypothetical protein; protein id: At1g45010.1, by cDNA: gi_17380925 [Arabidopsis thaliana] unknown protein [Arabidopsis thaliana]
  misc_feature (1)..(230): Homolog of NCBI NO: 30693154 NR Description: expressed protein [Arabidopsis thaliana]
  misc_feature (1)..(195): Homolog of NCBI NO: 15219511 NR Description: hypothetical protein; protein id: At1g35170.1
  misc_feature (1)..(171): Homolog of NCBI NO: 25518603 NR Description: hypothetical protein T32G9.28 - Arabidopsis >gi|12320960|gb|AAG50605.1|AC079605_10 hypothetical protein
  misc_feature (12)..(228): Homolog of NCBI NO: 34903030 NR Description: unnamed protein product [Oryza sativa (japonica group)] >gi|7228458|dbj|BAA92418.1| unnamed protein product
  misc_feature (1)..(76): Homolog of NCBI NO: 25405881 NR Description: protein F27F5.9 [imported] - Arabidopsis thaliana
  misc_feature (120)..(164): Homolog of NCBI NO: 25405881 NR Description: protein F27F5.9 [imported] - Arabidopsis thaliana
  misc_feature (12)..(223): Homolog of NCBI NO: 34535216 NR Description: unnamed protein product [Homo sapiens]
  misc_feature (34)..(225): Homolog of NCBI NO: 27661880 NR Description: hypothetical protein XP_236191 [Rattus norvegicus]

SEQ ID NO: 76741 - protein, 155 aa, Arabidopsis thaliana; identical to SEQ ID NO: 34729
  peptide (1)..(155): Ceres Seq. ID no. 11035358
  misc_feature: Pfam Name: DUF887 Pfam Description: Eukaryotic protein of unknown function (DUF887)
  misc_feature (1)..(155): Homolog of NCBI NO: 22330031 NR Description: hypothetical protein; protein id: At1g45010.1, by cDNA: gi_17380925 [Arabidopsis thaliana] unknown protein [Arabidopsis thaliana]
  misc_feature (1)..(154): Homolog of NCBI NO: 30693154 NR Description: expressed protein [Arabidopsis thaliana]
  misc_feature (1)..(119): Homolog of NCBI NO: 15219511 NR Description: hypothetical protein; protein id: At1g35170.1
  misc_feature (1)..(95): Homolog of NCBI NO: 25518603 NR Description: hypothetical protein T32G9.28 - Arabidopsis >gi|12320960|gb|AAG50605.1|AC079605_10 hypothetical protein
  misc_feature (1)..(152): Homolog of NCBI NO: 34903030 NR Description: unnamed protein product [Oryza sativa (japonica group)] >gi|7228458|dbj|BAA92418.1| unnamed protein product
  misc_feature (44)..(88): Homolog of NCBI NO: 25405881 NR Description: protein F27F5.9 [imported] - Arabidopsis thaliana
  misc_feature (1)..(147): Homolog of NCBI NO: 34535216 NR Description: unnamed protein product [Homo sapiens]
  misc_feature (1)..(149): Homolog of NCBI NO: 27661880 NR Description: hypothetical protein XP_236191 [Rattus norvegicus]

SEQ ID NO: 76742 - DNA, 1494 bp, Arabidopsis thaliana
  misc_feature (1)..(1494): Ceres Seq. ID no. 11035369
  misc_feature: MA Experiment ID: 20000113 Result: Down-regulated in Transcription
  misc_feature: MA Experiment 20000113 PARAMETER Experiment Name: At_42deg_Heat_cDNA_P Parameter: Temperature (deg C) Value: 42 vs. 22
  misc_feature: MA Experiment 20000113 PARAMETER Experiment Name: At_42deg_Heat_cDNA_P Parameter: Timepoint (hr) Value: 8
  misc_feature: MA Experiment 20000113 PARAMETER Experiment Name: At_42deg_Heat_cDNA_P Parameter: Tissue Value: Aerial
  misc_feature: MA Experiment ID: 20000315 Result: Down-regulated in Transcription
  misc_feature: MA Experiment 20000315 PARAMETER Experiment Name: At_14day_Shoots-Roots_Sub_P Parameter: Age (day) Value: 14
  misc_feature: MA Experiment 20000315 PARAMETER Experiment Name: At_14day_Shoots-Roots_Sub_P Parameter: Organism Value: A. thaliana
  misc_feature: MA Experiment 20000315 PARAMETER Experiment Name: At_14day_Shoots-Roots_Sub_P Parameter: Plant Line Value: WS
  misc_feature: MA Experiment 20000315 PARAMETER Experiment Name: At_14day_Shoots-Roots_Sub_P Parameter: Tissue Value: Shoots vs. Whole Plant
  misc_feature: MA Experiment ID: 20000328 Result: Down-regulated in Transcription
  misc_feature: MA Experiment 20000328 PARAMETER Experiment Name: At_42deg_Heat_Sub_P Parameter: Age (day) Value: 14
  misc_feature: MA Experiment 20000328 PARAMETER Experiment Name: At_42deg_Heat_Sub_P Parameter: Organism Value: A. thaliana
  misc_feature: MA Experiment 20000328 PARAMETER Experiment Name: At_42deg_Heat_Sub_P Parameter: Plant Line Value: WS
  misc_feature: MA Experiment 20000328 PARAMETER Experiment Name: At_42deg_Heat_Sub_P Parameter: Temperature (deg C) Value: 42 vs. 22
  misc_feature: MA Experiment 20000328 PARAMETER Experiment Name: At_42deg_Heat_Sub_P Parameter: Timepoint (hr) Value: 6
  misc_feature: MA Experiment 20000328 PARAMETER Experiment Name: At_42deg_Heat_Sub_P Parameter: Tissue Value: Aerial
atgggaatggcgtccatgagctctggtactgaaagccttcgtctttgcgtgtttgacttaagaagaggccaacacgaaggacaggaactggacaagatcttgttcttctatcctcctgatctaaccttctccactcagctatcggttataggtctcagtgaagggcttatcacgttcacgagacttttctccccggaggcagcttgtgaggtaattgaagcagagagacattcccatgttttctatgaggccgagcccgatatctggatggtcatgattgtagagaaaaataaggagattgaagctgtatggaggattgatgcattgcggagagtgcttaaggaagtgcactctctctttgttatgtttcaagggtcaattagggcattgcttgagaaagaaccaactggaggacttgtaagatcgcacttgtatccattcatcacagactatttaaatgatcttttcgttgggaaaaaacaacagttaccttccttccgtgacactttgaaagagcgtggaacagttcagatgctaactttagctagagatgcggcacttgaagttcagtctctcgtcggagtgctagattcatgtgctgggaccgttcgatgccactctgtgattctatttcatgatctactggtgtcaacaactctctcacctgatgataccgtcgacttgtttgcattttctgtcatgagattaaccacaaacgcgctatcatctggcacaagttcctggtcatatctacgcaaaggatccggttcacctcaaatatcttctagatctactacggtgccccctcttggttcaggtggtacattgccttcgggaaatggtagtagcacaggtcgtgttattagacctttgcagcacgataagtggtcgaaggggaaagatgggtttcttgtaactgatatttggggtttagatgccaccccgacaattttgatacagaagacacaggaaagtttttaccttttgacttatcagtacaagagtctcaccttggttcttctcgtgcctatcgctgcaattgttaatggagagctagacatctcattcgtgaagcagcaagttattgaaaacgcatcgaccaaaatcttgaaagtcgaagagaagctatcgaaagggtggggcggtgagaatgcttaccatgtaagcggttaccgttacttactagttgataatgacatggaagtttccagagcttctccaccaggaaaggtagcaacactagcaaaggagtctttgcttgcactaaacaagctaagggaagaagtggatacagaaaaaaaccgctcgaagcaagagaaagacatggaaatatgcattcgagcgaagaacaacacatgggtcatcgcgcgtctaaacagaggtaaagagctttacatggctttagagaaagcaagtgaaactcttcttgatgctacagactctgtccaaagattcagcaacaggtactgcagcggggcattccccatggattag

SEQ ID NO: 76743 - protein, 497 aa, Arabidopsis thaliana
  peptide (1)..(497): Ceres Seq. ID no. 11035370
  misc_feature (1)..(497): Homolog of NCBI NO: 15220866 NR Description: myrosinase precursor, putative; protein id:
  misc_feature (1)..(497): Homolog of NCBI NO: 25372816 NR Description: F23A5.27 [imported] - Arabidopsis thaliana
  misc_feature (3)..(497): Homolog of NCBI NO: 30684673 NR Description: expressed protein [Arabidopsis thaliana]
  misc_feature (1)..(497): Homolog of NCBI NO: 38175489 NR Description: putative myrosinase precursor [Oryza sativa
  misc_feature (125)..(497): Homolog of NCBI NO: 18394314 NR Description: expressed protein; protein id: At1g16020.1,
  misc_feature (125)..(497): Homolog of NCBI NO: 21618002 NR Description: unknown [Arabidopsis thaliana]
  misc_feature (234)..(488): Homolog of NCBI NO: 14517360 NR Description: At1g80910/F23A5_21 [Arabidopsis thaliana]
  misc_feature (3)..(312): Homolog of NCBI NO: 18394314 NR Description: expressed protein; protein id: At1g16020.1,
  misc_feature (3)..(312): Homolog of NCBI NO: 21618002 NR Description: unknown [Arabidopsis thaliana]
  misc_feature (192)..(497): Homolog of NCBI NO: 18266049 NR Description: myrosinase precursor [Brassica oleracea]
MGMASMSSGTESLRLCVFDLRRGQHEGQELDKILFFYPPDLTFSTQLSVIGLSEGLITFTRLFSPEAACEVIEAERHSHVFYEAEPDIWMVMIVEKNKEIEAVWRIDALRRVLKEVHSLFVMFQGSIRALLEKEPTGGLVRSHLYPFITDYLNDLFVGKKQQLPSFRDTLKERGTVQMLTLARDAALEVQSLVGVLDSCAGTVRCHSVILFHDLLVSTTLSPDDTVDLFAFSVMRLTTNALSSGTSSWSYLRKGSGSPQISSRSTTVPPLGSGGTLPSGNGSSTGRVIRPLQHDKWSKGKDGFLVTDIWGLDATPTILIQKTQESFYLLTYQYKSLTLVLLVPIAAIVNGELDISFVKQQVIENASTKILKVEEKLSKGWGGENAYHVSGYRYLLVDNDMEVSRASPPGKVATLAKESLLALNKLREEVDTEKNRSKQEKDMEICIRAKNNTWVIARLNRGKELYMALEKASETLLDATDSVQRFSNRYCSGAFPMD

SEQ ID NO: 76744 - protein, 495 aa, Arabidopsis thaliana
  peptide (1)..(495): Ceres Seq. ID no. 11035371
  misc_feature (1)..(495): Homolog of NCBI NO: 15220866 NR Description: myrosinase precursor, putative; protein id:
  misc_feature (1)..(495): Homolog of NCBI NO: 25372816 NR Description: F23A5.27 [imported] - Arabidopsis thaliana
  misc_feature (1)..(495): Homolog of NCBI NO: 30684673 NR Description: expressed protein [Arabidopsis thaliana]
  misc_feature (1)..(495): Homolog of NCBI NO: 38175489 NR Description: putative myrosinase precursor [Oryza sativa
  misc_feature (123)..(495): Homolog of NCBI NO: 18394314 NR Description: expressed protein; protein id: At1g16020.1,
  misc_feature (123)..(495): Homolog of NCBI NO: 21618002 NR Description: unknown [Arabidopsis thaliana]
  misc_feature (232)..(486): Homolog of NCBI NO: 14517360 NR Description: At1g80910/F23A5_21 [Arabidopsis thaliana]
  misc_feature (1)..(310): Homolog of NCBI NO: 18394314 NR Description: expressed protein; protein id: At1g16020.1,
  misc_feature (1)..(310): Homolog of NCBI NO: 21618002 NR Description: unknown [Arabidopsis thaliana]
  misc_feature (190)..(495): Homolog of NCBI NO: 18266049 NR Description: myrosinase precursor [Brassica oleracea]
MASMSSGTESLRLCVFDLRRGQHEGQELDKILFFYPPDLTFSTQLSVIGLSEGLITFTRLFSPEAACEVIEAERHSHVFYEAEPDIWMVMIVEKNKEIEAVWRIDALRRVLKEVHSLFVMFQGSIRALLEKEPTGGLVRSHLYPFITDYLNDLFVGKKQQLPSFRDTLKERGTVQMLTLARDAALEVQSLVGVLDSCAGTVRCHSVILFHDLLVSTTLSPDDTVDLFAFSVMRLTTNALSSGTSSWSYLRKGSGSPQISSRSTTVPPLGSGGTLPSGNGSSTGRVIRPLQHDKWSKGKDGFLVTDIWGLDATPTILIQKTQESFYLLTYQYKSLTLVLLVPIAAIVNGELDISFVKQQVIENASTKILKVEEKLSKGWGGENAYHVSGYRYLLVDNDMEVSRASPPGKVATLAKESLLALNKLREEVDTEKNRSKQEKDMEICIRAKNNTWVIARLNRGKELYMALEKASETLLDATDSVQRFSNRYCSGAFPMD

SEQ ID NO: 76745 - protein, 492 aa, Arabidopsis thaliana
  peptide (1)..(492): Ceres Seq. ID no. 11035372
  misc_feature (1)..(492): Homolog of NCBI NO: 15220866 NR Description: myrosinase precursor, putative; protein id:
  misc_feature (1)..(492): Homolog of NCBI NO: 25372816 NR Description: F23A5.27 [imported] - Arabidopsis thaliana
  misc_feature (1)..(492): Homolog of NCBI NO: 30684673 NR Description: expressed protein [Arabidopsis thaliana]
  misc_feature (1)..(492): Homolog of NCBI NO: 38175489 NR Description: putative myrosinase precursor [Oryza sativa
  misc_feature (120)..(492): Homolog of NCBI NO: 18394314 NR Description: expressed protein; protein id: At1g16020.1,
  misc_feature (120)..(492): Homolog of NCBI NO: 21618002 NR Description: unknown [Arabidopsis thaliana]
  misc_feature (229)..(483): Homolog of NCBI NO: 14517360 NR Description: At1g80910/F23A5_21 [Arabidopsis thaliana]
  misc_feature (1)..(307): Homolog of NCBI NO: 18394314 NR Description: expressed protein; protein id: At1g16020.1,
  misc_feature (1)..(307): Homolog of NCBI NO: 21618002 NR Description: unknown [Arabidopsis thaliana]
  misc_feature (187)..(492): Homolog of NCBI NO: 18266049 NR Description: myrosinase precursor [Brassica oleracea]
MSSGTESLRLCVFDLRRGQHEGQELDKILFFYPPDLTFSTQLSVIGLSEGLITFTRLFSPEAACEVIEAERHSHVFYEAEPDIWMVMIVEKNKEIEAVWRIDALRRVLKEVHSLFVMFQGSIRALLEKEPTGGLVRSHLYPFITDYLNDLFVGKKQQLPSFRDTLKERGTVQMLTLARDAALEVQSLVGVLDSCAGTVRCHSVILFHDLLVSTTLSPDDTVDLFAFSVMRLTTNALSSGTSSWSYLRKGSGSPQISSRSTTVPPLGSGGTLPSGNGSSTGRVIRPLQHDKWSKGKDGFLVTDIWGLDATPTILIQKTQESFYLLTYQYKSLTLVLLVPIAAIVNGELDISFVKQQVIENASTKILKVEEKLSKGWGGENAYHVSGYRYLLVDNDMEVSRASPPGKVATLAKESLLALNKLREEVDTEKNRSKQEKDMEICIRAKNNTWVIARLNRGKELYMALEKASETLLDATDSVQRFSNRYCSGAFPMD

SEQ ID NO: 76746 - DNA, 1367 bp, Arabidopsis thaliana
  misc_feature (1)..(1367): Ceres Seq. ID no. 11035385
  misc_feature: MA Experiment ID: 108434 Result: Down-regulated in Transcription
  misc_feature: MA Experiment 108434 PARAMETER Experiment Name: At_Root_Tips_cDNA_P Parameter: Tissue Value: Root Tips
  misc_feature: MA Experiment ID: 108462 Result: Up-regulated in Transcription
  misc_feature: MA Experiment 108462 PARAMETER Experiment Name: At_Germinating_Seeds_cDNA_P Parameter: Age (day) Value: 2 vs. 0
  misc_feature: MA Experiment 108462 PARAMETER Experiment Name: At_Germinating_Seeds_cDNA_P Parameter: Tissue Value: Germinating Seeds
  misc_feature: MA Experiment ID: 108501 Result: Up-regulated in Transcription
  misc_feature: MA Experiment 108501 PARAMETER Experiment Name: At_ap2_floral_buds_cDNA_P Parameter: Plant Line Value: ap2 (Ler.)
  misc_feature: MA Experiment 108501 PARAMETER Experiment Name: At_ap2_floral_buds_cDNA_P Parameter: Tissue Value: Closed Flower
  misc_feature: MA Experiment ID: 20000180 Result: Up-regulated in Transcription
  misc_feature: MA Experiment 20000180 PARAMETER Experiment Name: At_Germinating_Seeds_P Parameter: Age (hr) Value: 24 vs. 0
  misc_feature: MA Experiment 20000180 PARAMETER Experiment Name: At_Germinating_Seeds_P Parameter: Tissue Value: Germinating Seeds
  misc_feature: MA Experiment ID: 20000573 Result: Down-regulated in Transcription
  misc_feature: MA Experiment 20000573 PARAMETER Experiment Name: At_100uM_ABA_Mutants__P Parameter: Organism Value: A. thaliana
  misc_feature: MA Experiment 20000573 PARAMETER Experiment Name: At_100uM_ABA_Mutants__P Parameter: Plant Line Value: CS22 vs. Ler wt
  misc_feature: MA Experiment 20000573 PARAMETER Experiment Name: At_100uM_ABA_Mutants__P Parameter: Timepoint (hr) Value: N/A
  misc_feature: MA Experiment 20000573 PARAMETER Experiment Name: At_100uM_ABA_Mutants__P Parameter: Tissue Value: Whole Plant
  misc_feature: MA Experiment 20000573 PARAMETER Experiment Name: At_100uM_ABA_Mutants__P Parameter: Treatment Value: None
  misc_feature: MA Experiment ID: 20001555 Result: Up-regulated in Transcription
  misc_feature: MA Experiment 20001555 PARAMETER Experiment Name: At_Drought_Soil_Dry_P Parameter: Age (day) Value: 24
  misc_feature: MA Experiment 20001555 PARAMETER Experiment Name: At_Drought_Soil_Dry_P Parameter: Organism Value: A. thaliana
  misc_feature: MA Experiment 20001555 PARAMETER Experiment Name: At_Drought_Soil_Dry_P Parameter: Plant Line Value: WS
  misc_feature: MA Experiment 20001555 PARAMETER Experiment Name: At_Drought_Soil_Dry_P Parameter: Post Timepoint (hr) Value: None
  misc_feature: MA Experiment 20001555 PARAMETER Experiment Name: At_Drought_Soil_Dry_P Parameter: Post-Treatment Value: None
  misc_feature: MA Experiment 20001555 PARAMETER Experiment Name: At_Drought_Soil_Dry_P Parameter: Timepoint (day) Value: 10
  misc_feature: MA Experiment 20001555 PARAMETER Experiment Name: At_Drought_Soil_Dry_P Parameter: Treatment Value: Drought vs. No Drought
  misc_feature: MA Experiment ID: 20001556 Result: Up-regulated in Transcription
  misc_feature: MA Experiment 20001556 PARAMETER Experiment Name: At_Drought_Soil_Dry_P Parameter: Age (day) Value: 26
  misc_feature: MA Experiment 20001556 PARAMETER Experiment Name: At_Drought_Soil_Dry_P Parameter: Organism Value: A. thaliana
  misc_feature: MA Experiment 20001556 PARAMETER Experiment Name: At_Drought_Soil_Dry_P Parameter: Plant Line Value: WS
  misc_feature: MA Experiment 20001556 PARAMETER Experiment Name: At_Drought_Soil_Dry_P Parameter: Post Timepoint (hr) Value: None
  misc_feature: MA Experiment 20001556 PARAMETER Experiment Name: At_Drought_Soil_Dry_P Parameter: Post-Treatment Value: None
  misc_feature: MA Experiment 20001556 PARAMETER Experiment Name: At_Drought_Soil_Dry_P Parameter: Timepoint (day) Value: 12
  misc_feature: MA Experiment 20001556 PARAMETER Experiment Name: At_Drought_Soil_Dry_P Parameter: Treatment Value: Drought vs. No Drought
  misc_feature: Pfam Name: Aldo_ket_red Pfam Description: Aldo/keto reductase family
gaattcggcacgagcggcacgaggagtgattcatggcggaagcttgcggagtgagaaggatgaagctgggaagccaaggccttgaggtatctgcgcaaggccttggttgcatgggcctctccgctttctacggtgctcccaagccggaaaatgaagccatcgctctcatccaccacgctattcactccggcgttactctccttgacacctccgatatctacggccctgagaccaatgaagttctcctcggaaaggctctcaaggatggggtgagagaaaaagtggaacttgcgaccaaatttggaatcagttatgcagaggggaaaagagaggtcagaggagatcctgaatatgtaagggctgcttgtgaggcaaagtttaagaggctagatattgcctgcatcgatctctattatcagcatcgtgtcgatactcgtgtacctatcgaaatcactatgggagaactgaagaagctggttgaagagggtaaaataaagtacattggtttgtctgaagcctctgcctcaactatcagaagagcacatgctgttcacccaattactgccgtgcagatagaatggtccttgtggacgagagatgtggaagaagaaatcattccgacctgcagggaacttgggattgggattgttgcttacagtcctctaggacgaggtttcttcgcatctggacccaagcttgttgagaacctagaaaaggatgacttcagaaaggctctaccaagattccaagaggaaaacttagaccacaacaagattgtttatgaaaaagtttgtgcaatatcggagaagaaagggtgcactcctggacaactagccctggcatgggttcatcaccagggagatgacgtttgccctatcccaggaaccactaagatcgagaacctcaaacagaacattggagctttgtcagtgaaactcactcctgaagagatgactgagcttgaggccattgcccaaccaggttttgtgaaaggagatagatacagtaacatgataccaactttcaagaacgctgagacaccaccattgtctgcttggaaagccgcttaaaaccggctgaagtttctacggttgtggtggtgcatcatgacattgaagtggtcttaactttctgtcagctagatcagtgtgttggggaataatggtgcgtcttcgagagtagagtatcattcccacggaaacccaagtatcatggttatgccttgaagaataaataatgtagagttccccaagtgaaaacttcaattttacatttccatacattgtaaccaaactctataaataaagtgttgtgatacataccttaccaaaaaaggctatctatattgtaaaattcatcttctactc

SEQ ID NO: 76747 - protein, 345 aa, Arabidopsis thaliana
  peptide (1)..(345): Ceres Seq. ID no. 11035386
  misc_feature: Pfam Name: Aldo_ket_red Pfam Description: Aldo/keto reductase family
  misc_feature (1)..(345): Homolog of NCBI NO: 6562980 NR Description: auxin-induced atb2 [Arabidopsis thaliana]
  misc_feature (1)..(345): Homolog of NCBI NO: 18406861 NR Description: auxin-induced protein, putative; protein id: supported by cDNA: gi_15912324, supported by cDNA: gi_20466377, by cDNA: gi_6562979 [Arabidopsis thaliana]
  misc_feature (1)..(344): Homolog of NCBI NO: 15219786 NR Description: auxin-induced protein, putative; protein id: [Arabidopsis thaliana] >gi|25316215|pir||C96632 hypothetical
  misc_feature (1)..(345): Homolog of NCBI NO: 25316216 NR Description: hypothetical protein F8A5.24 [imported] -
  misc_feature (10)..(246): Homolog of NCBI NO: 25316328 NR Description: hypothetical protein F8A5.23 [imported] -
  misc_feature (285)..(345): Homolog of NCBI NO: 25316328 NR Description: hypothetical protein F8A5.23 [imported] -
  misc_feature (3)..(229): Homolog of NCBI NO: 15219805 NR Description: auxin-induced protein, putative; protein id:
  misc_feature (235)..(344): Homolog of NCBI NO: 15219805 NR Description: auxin-induced protein, putative; protein id:
  misc_feature (1)..(342): Homolog of NCBI NO: 15220214 NR Description: putative auxin-induced protein; protein id:
  misc_feature (7)..(344): Homolog of NCBI NO: 38344997 NR Description: OSJNBa0008A08.11 [Oryza sativa (japonica
MAEACGVRRMKLGSQGLEVSAQGLGCMGLSAFYGAPKPENEAIALIHHAIHSGVTLLDTSDIYGPETNEVLLGKALKDGVREKVELATKFGISYAEGKREVRGDPEYVRAACEAKFKRLDIACIDLYYQHRVDTRVPIEITMGELKKLVEEGKIKYIGLSEASASTIRRAHAVHPITAVQIEWSLWTRDVEEEIIPTCRELGIGIVAYSPLGRGFFASGPKLVENLEKDDFRKALPRFQEENLDHNKIVYEKVCAISEKKGCTPGQLALAWVHHQGDDVCPIPGTTKIENLKQNIGALSVKLTPEEMTELEAIAQPGFVKGDRYSNMIPTFKNAETPPLSAWKAA

SEQ ID NO: 76748 - protein, 336 aa, Arabidopsis thaliana
  peptide (1)..(336): Ceres Seq. ID no. 11035387
  misc_feature: Pfam Name: Aldo_ket_red Pfam Description: Aldo/keto reductase family
  misc_feature (1)..(336): Homolog of NCBI NO: 6562980 NR Description: auxin-induced atb2 [Arabidopsis thaliana]
  misc_feature (1)..(336): Homolog of NCBI NO: 18406861 NR Description: auxin-induced protein, putative; protein id: supported by cDNA: gi_15912324, supported by cDNA: gi_20466377, by cDNA: gi_6562979 [Arabidopsis thaliana]
  misc_feature (1)..(335): Homolog of NCBI NO: 15219786 NR Description: auxin-induced protein, putative; protein id: [Arabidopsis thaliana] >gi|25316215|pir||C96632 hypothetical
  misc_feature (1)..(336): Homolog of NCBI NO: 25316216 NR Description: hypothetical protein F8A5.24 [imported] -
  misc_feature (1)..(237): Homolog of NCBI NO: 25316328 NR Description: hypothetical protein F8A5.23 [imported] -
  misc_feature (276)..(336): Homolog of NCBI NO: 25316328 NR Description: hypothetical protein F8A5.23 [imported] -
  misc_feature (1)..(220): Homolog of NCBI NO: 15219805 NR Description: auxin-induced protein, putative; protein id:
  misc_feature (226)..(335): Homolog of NCBI NO: 15219805 NR Description: auxin-induced protein, putative; protein id:
  misc_feature (1)..(333): Homolog of NCBI NO: 15220214 NR Description: putative auxin-induced protein; protein id:
  misc_feature (1)..(335): Homolog of NCBI NO: 38344997 NR Description: OSJNBa0008A08.11 [Oryza sativa (japonica
MKLGSQGLEVSAQGLGCMGLSAFYGAPKPENEAIALIHHAIHSGVTLLDTSDIYGPETNEVLLGKALKDGVREKVELATKFGISYAEGKREVRGDPEYVRAACEAKFKRLDIACIDLYYQHRVDTRVPIEITMGELKKLVEEGKIKYIGLSEASASTIRRAHAVHPITAVQIEWSLWTRDVEEEIIPTCRELGIGIVAYSPLGRGFFASGPKLVENLEKDDFRKALPRFQEENLDHNKIVYEKVCAISEKKGCTPGQLALAWVHHQGDDVCPIPGTTKIENLKQNIGALSVKLTPEEMTELEAIAQPGFVKGDRYSNMIPTFKNAETPPLSAWKAA

SEQ ID NO: 76749 - protein, 319 aa, Arabidopsis thaliana
  peptide (1)..(319): Ceres Seq. ID no. 11035388
  misc_feature: Pfam Name: Aldo_ket_red Pfam Description: Aldo/keto reductase family
  misc_feature (1)..(319): Homolog of NCBI NO: 6562980 NR Description: auxin-induced atb2 [Arabidopsis thaliana]
  misc_feature (1)..(319): Homolog of NCBI NO: 18406861 NR Description: auxin-induced protein, putative; protein id: supported by cDNA: gi_15912324, supported by cDNA: gi_20466377, by cDNA: gi_6562979 [Arabidopsis thaliana]
  misc_feature (1)..(318): Homolog of NCBI NO: 15219786 NR Description: auxin-induced protein, putative; protein id: [Arabidopsis thaliana] >gi|25316215|pir||C96632 hypothetical
  misc_feature (1)..(319): Homolog of NCBI NO: 25316216 NR Description: hypothetical protein F8A5.24 [imported] -
  misc_feature (1)..(220): Homolog of NCBI NO: 25316328 NR Description: hypothetical protein F8A5.23 [imported] -
  misc_feature (259)..(319): Homolog of NCBI NO: 25316328 NR Description: hypothetical protein F8A5.23 [imported] -
  misc_feature (1)..(203): Homolog of NCBI NO: 15219805 NR Description: auxin-induced protein, putative; protein id:
  misc_feature (209)..(318): Homolog of NCBI NO: 15219805 NR Description: auxin-induced protein, putative; protein id:
  misc_feature (1)..(316): Homolog of NCBI NO: 15220214 NR Description: putative auxin-induced protein; protein id:
  misc_feature (1)..(318): Homolog of NCBI NO: 38344997 NR Description: OSJNBa0008A08.11 [Oryza sativa (japonica
MGLSAFYGAPKPENEAIALIHHAIHSGVTLLDTSDIYGPETNEVLLGKALKDGVREKVELATKFGISYAEGKREVRGDPEYVRAACEAKFKRLDIACIDLYYQHRVDTRVPIEITMGELKKLVEEGKIKYIGLSEASASTIRRAHAVHPITAVQIEWSLWTRDVEEEIIPTCRELGIGIVAYSPLGRGFFASGPKLVENLEKDDFRKALPRFQEENLDHNKIVYEKVCAISEKKGCTPGQLALAWVHHQGDDVCPIPGTTKIENLKQNIGALSVKLTPEEMTELEAIAQPGFVKGDRYSNMIPTFKNAETPPLSAWKAA

SEQ ID NO: 76750 - DNA, 1452 bp, Arabidopsis thaliana
  misc_feature (1)..(1452): Ceres Seq. ID no. 11035471
  misc_feature: MA Experiment ID: 108488 Result: Up-regulated in Transcription
  misc_feature: MA Experiment ID: 108573 Result: Down-regulated in Transcription
  misc_feature: MA Experiment 108573 PARAMETER Experiment Name: At_Drought_cDNA_P Parameter: Timepoint (hr) Value: 6
  misc_feature: MA Experiment 108573 PARAMETER Experiment Name: At_Drought_cDNA_P Parameter: Tissue Value: Aerial
  misc_feature: MA Experiment 108573 PARAMETER Experiment Name: At_Drought_cDNA_P Parameter: Treatment Value: Drought vs. No Drought
  misc_feature: MA Experiment ID: 108595 Result: Down-regulated in Transcription
  misc_feature: MA Experiment 108595 PARAMETER Experiment Name: At_Ler-pi_Ovule_cDNA_P Parameter: Plant Line Value: null
  misc_feature: MA Experiment ID: 108607 Result: Down-regulated in Transcription
  misc_feature: MA Experiment 108607 PARAMETER Experiment Name: At_100uM_ABA_cDNA_P Parameter: Timepoint (hr) Value: 4
  misc_feature: MA Experiment 108607 PARAMETER Experiment Name: At_100uM_ABA_cDNA_P Parameter: Tissue Value: Aerial
  misc_feature: MA Experiment 108607 PARAMETER Experiment Name: At_100uM_ABA_cDNA_P Parameter: Treatment Value: 100uM ABA vs. No Treatment
  misc_feature: MA Experiment ID: 20000069 Result: Down-regulated in Transcription
  misc_feature: MA Experiment 20000069 PARAMETER Experiment Name: At_100uM_ABA_Mutants_cDNA_P Parameter: Plant Line Value: CS23
  misc_feature: MA Experiment 20000069 PARAMETER Experiment Name: At_100uM_ABA_Mutants_cDNA_P Parameter: Timepoint (hr) Value: 6
  misc_feature: MA Experiment 20000069 PARAMETER Experiment Name: At_100uM_ABA_Mutants_cDNA_P Parameter: Tissue Value: Aerial
  misc_feature: MA Experiment 20000069 PARAMETER Experiment Name: At_100uM_ABA_Mutants_cDNA_P Parameter: Treatment Value: 100uM ABA vs. No Treatment
  misc_feature: MA Experiment ID: 20000070 Result: Down-regulated in Transcription
  misc_feature: MA Experiment 20000070 PARAMETER Experiment Name: At_100uM_ABA_Mutants_cDNA_P Parameter: Plant Line Value: CS24
  misc_feature: MA Experiment 20000070 PARAMETER Experiment Name: At_100uM_ABA_Mutants_cDNA_P Parameter: Timepoint (hr) Value: 6
  misc_feature: MA Experiment 20000070 PARAMETER Experiment Name: At_100uM_ABA_Mutants_cDNA_P Parameter: Tissue Value: Aerial
  misc_feature: MA Experiment 20000070 PARAMETER Experiment Name: At_100uM_ABA_Mutants_cDNA_P Parameter: Treatment Value: 100uM ABA vs. No Treatment
  misc_feature: MA Experiment ID: 20000071 Result: Down-regulated in Transcription
  misc_feature: MA Experiment 20000071 PARAMETER Experiment Name: At_100uM_ABA_Mutants_cDNA_P Parameter: Plant Line Value: CS8104
  misc_feature: MA Experiment 20000071 PARAMETER Experiment Name: At_100uM_ABA_Mutants_cDNA_P Parameter: Timepoint (hr) Value: 6
  misc_feature: MA Experiment 20000071 PARAMETER Experiment Name: At_100uM_ABA_Mutants_cDNA_P Parameter: Tissue Value: Aerial
  misc_feature: MA Experiment 20000071 PARAMETER Experiment Name: At_100uM_ABA_Mutants_cDNA_P Parameter: Treatment Value: 100uM ABA vs. No Treatment
  misc_feature: MA Experiment ID: 20000072 Result: Down-regulated in Transcription
  misc_feature: MA Experiment 20000072 PARAMETER Experiment Name: At_100uM_ABA_Mutants_cDNA_P Parameter: Plant Line Value: CS8105
  misc_feature: MA Experiment 20000072 PARAMETER Experiment Name: At_100uM_ABA_Mutants_cDNA_P Parameter: Timepoint (hr) Value: 6
  misc_feature: MA Experiment 20000072 PARAMETER Experiment Name: At_100uM_ABA_Mutants_cDNA_P Parameter: Tissue Value: Aerial
  misc_feature: MA Experiment 20000072 PARAMETER Experiment Name: At_100uM_ABA_Mutants_cDNA_P Parameter: Treatment Value: 100uM ABA vs. No Treatment
  misc_feature: MA Experiment ID: 20000086 Result: Down-regulated in Transcription
  misc_feature: MA Experiment 20000086 PARAMETER Experiment Name: At_100uM_ABA_Mutants_cDNA_P Parameter: Plant Line Value: CS22
  misc_feature: MA Experiment 20000086 PARAMETER Experiment Name: At_100uM_ABA_Mutants_cDNA_P Parameter: Timepoint (hr) Value: 6
  misc_feature: MA Experiment 20000086 PARAMETER Experiment Name: At_100uM_ABA_Mutants_cDNA_P Parameter: Tissue Value: Aerial
  misc_feature: MA Experiment 20000086 PARAMETER Experiment Name: At_100uM_ABA_Mutants_cDNA_P Parameter: Treatment Value: 100uM ABA vs. No Treatment
  misc_feature: MA Experiment ID: 20000087 Result: Down-regulated in Transcription
  misc_feature: MA Experiment 20000087 PARAMETER Experiment Name: At_100uM_ABA_Mutants_cDNA_P Parameter: Plant Line Value: WS
  misc_feature: MA Experiment 20000087 PARAMETER Experiment Name: At_100uM_ABA_Mutants_cDNA_P Parameter: Timepoint (hr) Value: 6
  misc_feature: MA Experiment 20000087 PARAMETER Experiment Name: At_100uM_ABA_Mutants_cDNA_P Parameter: Tissue Value: Aerial
  misc_feature: MA Experiment 20000087 PARAMETER Experiment Name: At_100uM_ABA_Mutants_cDNA_P Parameter: Treatment Value: 100uM ABA vs. No Treatment
  misc_feature: MA Experiment ID: 20000113 Result: Up-regulated in Transcription
  misc_feature: MA Experiment 20000113 PARAMETER Experiment Name: At_42deg_Heat_cDNA_P Parameter: Temperature (deg C) Value: 42 vs. 22
  misc_feature: MA Experiment 20000113 PARAMETER Experiment Name: At_42deg_Heat_cDNA_P Parameter: Timepoint (hr) Value: 8
  misc_feature: MA Experiment 20000113 PARAMETER Experiment Name: At_42deg_Heat_cDNA_P Parameter: Tissue Value: Aerial
  misc_feature: MA Experiment ID: 20000117 Result: Down-regulated in Transcription
  misc_feature: MA Experiment 20000117 PARAMETER Experiment Name: At_100uM_ABA_Mutants_cDNA_P Parameter: Plant Line Value: Columbia
  misc_feature: MA Experiment 20000117 PARAMETER Experiment Name: At_100uM_ABA_Mutants_cDNA_P Parameter: Timepoint (hr) Value: 6
  misc_feature: MA Experiment 20000117 PARAMETER Experiment Name: At_100uM_ABA_Mutants_cDNA_P Parameter: Tissue Value: Aerial
  misc_feature: MA Experiment 20000117 PARAMETER Experiment Name: At_100uM_ABA_Mutants_cDNA_P Parameter: Treatment Value: 100uM ABA vs. No Treatment
  misc_feature: MA Experiment ID: 20000224 Result: Down-regulated in Transcription
  misc_feature: MA Experiment ID: 20000227 Result: Up-regulated in Transcription
  misc_feature: MA Experiment 20000227 PARAMETER Experiment Name: At_Root-Tips-vs-Tops_P Parameter: Tissue Value: Root Tips vs. Root Tops
  misc_feature: MA Experiment ID: 20000437 Result: Down-regulated in Transcription
  misc_feature: MA Experiment 20000437 PARAMETER Experiment Name: At_Drought_P Parameter: Age (day) Value: 8
  misc_feature: MA Experiment 20000437 PARAMETER Experiment Name: At_Drought_P Parameter: Organism Value: A. thaliana
  misc_feature: MA Experiment 20000437 PARAMETER Experiment Name: At_Drought_P Parameter: Plant Line Value: WS
  misc_feature: MA Experiment 20000437 PARAMETER Experiment Name: At_Drought_P Parameter: Timepoint (hr) Value: 24
  misc_feature: MA Experiment 20000437 PARAMETER Experiment Name: At_Drought_P Parameter: Tissue Value: Whole Plant
  misc_feature: MA Experiment 20000437 PARAMETER Experiment Name: At_Drought_P Parameter: Treatment Value: Drought vs. No Drought
  misc_feature: MA Experiment ID: 20000438 Result: Up-regulated in Transcription
  misc_feature: MA Experiment 20000438 PARAMETER Experiment Name: At_Shoots__P Parameter: Age (day) Value: 14
  misc_feature: MA Experiment 20000438 PARAMETER Experiment Name: At_Shoots__P Parameter: Tissue Value: Shoots vs. Whole Plant
  misc_feature: MA Experiment ID: 20001904 Result: Down-regulated in Transcription
  misc_feature: MA Experiment 20001904 PARAMETER Experiment Name: At_Drought_Reproduction_P Parameter: Age (day) Value: 37
  misc_feature: MA Experiment 20001904 PARAMETER Experiment Name: At_Drought_Reproduction_P Parameter: Organism Value: A. thaliana
  misc_feature: MA Experiment 20001904 PARAMETER Experiment Name: At_Drought_Reproduction_P Parameter: Plant Line Value: WS
  misc_feature: MA Experiment 20001904 PARAMETER Experiment Name: At_Drought_Reproduction_P Parameter: Timepoint (day) Value: 7
  misc_feature: MA Experiment 20001904 PARAMETER Experiment Name: At_Drought_Reproduction_P Parameter: Tissue Value: Rosettes
  misc_feature: MA Experiment 20001904 PARAMETER Experiment Name: At_Drought_Reproduction_P Parameter: Treatment Value: Drought vs. No Drought
  misc_feature: MA Experiment ID: 20001905 Result: Down-regulated in Transcription
  misc_feature: MA Experiment 20001905 PARAMETER Experiment Name: At_Drought_Reproduction_P Parameter: Age (day) Value: 40
  misc_feature: MA Experiment 20001905 PARAMETER Experiment Name: At_Drought_Reproduction_P Parameter: Organism Value: A. thaliana
  misc_feature: MA Experiment 20001905 PARAMETER Experiment Name: At_Drought_Reproduction_P Parameter: Plant Line Value: WS
  misc_feature: MA Experiment 20001905 PARAMETER Experiment Name: At_Drought_Reproduction_P Parameter: Timepoint (day) Value: 10
  misc_feature: MA Experiment 20001905 PARAMETER Experiment Name: At_Drought_Reproduction_P Parameter: Tissue Value: Rosettes
  misc_feature: MA Experiment 20001905 PARAMETER Experiment Name: At_Drought_Reproduction_P Parameter: Treatment Value: Drought vs. No Drought
aacgagtggtgttgctctctccatcttcctcttcatcttcttctgttctctctctataaatacaagtttactcttcctcttcctcaaatctctgactcttctctgcattatctcttcgatctctccaactctccaaaaccttcctcagatgggaactaccaatggaacagactatggagcatacacatacaaggagctagaaagagagcaatattggccatctgagaatctcaagatatcaataacaggagctggaggtttcattgcatctcacattgctcgtcgtttgaagcacgaaggtcattacgtgattgcttctgactggaaaaagaatgaacacatgactgaagacatgttctgtgatgagttccatcttgttgatcttagggttatggagaattgtctcaaagttactgaaggagttgatcatgtttttaacttagctgctgatatgggtggtatgggttttatccagagtaatcactctgtgattatgtataataatactatgattagtttcaatatgattgaggctgctaggatcaatgggattaagaggttcttttatgcttcgagtgcttgtatctatccagagtttaagcagttggagactactaatgtgagcttgaaggagtcagatgcttggcctgcagagcctcaagatgcttatggtttggagaagcttgctacggaggagttgtgtaagcattacaacaaagattttggtattgagtgtcgaattggaaggttccataacatttatggtccttttggaacatggaaaggtggaagggagaaggctccagctgctttctgtaggaaggctcagacttccactgataggtttgagatgtggggagatgggcttcagacccgttcttttacctttatcgatgagtgtgttgaaggtgtactcaggttgacaaaatcagatttccgtgagccggtgaacatcggaagcgatgagatggtgagcatgaatgagatggctgagatggttctcagctttgaggaaaagaagcttccaattcaccacattcctggcccggaaggtgttcgtggtcgtaactcagacaacaatctgatcaaagaaaagcttggttgggctcctaatatgagattgaaggaggggcttagaataacctacttctggataaaggaacagatcgagaaagagaaagcaaagggaagcgatgtgtcgctttacgggtcatcaaaggtggttggaactcaagcaccggttcagctaggctcactccgcgcggctgatggaaaagagtgaagttcaccaaagtataagtcaagctcaaatatggccttttaagttcagcaaaatgtttagatatatttttaggtagcttcctattaaaaaagcaataataagtgttttggattttggttccttctattctgctaatccttgtttatgtttagttgaaaaagtttgcttgc

SEQ ID NO: 76751 - protein, 426 aa, Arabidopsis thaliana; identical to SEQ ID NO: 23827
  peptide (1)..(426): Ceres Seq. ID no. 11035472
  misc_feature (79)..(389): Pfam Name: NAD dependent epimerase/dehydratase family Pfam Description: NAD dependent epimerase/dehydratase family
  misc_feature (50)..(426): Homolog of NCBI NO: 15241945 NR Description: epimerase/dehydratase - like protein; protein id: supported by cDNA: gi_16323112, supported by cDNA: gi_16323179 thaliana] >gi|16323113|gb|AAL15291.1| AT5g28840/F7P1_20
  misc_feature (50)..(426): Homolog of NCBI NO: 37534380 NR Description: putative epimerase/dehydratase [Oryza sativa
  misc_feature (60)..(391): Homolog of NCBI NO: 28170704 NR Description: Ata17 protein [Saccharothrix mutabilis subsp.
  misc_feature (81)..(395): Homolog of NCBI NO: 9937230 NR Description: sugar epimerase BlmG [Streptomyces verticillus]
  misc_feature (81)..(228): Homolog of NCBI NO: 23008810 NR Description: hypothetical protein [Magnetospirillum
  misc_feature (78)..(387): Homolog of NCBI NO: 22298175 NR Description: GDP-fucose synthetase [Thermosynechococcus
  misc_feature (78)..(390): Homolog of NCBI NO: 24212751 NR Description: dTDPglucose 4,6-dehydratase [Leptospira
  misc_feature (75)..(391): Homolog of NCBI NO: 37523361 NR Description: similar to GDP-fucose synthetase [Gloeobacter
  misc_feature (75)..(387): Homolog of NCBI NO: 17232318 NR Description: dTDP-glucose dehydratase [Nostoc sp. PCC 7120]
  misc_feature (79)..(395): Homolog of NCBI NO: 23500289 NR Description: NAD-dependent epimerase/dehydratase family

SEQ ID NO: 76752 - protein, 377 aa, Arabidopsis thaliana; identical to SEQ ID NO: 23828
  peptide (1)..(377): Ceres Seq. ID no. 11035473
  misc_feature (30)..(340): Pfam Name: NAD dependent epimerase/dehydratase family Pfam Description: NAD dependent epimerase/dehydratase family
  misc_feature (1)..(377): Homolog of NCBI NO: 15241945 NR Description: epimerase/dehydratase - like protein; protein id: supported by cDNA: gi_16323112, supported by cDNA: gi_16323179 thaliana] >gi|16323113|gb|AAL15291.1| AT5g28840/F7P1_20
  misc_feature (1)..(377): Homolog of NCBI NO: 37534380 NR Description: putative epimerase/dehydratase [Oryza sativa
  misc_feature (11)..(342): Homolog of NCBI NO: 28170704 NR Description: Ata17 protein [Saccharothrix mutabilis subsp.
  misc_feature (32)..(346): Homolog of NCBI NO: 9937230 NR Description: sugar epimerase BlmG [Streptomyces verticillus]
  misc_feature (32)..(179): Homolog of NCBI NO: 23008810 NR Description: hypothetical protein [Magnetospirillum
  misc_feature (29)..(338): Homolog of NCBI NO: 22298175 NR Description: GDP-fucose synthetase [Thermosynechococcus
  misc_feature (29)..(341): Homolog of NCBI NO: 24212751 NR Description: dTDPglucose 4,6-dehydratase [Leptospira
  misc_feature (26)..(342): Homolog of NCBI NO: 37523361 NR Description: similar to GDP-fucose synthetase [Gloeobacter
  misc_feature (26)..(338): Homolog of NCBI NO: 17232318 NR Description: dTDP-glucose dehydratase [Nostoc sp. PCC 7120]
  misc_feature (30)..(346): Homolog of NCBI NO: 23500289 NR Description: NAD-dependent epimerase/dehydratase family

SEQ ID NO: 76753 - protein, 313 aa, Arabidopsis thaliana; identical to SEQ ID NO: 23829
  peptide (1)..(313): Ceres Seq. ID no. 11035474
  misc_feature (1)..(276): Pfam Name: NAD dependent epimerase/dehydratase family Pfam Description: NAD dependent epimerase/dehydratase family
  misc_feature (1)..(313): Homolog of NCBI NO: 15241945 NR Description: epimerase/dehydratase - like protein; protein id: supported by cDNA: gi_16323112, supported by cDNA: gi_16323179 thaliana] >gi|16323113|gb|AAL15291.1| AT5g28840/F7P1_20
  misc_feature (1)..(313): Homolog of NCBI NO: 37534380 NR Description: putative epimerase/dehydratase [Oryza sativa
  misc_feature (1)..(278): Homolog of NCBI NO: 28170704 NR Description: Ata17 protein [Saccharothrix mutabilis subsp.
  misc_feature (1)..(282): Homolog of NCBI NO: 9937230 NR Description: sugar epimerase BlmG [Streptomyces verticillus]
  misc_feature (1)..(115): Homolog of NCBI NO: 23008810 NR Description: hypothetical protein [Magnetospirillum
  misc_feature (1)..(274): Homolog of NCBI NO: 22298175 NR Description: GDP-fucose synthetase [Thermosynechococcus
  misc_feature (1)..(277): Homolog of NCBI NO: 24212751 NR Description: dTDPglucose 4,6-dehydratase [Leptospira
  misc_feature (1)..(278): Homolog of NCBI NO: 37523361 NR Description: similar to GDP-fucose synthetase [Gloeobacter
  misc_feature (1)..(274): Homolog of NCBI NO: 17232318 NR Description: dTDP-glucose dehydratase [Nostoc sp. PCC 7120]
  misc_feature (1)..(282): Homolog of NCBI NO: 23500289 NR Description: NAD-dependent epimerase/dehydratase family

SEQ ID NO: 76754 - DNA, 1617 bp, Arabidopsis thaliana
  misc_feature (1)..(1617): Ceres Seq. ID no. 11035475
  misc_feature: MA Experiment ID: 20000264 Result: Up-regulated in Transcription
  misc_feature: MA Experiment 20000264 PARAMETER Experiment Name: At_Open_Flower_P Parameter: Age (day) Value: 21
  misc_feature: MA Experiment 20000264 PARAMETER Experiment Name: At_Open_Flower_P Parameter: Plant Line Value: WS
  misc_feature: MA Experiment 20000264 PARAMETER Experiment Name: At_Open_Flower_P Parameter: Tissue Value: Open Flower vs. Whole Plant
  misc_feature: MA Experiment ID: 20000265 Result: Up-regulated in Transcription
  misc_feature: MA Experiment 20000265 PARAMETER Experiment Name: At_Open_Flower_P Parameter: Age (day) Value: 21
  misc_feature: MA Experiment 20000265 PARAMETER Experiment Name: At_Open_Flower_P Parameter: Plant Line Value: WS
  misc_feature: MA Experiment 20000265 PARAMETER Experiment Name: At_Open_Flower_P Parameter: Tissue Value: Closed Flower vs. Whole Plant
  misc_feature: MA Experiment ID: 20000286 Result: Up-regulated in Transcription
  misc_feature: MA Experiment 20000286 PARAMETER Experiment Name: At_Open_Flower_P Parameter: Age (day) Value: 21
  misc_feature: MA Experiment 20000286 PARAMETER Experiment Name: At_Open_Flower_P Parameter: Plant Line Value: WS
  misc_feature: MA Experiment 20000286 PARAMETER Experiment Name: At_Open_Flower_P Parameter: Tissue Value: Half Open vs. Whole Plant
  misc_feature: MA Experiment ID: 20000794 Result: Up-regulated in Transcription
  misc_feature: MA Experiment 20000794 PARAMETER Experiment Name: At_Petals_P Parameter: Age (day) Value: 23-25 days
  misc_feature: MA Experiment 20000794 PARAMETER Experiment Name: At_Petals_P Parameter: Plant Line Value: WS
  misc_feature: MA Experiment 20000794 PARAMETER Experiment Name: At_Petals_P Parameter: Tissue Value: Petals vs. Whole plant
  misc_feature: MA Experiment ID: 20001909 Result: Up-regulated in Transcription
  misc_feature: MA Experiment 20001909 PARAMETER Experiment Name: At_Drought_Reproduction_P Parameter: Age (day) Value: 35
  misc_feature: MA Experiment 20001909 PARAMETER Experiment Name: At_Drought_Reproduction_P Parameter: Organism Value: A. thaliana
  misc_feature: MA Experiment 20001909 PARAMETER Experiment Name: At_Drought_Reproduction_P Parameter: Plant Line Value: WS
  misc_feature: MA Experiment 20001909 PARAMETER Experiment Name: At_Drought_Reproduction_P Parameter: Timepoint (day) Value: 5
  misc_feature: MA Experiment 20001909 PARAMETER Experiment Name: At_Drought_Reproduction_P Parameter: Tissue Value: Flowers
  misc_feature: MA Experiment 20001909 PARAMETER Experiment Name: At_Drought_Reproduction_P Parameter: Treatment Value: Drought vs. No Drought
  misc_feature: MA Experiment ID: 20001910 Result: Up-regulated in Transcription
  misc_feature: MA Experiment 20001910 PARAMETER Experiment Name: At_Drought_Reproduction_P Parameter: Age (day) Value: 37
  misc_feature: MA Experiment 20001910 PARAMETER Experiment Name: At_Drought_Reproduction_P Parameter: Organism Value: A. thaliana
  misc_feature: MA Experiment 20001910 PARAMETER Experiment Name: At_Drought_Reproduction_P Parameter: Plant Line Value: WS
  misc_feature: MA Experiment 20001910 PARAMETER Experiment Name: At_Drought_Reproduction_P Parameter: Timepoint (day) Value: 7
  misc_feature: MA Experiment 20001910 PARAMETER Experiment Name: At_Drought_Reproduction_P Parameter: Tissue Value: Flowers
  misc_feature: MA Experiment 20001910 PARAMETER Experiment Name: At_Drought_Reproduction_P Parameter: Treatment Value: Drought vs. No Drought
  misc_feature: MA Experiment ID: 20001911 Result: Up-regulated in Transcription
  misc_feature: MA Experiment 20001911 PARAMETER Experiment Name: At_Drought_Reproduction_P Parameter: Age (day) Value: 40
  misc_feature: MA Experiment 20001911 PARAMETER Experiment Name: At_Drought_Reproduction_P Parameter: Organism Value: A. thaliana
  misc_feature: MA Experiment 20001911 PARAMETER Experiment Name: At_Drought_Reproduction_P Parameter: Plant Line Value: WS
  misc_feature: MA Experiment 20001911 PARAMETER Experiment Name: At_Drought_Reproduction_P Parameter: Timepoint (day) Value: 10
  misc_feature: MA Experiment 20001911 PARAMETER Experiment Name: At_Drought_Reproduction_P Parameter: Tissue Value: Flowers
  misc_feature: MA Experiment 20001911 PARAMETER Experiment Name: At_Drought_Reproduction_P Parameter: Treatment Value: Drought vs. No Drought
aaaaaaaaaaaactcgaaacaaagtattaaaacaaaatcaataaaaagagaataaaaaatggtgggttctcacaaagcaagcggagtgcttcttgtgctactagtggttatggccaccacaatagcaaacgggacacctgttgtcgatacagcaaaaaatgcagctacagcagttgaagatacagcaaaaaatgtagctacagcagttggcggtgcagctgcatcagttggtgctaaagtaacaggtgccaaaccaggcggtgcatcacttgatgttaaagcatcaggagccaaaggagacggcaaaactgatgatagtgcggcatttgcggctgcatggaaagaagcttgtgcagcagggagcacgattacagtgccaaaaggtgagtatttggtagagagcctagagttcaaaggtccatgcaaaggtccagtcactttggaattgaatggcaattttaaggctccggctacggtcaagaccactaagcctcatgccggatggattgatttcgaaaatctcgctgatttcactttgaatggaaacaaagctatttttgacggtcaagggtccctcgcttggaaggccaatgactgcgccaaaaccggcaaatgcaactctctccctatcaacatccgattcactggtctaacaaactcaaagattaacagtattacatcaacaaacagcaagcttttccacatgaacatccttaactgcaagaacataactcttacggatatcagtattgatgcacctccggagagtctcaacaccgatggtatccacatcggaaggtccaatggagtcaacttaattggggcaaagattaaaaccggagatgactgcgtttccattggagatggtaccgaaaatctcattgttgagaacgtagaatgtggaccaggacacggaatttccattggaagtcttggaagataccctaatgaacaaccagtaaaaggagtcaccgtgaggaaatgcctcatcaagaacactgacaatggtgttcgcatcaagacatggccaggatctccccccggtatcgcctccaacattcttttcgaagatatcacaatggacaatgttagccttcccgttctcatcgaccaagagtactgtccttatggccactgcaaagctggggtaccatcgaaagtgaagttgtcagacgtgactatcaagaacattaagggaacatcagcaacaaaggtagcagtgaagctaatgtgcagcaaaggcgttccttgcaccaatattgctctctctgacatcaacttggtccacaacggcaaagagggaccagctgtctcagcatgttctaacatcaagcctattctcagcggaaagttggttccagcggcttgcactgaagtcgctaaaccgggtccttaaattaaagttgcatgtccaccataaatccatccaatctggtgaagacgctttgattagggtgcgatgaaaaattttgcaatattttttttgagatataaattatataatagataaaacagagtccattcagggttggagtttatcacctgaagagtgacttgtgtgattgggtagtaatgttatatgattcgcaatatgcgagagttatgtaaattattttt

SEQ ID NO: 76755 - protein, 445 aa, Arabidopsis thaliana
  peptide (1)..(445): Ceres Seq. ID no. 11035476
  misc_feature (98)..(437): Pfam Name: Glycosyl hydrolases family 28 Pfam Description: Glycosyl hydrolases family 28
  misc_feature (1)..(445): Homolog of NCBI NO: 421833 NR Description: polygalacturonase (EC 3.2.1.15) [imported] - thaliana >gi|311962|emb|CAA51692.1| exopolygalacturonase
  misc_feature (1)..(445): Homolog of NCBI NO: 3004442 NR Description: polygalacturonase [Arabidopsis thaliana]
  misc_feature (1)..(445): Homolog of NCBI NO: 15231771 NR Description: exopolygalacturonase; protein id: At3g14040.1, by cDNA: gi_17064741 [Arabidopsis thaliana]
  misc_feature (1)..(445): Homolog of NCBI NO: 17064742 NR Description: polygalacturonase; pectinase [Arabidopsis >gi|21387101|gb|AAM47954.1| polygalacturonase; pectinase
  misc_feature (1)..(445): Homolog of NCBI NO: 421832 NR Description: polygalacturonase (EC 3.2.1.15) [imported] - thaliana >gi|313684|emb|CAA51033.1| exopolygalacturonase
  misc_feature (1)..(445): Homolog of NCBI NO: 15231880 NR Description: exopolygalacturonase; protein id: At3g07850.1, by cDNA: gi_15810268, supported by cDNA: gi_20259592 [Arabidopsis >gi|27735237|sp|P49063|PGL2_ARATH Exopolygalacturonase clone
  misc_feature (61)..(438): Homolog of NCBI NO: 3024386 NR Description: POLYGALACTURONASE PRECURSOR (PG) (PECTINASE)
  misc_feature (61)..(438): Homolog of NCBI NO: 3024385 NR Description: POLYGALACTURONASE PRECURSOR (PG) (PECTINASE)
  misc_feature (79)..(437): Homolog of NCBI NO: 6714530 NR Description: polygalacturonase [Salix gilgiana]
  misc_feature (79)..(437): Homolog of NCBI NO: 6714524 NR Description: polygalacturonase [Salix gilgiana]
MVGSHKASGVLLVLLVVMATTIANGTPVVDTAKNAATAVEDTAKNVATAVGGAAASVGAKVTGAKPGGASLDVKASGAKGDGKTDDSAAFAAAWKEACAAGSTITVPKGEYLVESLEFKGPCKGPVTLELNGNFKAPATVKTTKPHAGWIDFENLADFTLNGNKAIFDGQGSLAWKANDCAKTGKCNSLPINIRFTGLTNSKINSITSTNSKLFHMNILNCKNITLTDISIDAPPESLNTDGIHIGRSNGVNLIGAKIKTGDDCVSIGDGTENLIVENVECGPGHGISIGSLGRYPNEQPVKGVTVRKCLIKNTDNGVRIKTWPGSPPGIASNILFEDITMDNVSLPVLIDQEYCPYGHCKAGVPSKVKLSDVTIKNIKGTSATKVAVKLMCSKGVPCTNIALSDINLVHNGKEGPAVSACSNIKPILSGKLVPAACTEVAKPGP

SEQ ID NO: 76756 - protein, 428 aa, Arabidopsis thaliana
  peptide (1)..(428): Ceres Seq. ID no. 11035477
  misc_feature (81)..(420): Pfam Name: Glycosyl hydrolases family 28 Pfam Description: Glycosyl hydrolases family 28
  misc_feature (1)..(428): Homolog of NCBI NO: 421833 NR Description: polygalacturonase (EC 3.2.1.15) [imported] - thaliana >gi|311962|emb|CAA51692.1| exopolygalacturonase
  misc_feature (1)..(428): Homolog of NCBI NO: 3004442 NR Description: polygalacturonase [Arabidopsis thaliana]
  misc_feature (1)..(428): Homolog of NCBI NO: 15231771 NR Description: exopolygalacturonase; protein id: At3g14040.1, by cDNA: gi_17064741 [Arabidopsis thaliana]
  misc_feature (1)..(428): Homolog of NCBI NO: 17064742 NR Description: polygalacturonase; pectinase [Arabidopsis >gi|21387101|gb|AAM47954.1| polygalacturonase; pectinase
  misc_feature (1)..(428): Homolog of NCBI NO: 421832 NR Description: polygalacturonase (EC 3.2.1.15) [imported] - thaliana >gi|313684|emb|CAA51033.1| exopolygalacturonase
  misc_feature (1)..(428): Homolog of NCBI NO: 15231880 NR Description: exopolygalacturonase; protein id: At3g07850.1, by cDNA: gi_15810268, supported by cDNA: gi_20259592 [Arabidopsis >gi|27735237|sp|P49063|PGL2_ARATH Exopolygalacturonase clone
  misc_feature (44)..(421): Homolog of NCBI NO: 3024386 NR Description: POLYGALACTURONASE PRECURSOR (PG) (PECTINASE)
  misc_feature (44)..(421): Homolog of NCBI NO: 3024385 NR Description: POLYGALACTURONASE PRECURSOR (PG) (PECTINASE)
  misc_feature (62)..(420): Homolog of NCBI NO: 6714530 NR Description: polygalacturonase [Salix gilgiana]
  misc_feature (62)..(420): Homolog of NCBI NO: 6714524 NR Description: polygalacturonase [Salix gilgiana]
MATTIANGTPVVDTAKNAATAVEDTAKNVATAVGGAAASVGAKVTGAKPGGASLDVKASGAKGDGKTDDSAAFAAAWKEACAAGSTITVPKGEYLVESLEFKGPCKGPVTLELNGNFKAPATVKTTKPHAGWIDFENLADFTLNGNKAIFDGQGSLAWKANDCAKTGKCNSLPINIRFTGLTNSKINSITSTNSKLFHMNILNCKNITLTDISIDAPPESLNTDGIHIGRSNGVNLIGAKIKTGDDCVSIGDGTENLIVENVECGPGHGISIGSLGRYPNEQPVKGVTVRKCLIKNTDNGVRIKTWPGSPPGIASNILFEDITMDNVSLPVLIDQEYCPYGHCKAGVPSKVKLSDVTIKNIKGTSATKVAVKLMCSKGVPCTNIALSDINLVHNGKEGPAVSACSNIKPILSGKLVPAACTEVAKPGP

SEQ ID NO: 76757 - protein, 230 aa, Arabidopsis thaliana
  peptide (1)..(230): Ceres Seq. ID no. 11035478
  misc_feature (1)..(222): Pfam Name: Glycosyl hydrolases family 28 Pfam Description: Glycosyl hydrolases family 28
  misc_feature (1)..(230): Homolog of NCBI NO: 421833 NR Description: polygalacturonase (EC 3.2.1.15) [imported] - thaliana >gi|311962|emb|CAA51692.1| exopolygalacturonase
  misc_feature (1)..(230): Homolog of NCBI NO: 3004442 NR Description: polygalacturonase [Arabidopsis thaliana]
  misc_feature (1)..(230): Homolog of NCBI NO: 15231771 NR Description: exopolygalacturonase; protein id: At3g14040.1, by cDNA: gi_17064741 [Arabidopsis thaliana]
  misc_feature (1)..(230): Homolog of NCBI NO: 17064742 NR Description: polygalacturonase; pectinase [Arabidopsis >gi|21387101|gb|AAM47954.1| polygalacturonase; pectinase
  misc_feature (1)..(230): Homolog of NCBI NO: 421832 NR Description: polygalacturonase (EC 3.2.1.15) [imported] - thaliana >gi|313684|emb|CAA51033.1| exopolygalacturonase
  misc_feature (1)..(230): Homolog of NCBI NO: 15231880 NR Description: exopolygalacturonase; protein id: At3g07850.1, by cDNA: gi_15810268, supported by cDNA: gi_20259592 [Arabidopsis >gi|27735237|sp|P49063|PGL2_ARATH Exopolygalacturonase clone
  misc_feature (1)..(223): Homolog of NCBI NO: 3024386 NR Description: POLYGALACTURONASE PRECURSOR (PG) (PECTINASE)
  misc_feature (1)..(223): Homolog of NCBI NO: 3024385 NR Description: POLYGALACTURONASE PRECURSOR (PG) (PECTINASE)
  misc_feature (1)..(222): Homolog of NCBI NO: 6714530 NR Description: polygalacturonase [Salix gilgiana]
  misc_feature (1)..(222): Homolog of NCBI NO: 6714524 NR Description: polygalacturonase [Salix gilgiana]
MNILNCKNITLTDISIDAPPESLNTDGIHIGRSNGVNLIGAKIKTGDDCVSIGDGTENLIVENVECGPGHGISIGSLGRYPNEQPVKGVTVRKCLIKNTDNGVRIKTWPGSPPGIASNILFEDITMDNVSLPVLIDQEYCPYGHCKAGVPSKVKLSDVTIKNIKGTSATKVAVKLMCSKGVPCTNIALSDINLVHNGKEGPAVSACSNIKPILSGKLVPAACTEVAKPGP

SEQ ID NO: 76758 - DNA, 2022 bp, Arabidopsis thaliana
  misc_feature (1)..(2022): Ceres Seq. ID no. 11389309
  misc_feature: MA Experiment ID: 20000173 Result: Down-regulated in Transcription
  misc_feature: MA Experiment 20000173 PARAMETER Experiment Name: At_42deg_Heat_P Parameter: Age (day) Value: 14
  misc_feature: MA Experiment 20000173 PARAMETER Experiment Name: At_42deg_Heat_P Parameter: Organism Value: A. thaliana
  misc_feature: MA Experiment 20000173 PARAMETER Experiment Name: At_42deg_Heat_P Parameter: Plant Line Value: WS
  misc_feature: MA Experiment 20000173 PARAMETER Experiment Name: At_42deg_Heat_P Parameter: Temperature (deg C) Value: 42 vs. 22
  misc_feature: MA Experiment 20000173 PARAMETER Experiment Name: At_42deg_Heat_P Parameter: Timepoint (hr) Value: 6
  misc_feature: MA Experiment 20000173 PARAMETER Experiment Name: At_42deg_Heat_P Parameter: Tissue Value: Aerial
  misc_feature: MA Experiment ID: 20000184 Result: Down-regulated in Transcription
  misc_feature: MA Experiment 20000184 PARAMETER Experiment Name: At_Shoots__P Parameter: Age (day) Value: 7
  misc_feature: MA Experiment 20000184 PARAMETER Experiment Name: At_Shoots__P Parameter: Tissue Value: Shoots vs. Whole Plant
  misc_feature: MA Experiment ID: 20000185 Result: Down-regulated in Transcription
  misc_feature: MA Experiment 20000185 PARAMETER Experiment Name: At_Roots__P Parameter: Age (day) Value: 7 vs. 21
  misc_feature: MA Experiment 20000185 PARAMETER Experiment Name: At_Roots__P Parameter: Organism Value: A. thaliana
  misc_feature: MA Experiment 20000185 PARAMETER Experiment Name: At_Roots__P Parameter: Tissue Value: Roots vs. Whole Plant
  misc_feature: MA Experiment ID: 20000437 Result: Down-regulated in Transcription
  misc_feature: MA Experiment 20000437 PARAMETER Experiment Name: At_Drought_P Parameter: Age (day) Value: 8
  misc_feature: MA Experiment 20000437 PARAMETER Experiment Name: At_Drought_P Parameter: Organism Value: A. thaliana
  misc_feature: MA Experiment 20000437 PARAMETER Experiment Name: At_Drought_P Parameter: Plant Line Value: WS
  misc_feature: MA Experiment 20000437 PARAMETER Experiment Name: At_Drought_P Parameter: Timepoint (hr) Value: 24
  misc_feature: MA Experiment 20000437 PARAMETER Experiment Name: At_Drought_P Parameter: Tissue Value: Whole Plant
  misc_feature: MA Experiment 20000437 PARAMETER Experiment Name: At_Drought_P Parameter: Treatment Value: Drought vs. No Drought
  misc_feature: MA Experiment ID: 20000439 Result: Down-regulated in Transcription
  misc_feature: MA Experiment 20000439 PARAMETER Experiment Name: At_Roots__P Parameter: Age (day) Value: 14 vs. 21
  misc_feature: MA Experiment 20000439 PARAMETER Experiment Name: At_Roots__P Parameter: Organism Value: A. thaliana
  misc_feature: MA Experiment 20000439 PARAMETER Experiment Name: At_Roots__P Parameter: Tissue Value: Roots vs. Whole Plant
  misc_feature: MA Experiment ID: 20000794 Result: Down-regulated in Transcription
  misc_feature: MA Experiment 20000794 PARAMETER Experiment Name: At_Petals_P Parameter: Age (day) Value: 23-25 days
  misc_feature: MA Experiment 20000794 PARAMETER Experiment Name: At_Petals_P Parameter: Plant Line Value: WS
  misc_feature: MA Experiment 20000794 PARAMETER Experiment Name: At_Petals_P Parameter: Tissue Value: Petals vs. Whole plant
atggttgcagcattctcttacactgcctgcaccaagctttctctattacatccttctatggttgctcaaatccgaccaagaacaacacaaaaggcgttcgtggtgacaaatccggaacaagacagtactcttgaagtacaagaaacagagacactcaaagaagagcaatcaacagagaagatgaagaagcagccaacaccattgagaccagtggagaaacagctgaacgtgaagagcaagggtatgggcgattttggtggtcagtggctaagcagtgtcacacgtcacgttaggatctacgctgcttatattgatccagagacttgtgagtttgaccagtcacaaatggataaactcactttgattcttgatcctactgaagaatttgtgtgggatgatgaaagctgtaacaaggtctattcttatttccaagaactcgtcgatcactacgaggtaacgataacaataaacgaacgaaacattcatctaaaagttagactcatttcaagaagaccttataatattgtttttgaacagggagcaccattaacggagtacacattgagattgataggatcggacgtagaacattacataaggaagatgttgttcgatggagaaatacaatacaatatggatgcaagagttcttaatttcagtatgggaaagcctcgtgtacaattcaataccagtaacattgaaggtggtggagatgacgaactttgtgagggagaaaaaatggcgaatttactggaaacatcaatctttttctcctctgctgataaattactgtctttcccgcctaagaattctcaaacccatcatctccctttctctgctttcatcaatggaggaagaaagatacgcaaaagctcaactatcacctttgctaccgacactgtcacttacaatggcactacaagtgcggaagtaaaaagctctgttgaggatccaatggaagttgaggttgctgaaggttacactatggctcagttttgtgacaagattattgatctcttcttgaatgagaaacctaaagttaaacaatggaagacgtatttggttttaagagatgaatggaacaagtacagtgttaatttctataagcgttgcagaatccgagctgataccgaaactgatcctatattgaagcagaaactggtatctttggaaagtaaagtcaagaagatagataaggaaatggagaaacacaatgaccttttgaaggagattcaagaaaacccaacagacataaacgcaatcgctgccaagagacgcagagactttacgggagagtttttccgctatgttactttgttatcagaaactcttgatggcttggaagaccgagatgctgttgcgaggcttgcaactagatgtttatctgctgtgagtgcttatgacaacacgttggagagtgttgagactctagatactgctcaagcaaagtttgaagatattttaaactctccatccgtggattctgcttgcgaaaagatcagaagtttagccaaggcaaaggagcttgattcctcattgatcttattgatcaacagtgcatacgctgctgcaaaagagtctcaaactgttacgaacgaggctaaagacataatgtatcatttatacaaagctacaaagagcagtcttagaagcatcacaccgaaagagatcaaacttttaaagtacttactcaacataacagaccccgaagaacgattctctgccctagctacagcattctctcctggtgatgaccacgaagctaaggaccctaaagcattatacacgacgccaaaggagctgcataagtggataaagataatgcttgatgcttaccatctcaacaaagaagaaacagacattaaagaagctaaacagatgagccaacctatcgttattcagcggcttttcattctcaaggacactatcgaagacgagtatttagacaagaaaacaatcgtggctgatgaaactccaaagaaggaagaagaagatacgactattgaagattttttgaactga

SEQ ID NO: 76759 - protein, 673 aa, Arabidopsis thaliana
  peptide (1)..(673): Ceres Seq. ID no. 11389310
  misc_feature (239)..(673): Homolog of NCBI NO: 27754707 NR Description: unknown protein [Arabidopsis thaliana]
  misc_feature (307)..(666): Homolog of NCBI NO: 34905706 NR Description: P0552C05.25 [Oryza sativa (japonica
  misc_feature (308)..(648): Homolog of NCBI NO: 18400085 NR Description: expressed protein; protein id: At1g36320.1, by cDNA: 16186., supported by cDNA: gi_15982772 [Arabidopsis
  misc_feature (459)..(596): Homolog of NCBI NO: 38424035 NR Description: hypothetical protein [Oryza sativa (japonica
  misc_feature (297)..(431): Homolog of NCBI NO: 38424035 NR Description: hypothetical protein [Oryza sativa (japonica
  misc_feature (90)..(161): Homolog of NCBI NO: 37521091 NR Description: hypothetical protein glr1522 [Gloeobacter
  misc_feature (180)..(227): Homolog of NCBI NO: 37521091 NR Description: hypothetical protein glr1522 [Gloeobacter
  misc_feature (90)..(148): Homolog of NCBI NO: 17229224 NR Description: hypothetical protein [Nostoc sp. PCC 7120]
  misc_feature (180)..(226): Homolog of NCBI NO: 17229224 NR Description: hypothetical protein [Nostoc sp. PCC 7120]
  misc_feature (90)..(148): Homolog of NCBI NO: 23125502 NR Description: hypothetical protein [Nostoc punctiforme]
MVAAFSYTACTKLSLLHPSMVAQIRPRTTQKAFVVTNPEQDSTLEVQETETLKEEQSTEKMKKQPTPLRPVEKQLNVKSKGMGDFGGQWLSSVTRHVRIYAAYIDPETCEFDQSQMDKLTLILDPTEEFVWDDESCNKVYSYFQELVDHYEVTITINERNIHLKVRLISRRPYNIVFEQGAPLTEYTLRLIGSDVEHYIRKMLFDGEIQYNMDARVLNFSMGKPRVQFNTSNIEGGGDDELCEGEKMANLLETSIFFSSADKLLSFPPKNSQTHHLPFSAFINGGRKIRKSSTITFATDTVTYNGTTSAEVKSSVEDPMEVEVAEGYTMAQFCDKIIDLFLNEKPKVKQWKTYLVLRDEWNKYSVNFYKRCRIRADTETDPILKQKLVSLESKVKKIDKEMEKHNDLLKEIQENPTDINAIAAKRRRDFTGEFFRYVTLLSETLDGLEDRDAVARLATRCLSAVSAYDNTLESVETLDTAQAKFEDILNSPSVDSACEKIRSLAKAKELDSSLILLINSAYAAAKESQTVTNEAKDIMYHLYKATKSSLRSITPKEIKLLKYLLNITDPEERFSALATAFSPGDDHEAKDPKALYTTPKELHKWIKIMLDAYHLNKEETDIKEAKQMSQPIVIQRLFILKDTIEDEYLDKKTIVADETPKKEEEDTTIEDFLN

SEQ ID NO: 76760 - protein, 654 aa, Arabidopsis thaliana
  peptide (1)..(654): Ceres Seq. ID no. 11389311
  misc_feature (220)..(654): Homolog of NCBI NO: 27754707 NR Description: unknown protein [Arabidopsis thaliana]
  misc_feature (288)..(647): Homolog of NCBI NO: 34905706 NR Description: P0552C05.25 [Oryza sativa (japonica
  misc_feature (289)..(629): Homolog of NCBI NO: 18400085 NR Description: expressed protein; protein id: At1g36320.1, by cDNA: 16186., supported by cDNA: gi_15982772 [Arabidopsis
  misc_feature (440)..(577): Homolog of NCBI NO: 38424035 NR Description: hypothetical protein [Oryza sativa (japonica
  misc_feature (278)..(412): Homolog of NCBI NO: 38424035 NR Description: hypothetical protein [Oryza sativa (japonica
  misc_feature (71)..(142): Homolog of NCBI NO: 37521091 NR Description: hypothetical protein glr1522 [Gloeobacter
  misc_feature (161)..(208): Homolog of NCBI NO: 37521091 NR Description: hypothetical protein glr1522 [Gloeobacter
  misc_feature (71)..(129): Homolog of NCBI NO: 17229224 NR Description: hypothetical protein [Nostoc sp. PCC 7120]
  misc_feature (161)..(207): Homolog of NCBI NO: 17229224 NR Description: hypothetical protein [Nostoc sp. PCC 7120]
  misc_feature (71)..(129): Homolog of NCBI NO: 23125502 NR Description: hypothetical protein [Nostoc punctiforme]
MVAQIRPRTTQKAFVVTNPEQDSTLEVQETETLKEEQSTEKMKKQPTPLRPVEKQLNVKSKGMGDFGGQWLSSVTRHVRIYAAYIDPETCEFDQSQMDKLTLILDPTEEFVWDDESCNKVYSYFQELVDHYEVTITINERNIHLKVRLISRRPYNIVFEQGAPLTEYTLRLIGSDVEHYIRKMLFDGEIQYNMDARVLNFSMGKPRVQFNTSNIEGGGDDELCEGEKMANLLETSIFFSSADKLLSFPPKNSQTHHLPFSAFINGGRKIRKSSTITFATDTVTYNGTTSAEVKSSVEDPMEVEVAEGYTMAQFCDKIIDLFLNEKPKVKQWKTYLVLRDEWNKYSVNFYKRCRIRADTETDPILKQKLVSLESKVKKIDKEMEKHNDLLKEIQENPTDINAIAAKRRRDFTGEFFRYVTLLSETLDGLEDRDAVARLATRCLSAVSAYDNTLESVETLDTAQAKFEDILNSPSVDSACEKIRSLAKAKELDSSLILLINSAYAAAKESQTVTNEAKDIMYHLYKATKSSLRSITPKEIKLLKYLLNITDPEERFSALATAFSPGDDHEAKDPKALYTTPKELHKWIKIMLDAYHLNKEETDIKEAKQMSQPIVIQRLFILKDTIEDEYLDKKTIVADETPKKEEEDTTIEDFLN

SEQ ID NO: 76761 - protein, 613 aa, Arabidopsis thaliana
  peptide (1)..(613): Ceres Seq. ID no. 11389312
  misc_feature (179)..(613): Homolog of NCBI NO: 27754707 NR Description: unknown protein [Arabidopsis thaliana]
  misc_feature (247)..(606): Homolog of NCBI NO: 34905706 NR Description: P0552C05.25 [Oryza sativa (japonica
  misc_feature (248)..(588): Homolog of NCBI NO: 18400085 NR Description: expressed protein; protein id: At1g36320.1, by cDNA: 16186., supported by cDNA: gi_15982772 [Arabidopsis
  misc_feature (399)..(536): Homolog of NCBI NO: 38424035 NR Description: hypothetical protein [Oryza sativa (japonica
  misc_feature (237)..(371): Homolog of NCBI NO: 38424035 NR Description: hypothetical protein [Oryza sativa (japonica
  misc_feature (30)..(101): Homolog of NCBI NO: 37521091 NR Description: hypothetical protein glr1522 [Gloeobacter
  misc_feature (120)..(167): Homolog of NCBI NO: 37521091 NR Description: hypothetical protein glr1522 [Gloeobacter
  misc_feature (30)..(88): Homolog of NCBI NO: 17229224 NR Description: hypothetical protein [Nostoc sp. PCC 7120]
  misc_feature (120)..(166): Homolog of NCBI NO: 17229224 NR Description: hypothetical protein [Nostoc sp. PCC 7120]
  misc_feature (30)..(88): Homolog of NCBI NO: 23125502 NR Description: hypothetical protein [Nostoc punctiforme]
MKKQPTPLRPVEKQLNVKSKGMGDFGGQWLSSVTRHVRIYAAYIDPETCEFDQSQMDKLTLILDPTEEFVWDDESCNKVYSYFQELVDHYEVTITINERNIHLKVRLISRRPYNIVFEQGAPLTEYTLRLIGSDVEHYIRKMLFDGEIQYNMDARVLNFSMGKPRVQFNTSNIEGGGDDELCEGEKMANLLETSIFFSSADKLLSFPPKNSQTHHLPFSAFINGGRKIRKSSTITFATDTVTYNGTTSAEVKSSVEDPMEVEVAEGYTMAQFCDKIIDLFLNEKPKVKQWKTYLVLRDEWNKYSVNFYKRCRIRADTETDPILKQKLVSLESKVKKIDKEMEKHNDLLKEIQENPTDINAIAAKRRRDFTGEFFRYVTLLSETLDGLEDRDAVARLATRCLSAVSAYDNTLESVETLDTAQAKFEDILNSPSVDSACEKIRSLAKAKELDSSLILLINSAYAAAKESQTVTNEAKDIMYHLYKATKSSLRSITPKEIKLLKYLLNITDPEERFSALATAFSPGDDHEAKDPKALYTTPKELHKWIKIMLDAYHLNKEETDIKEAKQMSQPIVIQRLFILKDTIEDEYLDKKTIVADETPKKEEEDTTIEDFLN

SEQ ID NO: 76762 - DNA, 1951 bp, Arabidopsis thaliana
  misc_feature (1)..(1951): Ceres Seq. ID no. 11393359
  misc_feature: MA Experiment ID: 20000307 Result: Down-regulated in Transcription
  misc_feature: MA Experiment 20000307 PARAMETER Experiment Name: At_Germinating_Seeds_Sub_P Parameter: Age (hr) Value: 24 vs. 0
  misc_feature: MA Experiment 20000307 PARAMETER Experiment Name: At_Germinating_Seeds_Sub_P Parameter: Organism Value: A. thaliana
  misc_feature: MA Experiment 20000307 PARAMETER Experiment Name: At_Germinating_Seeds_Sub_P Parameter: Plant Line Value: WS
  misc_feature: MA Experiment 20000307 PARAMETER Experiment Name: At_Germinating_Seeds_Sub_P Parameter: Tissue Value: Germinating Seeds
  misc_feature: MA Experiment ID: 20000327 Result: Down-regulated in Transcription
  misc_feature: MA Experiment 20000327 PARAMETER Experiment Name: At_42deg_Heat_Sub_P Parameter: Age (day) Value: 14
  misc_feature: MA Experiment 20000327 PARAMETER Experiment Name: At_42deg_Heat_Sub_P Parameter: Organism Value: A. thaliana
  misc_feature: MA Experiment 20000327 PARAMETER Experiment Name: At_42deg_Heat_Sub_P Parameter: Plant Line Value: WS
  misc_feature: MA Experiment 20000327 PARAMETER Experiment Name: At_42deg_Heat_Sub_P Parameter: Temperature (deg C) Value: 42 vs. 22
  misc_feature: MA Experiment 20000327 PARAMETER Experiment Name: At_42deg_Heat_Sub_P Parameter: Timepoint (hr) Value: 1
  misc_feature: MA Experiment 20000327 PARAMETER Experiment Name: At_42deg_Heat_Sub_P Parameter: Tissue Value: Aerial
  misc_feature: MA Experiment ID: 20000328 Result: Down-regulated in Transcription
  misc_feature: MA Experiment 20000328 PARAMETER Experiment Name: At_42deg_Heat_Sub_P Parameter: Age (day) Value: 14
  misc_feature: MA Experiment 20000328 PARAMETER Experiment Name: At_42deg_Heat_Sub_P Parameter: Organism Value: A. thaliana
  misc_feature: MA Experiment 20000328 PARAMETER Experiment Name: At_42deg_Heat_Sub_P Parameter: Plant Line Value: WS
  misc_feature: MA Experiment 20000328 PARAMETER Experiment Name: At_42deg_Heat_Sub_P Parameter: Temperature (deg C) Value: 42 vs. 22
  misc_feature: MA Experiment 20000328 PARAMETER Experiment Name: At_42deg_Heat_Sub_P Parameter: Timepoint (hr) Value: 6
  misc_feature: MA Experiment 20000328 PARAMETER Experiment Name: At_42deg_Heat_Sub_P Parameter: Tissue Value: Aerial
  misc_feature: MA Experiment ID: 20000329 Result: Down-regulated in Transcription
  misc_feature: MA Experiment 20000329 PARAMETER Experiment Name: At_4deg_Cold_Sub_P Parameter: Age (day) Value: 14
  misc_feature: MA Experiment 20000329 PARAMETER Experiment Name: At_4deg_Cold_Sub_P Parameter: Organism Value: A. thaliana
  misc_feature: MA Experiment 20000329 PARAMETER Experiment Name: At_4deg_Cold_Sub_P Parameter: Plant Line Value: WS
  misc_feature: MA Experiment 20000329 PARAMETER Experiment Name: At_4deg_Cold_Sub_P Parameter: Temperature (deg C) Value: 4 vs. 22
  misc_feature: MA Experiment 20000329 PARAMETER Experiment Name: At_4deg_Cold_Sub_P Parameter: Timepoint (hr) Value: 6
  misc_feature: MA Experiment 20000329 PARAMETER Experiment Name: At_4deg_Cold_Sub_P Parameter: Tissue Value: Aerial
  misc_feature: MA Experiment ID: 20000332 Result: Down-regulated in Transcription
  misc_feature: MA Experiment 20000332 PARAMETER Experiment Name: At_4deg_Cold_Sub_P Parameter: Age (day) Value: 14
  misc_feature: MA Experiment 20000332 PARAMETER Experiment Name: At_4deg_Cold_Sub_P Parameter: Organism Value: A. thaliana
  misc_feature: MA Experiment 20000332 PARAMETER Experiment Name: At_4deg_Cold_Sub_P Parameter: Plant Line Value: WS
  misc_feature: MA Experiment 20000332 PARAMETER Experiment Name: At_4deg_Cold_Sub_P Parameter: Temperature (deg C) Value: 4 vs. 22
  misc_feature: MA Experiment 20000332 PARAMETER Experiment Name: At_4deg_Cold_Sub_P Parameter: Timepoint (hr) Value: 2
  misc_feature: MA Experiment 20000332 PARAMETER Experiment Name: At_4deg_Cold_Sub_P Parameter: Tissue Value: Aerial
agtaatttagttttttttttttttttttacaatttattttgttattagaagtggtagtggagtgaaaaaacaaatcctaagcagtcctaaccgatccccgaagctaaagattcttcaccttcccaaataaagcaaaacctagatccgacattgaaggaaaaaccttttagatccatctctgaaaaaaacccaaccatgaagagagatcatcatcatcatcatcaagataagaagactatgatgatgaatgaagaagacgacggtaacggcatggatgagcttctagctgttcttggttacaaggttaggtcatcggaaatggctgatgttgctcagaaactcgagcagcttgaagttatgatgtctaatgttcaagaagacgatctttctcaactcgctactgagactgttcactataatccggcggagctttacacgtggcttgattctatgctcaccgaccttaatcctccgtcgtctaacgccgagtacgatcttaaagctattcccggtgacgcgattctcaatcagttcgctatcgattcggcttcttcgtctaaccaaggcggcggaggagatacgtatactacaaacaagcggttgaaatgctcaaacggcgtcgtggaaaccaccacagcgacggctgagtcaactcggcatgttgtcctggttgactcgcaggagaacggtgtgcgtctcgttcacgcgcttttggcttgcgctgaagctgttcagaaggagaatctgactgtggcggaagctctggtgaagcaaatcggattcttagctgtttctcaaatcggagctatgagacaagtcgctacttacttcgccgaagctctcgcgcggcggatttaccgtctctctccgtcgcagagtccaatcgaccactctctctccgatactcttcagatgcacttctacgagacttgtccttatctcaagttcgctcacttcacggcgaatcaagcgattctcgaagcttttcaagggaagaaaagagttcatgtcattgatttctctatgagtcaaggtcttcaatggccggcgcttatgcaggctcttgcgcttcgacctggtggtcctcctgttttccggttaaccggaattggtccaccggcaccggataatttcgattatcttcatgaagttgggtgtaagctggctcatttagctgaggcgattcacgttgagtttgagtacagaggatttgtggctaacactttagctgatcttgatgcttcgatgcttgagcttagaccaagtgagattgaatctgttgcggttaactctgttttcgagcttcacaagctcttgggacgacctggtgcgatcgataaggttcttggtgtggtgaatcagattaaaccggagattttcactgtggttgagcaggaatcgaaccataatagtccgattttcttagatcggtttactgagtcgttgcattattactcgacgttgtttgactcgttggaaggtgtaccgagtggtcaagacaaggtcatgtcggaggtttacttgggtaaacagatctgcaacgttgtggcttgtgatggacctgaccgagttgagcgtcatgaaacgttgagtcagtggaggaaccggttcgggtctgctgggtttgcggctgcacatattggttcgaatgcgtttaagcaagcgagtatgcttttggctctgttcaacggcggtgagggttatcgggtggaggagagtgacggctgtctcatgttgggttggcacacacgaccgctcatagccacctcggcttggaaactctccaccaattagatggtggctcaatgaattgatctgttgaaccggttatgatgatagatttccgaccgaagccaaactaaatcctactgtttttccctttgtcacttgttaagatcttatctttcattatattaggtaattgaaaaattttaatctcgcctaaattact

SEQ ID NO: 76763 - protein, 532 aa, Arabidopsis thaliana
  peptide (1)..(532): Ceres Seq. ID no. 11393360
  misc_feature (142)..(439): Pfam Name: GRAS family transcription factor Pfam Description: GRAS family transcription factor
  misc_feature (1)..(532): Homolog of NCBI NO: 2339980 NR Description: RGA2 protein [Arabidopsis thaliana]
  misc_feature (1)..(532): Homolog of NCBI NO: 2569938 NR Description: GAI [Arabidopsis thaliana]
  misc_feature (1)..(532): Homolog of NCBI NO: 15223951 NR Description: signal response protein (GAI); protein id: supported by cDNA: gi_16648833 [Arabidopsis thaliana]
  misc_feature (97)..(531): Homolog of NCBI NO: 15226311 NR Description: putative RGA1, giberellin repsonse modulation protein id: At2g01570.1, supported by cDNA: gi_15529229, by cDNA: gi_15809785 [Arabidopsis thaliana]
  misc_feature (10)..(93): Homolog of NCBI NO: 15226311 NR Description: putative RGA1, giberellin repsonse modulation protein id: At2g01570.1, supported by cDNA: gi_15529229, by cDNA: gi_15809785 [Arabidopsis thaliana]
  misc_feature (94)..(530): Homolog of NCBI NO: 20334379 NR Description: GAI-like protein 1 [Vitis vinifera]
  misc_feature (1)..(105): Homolog of NCBI NO: 20334379 NR Description: GAI-like protein 1 [Vitis vinifera]
  misc_feature (97)..(531): Homolog of NCBI NO: 2339978 NR Description: RGA1 protein [Arabidopsis thaliana]
  misc_feature (97)..(531): Homolog of NCBI NO: 2569940 NR Description: GRS protein [Arabidopsis thaliana]
  misc_feature (97)..(531): Homolog of NCBI NO: 15529230 NR Description: At2g01570/F2I9.19 [Arabidopsis thaliana]
MKRDHHHHHQDKKTMMMNEEDDGNGMDELLAVLGYKVRSSEMADVAQKLEQLEVMMSNVQEDDLSQLATETVHYNPAELYTWLDSMLTDLNPPSSNAEYDLKAIPGDAILNQFAIDSASSSNQGGGGDTYTTNKRLKCSNGVVETTTATAESTRHVVLVDSQENGVRLVHALLACAEAVQKENLTVAEALVKQIGFLAVSQIGAMRQVATYFAEALARRIYRLSPSQSPIDHSLSDTLQMHFYETCPYLKFAHFTANQAILEAFQGKKRVHVIDFSMSQGLQWPALMQALALRPGGPPVFRLTGIGPPAPDNFDYLHEVGCKLAHLAEAIHVEFEYRGFVANTLADLDASMLELRPSEIESVAVNSVFELHKLLGRPGAIDKVLGVVNQIKPEIFTVVEQESNHNSPIFLDRFTESLHYYSTLFDSLEGVPSGQDKVMSEVYLGKQICNVVACDGPDRVERHETLSQWRNRFGSAGFAAAHIGSNAFKQASMLLALFNGGEGYRVEESDGCLMLGWHTRPLIATSAWKLSTN

SEQ ID NO: 76764 - protein, 518 aa, Arabidopsis thaliana
  peptide (1)..(518): Ceres Seq. ID no. 11393361
  misc_feature (128)..(425): Pfam Name: GRAS family transcription factor Pfam Description: GRAS family transcription factor
  misc_feature (1)..(518): Homolog of NCBI NO: 2339980 NR Description: RGA2 protein [Arabidopsis thaliana]
  misc_feature (1)..(518): Homolog of NCBI NO: 2569938 NR Description: GAI [Arabidopsis thaliana]
  misc_feature (1)..(518): Homolog of NCBI NO: 15223951 NR Description: signal response protein (GAI); protein id: supported by cDNA: gi_16648833 [Arabidopsis thaliana]
  misc_feature (83)..(517): Homolog of NCBI NO: 15226311 NR Description: putative RGA1, giberellin repsonse modulation protein id: At2g01570.1, supported by cDNA: gi_15529229, by cDNA: gi_15809785 [Arabidopsis thaliana]
  misc_feature (1)..(79): Homolog of NCBI NO: 15226311 NR Description: putative RGA1, giberellin repsonse modulation protein id: At2g01570.1, supported by cDNA: gi_15529229, by cDNA: gi_15809785 [Arabidopsis thaliana]
  misc_feature (80)..(516): Homolog of NCBI NO: 20334379 NR Description: GAI-like protein 1 [Vitis vinifera]
  misc_feature (1)..(91): Homolog of NCBI NO: 20334379 NR Description: GAI-like protein 1 [Vitis vinifera]
  misc_feature (83)..(517): Homolog of NCBI NO: 2339978 NR Description: RGA1 protein [Arabidopsis thaliana]
  misc_feature (83)..(517): Homolog of NCBI NO: 2569940 NR Description: GRS protein [Arabidopsis thaliana]
  misc_feature (83)..(517): Homolog of NCBI NO: 15529230 NR Description: At2g01570/F2I9.19 [Arabidopsis thaliana]
MMMNEEDDGNGMDELLAVLGYKVRSSEMADVAQKLEQLEVMMSNVQEDDLSQLATETVHYNPAELYTWLDSMLTDLNPPSSNAEYDLKAIPGDAILNQFAIDSASSSNQGGGGDTYTTNKRLKCSNGVVETTTATAESTRHVVLVDSQENGVRLVHALLACAEAVQKENLTVAEALVKQIGFLAVSQIGAMRQVATYFAEALARRIYRLSPSQSPIDHSLSDTLQMHFYETCPYLKFAHFTANQAILEAFQGKKRVHVIDFSMSQGLQWPALMQALALRPGGPPVFRLTGIGPPAPDNFDYLHEVGCKLAHLAEAIHVEFEYRGFVANTLADLDASMLELRPSEIESVAVNSVFELHKLLGRPGAIDKVLGVVNQIKPEIFTVVEQESNHNSPIFLDRFTESLHYYSTLFDSLEGVPSGQDKVMSEVYLGKQICNVVACDGPDRVERHETLSQWRNRFGSAGFAAAHIGSNAFKQASMLLALFNGGEGYRVEESDGCLMLGWHTRPLIATSAWKLSTN

SEQ ID NO: 76765 - protein, 517 aa, Arabidopsis thaliana
  peptide (1)..(517): Ceres Seq. ID no. 11393362
  misc_feature (127)..(424): Pfam Name: GRAS family transcription factor Pfam Description: GRAS family transcription factor
  misc_feature (1)..(517): Homolog of NCBI NO: 2339980 NR Description: RGA2 protein [Arabidopsis thaliana]
  misc_feature (1)..(517): Homolog of NCBI NO: 2569938 NR Description: GAI [Arabidopsis thaliana]
  misc_feature (1)..(517): Homolog of NCBI NO: 15223951 NR Description: signal response protein (GAI); protein id: supported by cDNA: gi_16648833 [Arabidopsis thaliana]
  misc_feature (82)..(516): Homolog of NCBI NO: 15226311 NR Description: putative RGA1, giberellin repsonse modulation protein id: At2g01570.1, supported by cDNA: gi_15529229, by cDNA: gi_15809785 [Arabidopsis thaliana]
  misc_feature (1)..(78): Homolog of NCBI NO: 15226311 NR Description: putative RGA1, giberellin repsonse modulation protein id: At2g01570.1, supported by cDNA: gi_15529229, by cDNA: gi_15809785 [Arabidopsis thaliana]
  misc_feature (79)..(515): Homolog of NCBI NO: 20334379 NR Description: GAI-like protein 1 [Vitis vinifera]
  misc_feature (1)..(90): Homolog of NCBI NO: 20334379 NR Description: GAI-like protein 1 [Vitis vinifera]
  misc_feature (82)..(516): Homolog of NCBI NO: 2339978 NR Description: RGA1 protein [Arabidopsis thaliana]
  misc_feature (82)..(516): Homolog of NCBI NO: 2569940 NR Description: GRS protein [Arabidopsis thaliana]
  misc_feature (82)..(516): Homolog of NCBI NO: 15529230 NR Description: At2g01570/F2I9.19 [Arabidopsis thaliana]
MMNEEDDGNGMDELLAVLGYKVRSSEMADVAQKLEQLEVMMSNVQEDDLSQLATETVHYNPAELYTWLDSMLTDLNPPSSNAEYDLKAIPGDAILNQFAIDSASSSNQGGGGDTYTTNKRLKCSNGVVETTTATAESTRHVVLVDSQENGVRLVHALLACAEAVQKENLTVAEALVKQIGFLAVSQIGAMRQVATYFAEALARRIYRLSPSQSPIDHSLSDTLQMHFYETCPYLKFAHFTANQAILEAFQGKKRVHVIDFSMSQGLQWPALMQALALRPGGPPVFRLTGIGPPAPDNFDYLHEVGCKLAHLAEAIHVEFEYRGFVANTLADLDASMLELRPSEIESVAVNSVFELHKLLGRPGAIDKVLGVVNQIKPEIFTVVEQESNHNSPIFLDRFTESLHYYSTLFDSLEGVPSGQDKVMSEVYLGKQICNVVACDGPDRVERHETLSQWRNRFGSAGFAAAHIGSNAFKQASMLLALFNGGEGYRVEESDGCLMLGWHTRPLIATSAWKLSTN

SEQ ID NO: 76766 - DNA, 2559 bp, Arabidopsis thaliana
  misc_feature (1)..(2559): Ceres Seq. ID no. 11401795
  misc_feature: MA Experiment ID: 20000439 Result: Down-regulated in Transcription
  misc_feature: MA Experiment 20000439 PARAMETER Experiment Name: At_Roots__P Parameter: Age (day) Value: 14 vs. 21
  misc_feature: MA Experiment 20000439 PARAMETER Experiment Name: At_Roots__P Parameter: Organism Value: A. thaliana
  misc_feature: MA Experiment 20000439 PARAMETER Experiment Name: At_Roots__P Parameter: Tissue Value: Roots vs. Whole Plant
  misc_feature: MA Experiment ID: 20000709 Result: Up-regulated in Transcription
  misc_feature: MA Experiment 20000709 PARAMETER Experiment Name: At_15mM_NH4NO3_L-to-H_P Parameter: Age (hr) Value: 14
  misc_feature: MA Experiment 20000709 PARAMETER Experiment Name: At_15mM_NH4NO3_L-to-H_P Parameter: Organism Value: A. thaliana
  misc_feature: MA Experiment 20000709 PARAMETER Experiment Name: At_15mM_NH4NO3_L-to-H_P Parameter: Plant Line Value: WS
  misc_feature: MA Experiment 20000709 PARAMETER Experiment Name: At_15mM_NH4NO3_L-to-H_P Parameter: Timepoint (hr) Value: 4
  misc_feature: MA Experiment 20000709 PARAMETER Experiment Name: At_15mM_NH4NO3_L-to-H_P Parameter: Tissue Value: Aerial
  misc_feature: MA Experiment 20000709 PARAMETER Experiment Name: At_15mM_NH4NO3_L-to-H_P Parameter: Treatment Value: 15mM NH4NO3 vs. 30mM Mannitol
  misc_feature: MA Experiment ID: 20001557 Result: Up-regulated in Transcription
  misc_feature: MA Experiment 20001557 PARAMETER Experiment Name: At_Drought_Soil_Dry_P Parameter: Age (day) Value: 27
  misc_feature: MA Experiment 20001557 PARAMETER Experiment Name: At_Drought_Soil_Dry_P Parameter: Organism Value: A. thaliana
  misc_feature: MA Experiment 20001557 PARAMETER Experiment Name: At_Drought_Soil_Dry_P Parameter: Plant Line Value: WS
  misc_feature: MA Experiment 20001557 PARAMETER Experiment Name: At_Drought_Soil_Dry_P Parameter: Post Timepoint (hr) Value: 3
  misc_feature: MA Experiment 20001557 PARAMETER Experiment Name: At_Drought_Soil_Dry_P Parameter: Post-Treatment Value: Re-Water vs. No Drought
  misc_feature: MA Experiment 20001557 PARAMETER Experiment Name: At_Drought_Soil_Dry_P Parameter: Timepoint (day) Value: 13
  misc_feature: MA Experiment 20001557 PARAMETER Experiment Name: At_Drought_Soil_Dry_P Parameter: Treatment Value: Drought vs. No Drought
attggtgcttttggttttggcaaagcgtgagtgagatcgggaatcaaacatcgcctccgtctctcatttcaaacgctatctccatctccttcctccgccgccgccatggaatctccgaagaattctctgatcccgagcttcctctattcatcatcttcatctccgagatctttcctcctcgaccaggtgctcaattccaactccaacgctgcattcgagaaatctccttctccggccccgcgttcctctcctacgtcgatgatttctcggaagaatttccttattgcatctcccaccgagccagggaaggggatcgagatgtattcacctgccttctacgctgcttgtacctttggtggaattctcagctgtggtcttactcacatgaccgtgactcctctcgatctcgtcaagtgcaatatgcagattgatccagcgaagtacaagagcatctcgtctggttttggaattttgctgaaagagcaaggagtcaaaggctttttccgtggatgggttcctactcttttgggttacagtgctcagggtgcctgcaagtttggattctacgagtactttaagaagacttactctgaccttgctggacctgagtacactgccaaatacaagactctcatctaccttgctggttctgcttctgctgagatcattgccgatattgcactttgcccatttgaagctgtgaaggttcgtgttcagacacagcctggatttgctagggggatgtctgatggatttcccaagtttatcaagtccgaaggatacggaggcttgtataagggtcttgctccactctggggacgtcagattccttacactatgatgaagtttgcttcctttgagaccattgttgagatgatttacaagtacgcaatccccaacccaaagagtgagtgcagcaaaggtctgcaactcggagtgagttttgccggaggttacgttgccggagtgttctgtgccatcgtttctcatccagcagacaatctagtgtcattcctcaacaacgctaagggagcaaccgttggagatgcggtgaagaagattggtatggtgggactgttcacaagagggcttcctcttagaattgtgatgatcgggacgttgactggagcacagtggggattatacgatgccttcaaagtgtttgttggcctgccaaccactggtggtgttgctccagctcctgccatcgcagctactgaagccaaagcctaaacaatgacgaaaaaggttattaggagttcgatggggtaggatttttgtttggaaaaataagagaaaccatacggtgatgaggaagagtgagtaagctcaatttcttcctgatttgaactttatcatttttgttttttttgaaatttgtgttcctgaattcaggatagtgctctctctctctttacatactctcttcctattgtttcttgtcctttttttctttgtgtgatgtaatcttaaaagatgagagggacacactccaagatagagagagtgggcatacacccactcactactttttattcagtttcagttgaaattcaaaaaaaaaaaaaaaagagctcttggatcccaacaatgtggggacctttcactgcttactgctataggtccatattagacggaatagagcacatagcaatggttaagggtgagattggtgacggtcaagacattctcgtgagggttcattctgaatgtctaacaggggacatatttgggtctgcaaggtgtgattgcgggaaccagctagcactctcgatgcagcagatcgaggctactggtcgcggtgtgctggtttacctacgtggacatgaaggaagagggatcggtttaggacacaagcttcgagcttacaatctgcaagatgctggtcgagacacggttgaagctaatgaggaattaggacttcctgttgattctagagagtatggaattggtgcacagataataagggatttaggtgttaggacaatgaagctgatgacaaataatcccgcaaagtatgttggtttgaagggatatggattagccattgttgggagagtccctctattgagtcttatcacgaaggagaataagagatatctggagacaaagcggaccaagatgggtcacatgtatggcttgaagttcaaaggggatgttgtggagaagattgagtctgaatctgagtcctaagcttaaaaaccaggacgaaccgaatggaatcaagaactatagatataatacttcacaaaaaacaaggaaagaaattgacacagaagaagaggaaaaagacatttgatctgtctgagaaacttgattagattggtttatgttctaatctaatctgatttgatttttttttattttgtctacgattcttgagttacgaaatgttcatcatttgttacttcttgttgtcgggattgagtagttgcatttttttagttgtggagctgtgacaaagaggccagctagtgtgtggaatgtggatcatcatcctttggttgattccttgtagaatcctttttgtaaacatttaaactataataaagtgttatg

SEQ ID NO: 76767 - protein, 375 aa, Arabidopsis thaliana
  peptide (1)..(375): Ceres Seq. ID no. 11401796
  misc_feature (1)..(375): Homolog of NCBI NO: 15241291 NR Description: mitochondrial phosphate translocator; protein id: supported by cDNA: gi_16604459 [Arabidopsis thaliana] mitochondrial phosphate translocator [Arabidopsis thaliana]
MESPKNSLIPSFLYSSSSSPRSFLLDQVLNSNSNAAFEKSPSPAPRSSPTSMISRKNFLIASPTEPGKGIEMYSPAFYAACTFGGILSCGLTHMTVTPLDLVKCNMQIDPAKYKSISSGFGILLKEQGVKGFFRGWVPTLLGYSAQGACKFGFYEYFKKTYSDLAGPEYTAKYKTLIYLAGSASAEIIADIALCPFEAVKVRVQTQPGFARGMSDGFPKFIKSEGYGGLYKGLAPLWGRQIPYTMMKFASFETIVEMIYKYAIPNPKSECSKGLQLGVSFAGGYVAGVFCAIVSHPADNLVSFLNNAKGATVGDAVKKIGMVGLFTRGLPLRIVMIGTLTGAQWGLYDAFKVFVGLPTTGGVAPAPAIAATEAKA

SEQ ID NO: 76768 - protein, 324 aa, Arabidopsis thaliana
  peptide (1)..(324): Ceres Seq. ID no. 11401797
  misc_feature (1)..(324): Homolog of NCBI NO: 15241291 NR Description: mitochondrial phosphate translocator; protein id: supported by cDNA: gi_16604459 [Arabidopsis thaliana] mitochondrial phosphate translocator [Arabidopsis thaliana]
MISRKNFLIASPTEPGKGIEMYSPAFYAACTFGGILSCGLTHMTVTPLDLVKCNMQIDPAKYKSISSGFGILLKEQGVKGFFRGWVPTLLGYSAQGACKFGFYEYFKKTYSDLAGPEYTAKYKTLIYLAGSASAEIIADIALCPFEAVKVRVQTQPGFARGMSDGFPKFIKSEGYGGLYKGLAPLWGRQIPYTMMKFASFETIVEMIYKYAIPNPKSECSKGLQLGVSFAGGYVAGVFCAIVSHPADNLVSFLNNAKGATVGDAVKKIGMVGLFTRGLPLRIVMIGTLTGAQWGLYDAFKVFVGLPTTGGVAPAPAIAATEAKA

SEQ ID NO: 76769 - protein, 304 aa, Arabidopsis thaliana
  peptide (1)..(304): Ceres Seq. ID no. 11401798
  misc_feature (1)..(304): Homolog of NCBI NO: 15241291 NR Description: mitochondrial phosphate translocator; protein id: supported by cDNA: gi_16604459 [Arabidopsis thaliana] mitochondrial phosphate translocator [Arabidopsis thaliana]
MYSPAFYAACTFGGILSCGLTHMTVTPLDLVKCNMQIDPAKYKSISSGFGILLKEQGVKGFFRGWVPTLLGYSAQGACKFGFYEYFKKTYSDLAGPEYTAKYKTLIYLAGSASAEIIADIALCPFEAVKVRVQTQPGFARGMSDGFPKFIKSEGYGGLYKGLAPLWGRQIPYTMMKFASFETIVEMIYKYAIPNPKSECSKGLQLGVSFAGGYVAGVFCAIVSHPADNLVSFLNNAKGATVGDAVKKIGMVGLFTRGLPLRIVMIGTLTGAQWGLYDAFKVFVGLPTTGGVAPAPAIAATEAKA

SEQ ID NO: 76770 - DNA, 1890 bp, Arabidopsis thaliana
  misc_feature (1)..(1890): Ceres Seq. ID no. 11401901
  misc_feature: MA Experiment ID: 20000171 Result: Down-regulated in Transcription
  misc_feature: MA Experiment 20000171 PARAMETER Experiment Name: At_42deg_Heat_P Parameter: Age (day) Value: 14
  misc_feature: MA Experiment 20000171 PARAMETER Experiment Name: At_42deg_Heat_P Parameter: Organism Value: A. thaliana
  misc_feature: MA Experiment 20000171 PARAMETER Experiment Name: At_42deg_Heat_P Parameter: Plant Line Value: WS
  misc_feature: MA Experiment 20000171 PARAMETER Experiment Name: At_42deg_Heat_P Parameter: Temperature (deg C) Value: 42 vs. 22
  misc_feature: MA Experiment 20000171 PARAMETER Experiment Name: At_42deg_Heat_P Parameter: Timepoint (hr) Value: 1
  misc_feature: MA Experiment 20000171 PARAMETER Experiment Name: At_42deg_Heat_P Parameter: Tissue Value: Aerial
  misc_feature: MA Experiment ID: 20000173 Result: Down-regulated in Transcription
  misc_feature: MA Experiment 20000173 PARAMETER Experiment Name: At_42deg_Heat_P Parameter: Age (day) Value: 14
  misc_feature: MA Experiment 20000173 PARAMETER Experiment Name: At_42deg_Heat_P Parameter: Organism Value: A. thaliana
  misc_feature: MA Experiment 20000173 PARAMETER Experiment Name: At_42deg_Heat_P Parameter: Plant Line Value: WS
  misc_feature: MA Experiment 20000173 PARAMETER Experiment Name: At_42deg_Heat_P Parameter: Temperature (deg C) Value: 42 vs. 22
  misc_feature: MA Experiment 20000173 PARAMETER Experiment Name: At_42deg_Heat_P Parameter: Timepoint (hr) Value: 6
  misc_feature: MA Experiment 20000173 PARAMETER Experiment Name: At_42deg_Heat_P Parameter: Tissue Value: Aerial
  misc_feature: MA Experiment ID: 20000179 Result: Up-regulated in Transcription
  misc_feature: MA Experiment 20000179 PARAMETER Experiment Name: At_Germinating_Seeds_P Parameter: Age (hr) Value: 6 vs. 0
  misc_feature: MA Experiment 20000179 PARAMETER Experiment Name: At_Germinating_Seeds_P Parameter: Tissue Value: Germinating Seeds
  misc_feature: MA Experiment ID: 20000180 Result: Up-regulated in Transcription
  misc_feature: MA Experiment 20000180 PARAMETER Experiment Name: At_Germinating_Seeds_P Parameter: Age (hr) Value: 24 vs. 0
  misc_feature: MA Experiment 20000180 PARAMETER Experiment Name: At_Germinating_Seeds_P Parameter: Tissue Value: Germinating Seeds
  misc_feature: MA Experiment ID: 20000185 Result: Up-regulated in Transcription
  misc_feature: MA Experiment 20000185 PARAMETER Experiment Name: At_Roots__P Parameter: Age (day) Value: 7 vs. 21
  misc_feature: MA Experiment 20000185 PARAMETER Experiment Name: At_Roots__P Parameter: Organism Value: A. thaliana
  misc_feature: MA Experiment 20000185 PARAMETER Experiment Name: At_Roots__P Parameter: Tissue Value: Roots vs. Whole Plant
  misc_feature: MA Experiment ID: 20000234 Result: Up-regulated in Transcription
  misc_feature: MA Experiment 20000234 PARAMETER Experiment Name: At_Siliques_P Parameter: Age (day) Value: 21
  misc_feature: MA Experiment 20000234 PARAMETER Experiment Name: At_Siliques_P Parameter: Organism Value: A. thaliana
  misc_feature: MA Experiment 20000234 PARAMETER Experiment Name: At_Siliques_P Parameter: Plant Line Value: WS
  misc_feature: MA Experiment 20000234 PARAMETER Experiment Name: At_Siliques_P Parameter: Tissue Value: Less Than 5mm Siliques vs. Whole Plant
  misc_feature: MA Experiment ID: 20000235 Result: Up-regulated in Transcription
  misc_feature: MA Experiment 20000235 PARAMETER Experiment Name: At_Siliques_P Parameter: Age (day) Value: 21
  misc_feature: MA Experiment 20000235 PARAMETER Experiment Name: At_Siliques_P Parameter: Organism Value: A. thaliana
  misc_feature: MA Experiment 20000235 PARAMETER Experiment Name: At_Siliques_P Parameter: Plant Line Value: WS
  misc_feature: MA Experiment 20000235 PARAMETER Experiment Name: At_Siliques_P Parameter: Tissue Value: 5-10mm Siliques vs. Whole Plant
  misc_feature: MA Experiment ID: 20000265 Result: Up-regulated in Transcription
  misc_feature: MA Experiment 20000265 PARAMETER Experiment Name: At_Open_Flower_P Parameter: Age (day) Value: 21
  misc_feature: MA Experiment 20000265 PARAMETER Experiment Name: At_Open_Flower_P Parameter: Plant Line Value: WS
  misc_feature: MA Experiment 20000265 PARAMETER Experiment Name: At_Open_Flower_P Parameter: Tissue Value: Closed Flower vs. Whole Plant
  misc_feature: MA Experiment ID: 20000286 Result: Up-regulated in Transcription
  misc_feature: MA Experiment 20000286 PARAMETER Experiment Name: At_Open_Flower_P Parameter: Age (day) Value: 21
  misc_feature: MA Experiment 20000286 PARAMETER Experiment Name: At_Open_Flower_P Parameter: Plant Line Value: WS
  misc_feature: MA Experiment 20000286 PARAMETER Experiment Name: At_Open_Flower_P Parameter: Tissue Value: Half Open vs. Whole Plant
  misc_feature: MA Experiment ID: 20000437 Result: Down-regulated in Transcription
  misc_feature: MA Experiment 20000437 PARAMETER Experiment Name: At_Drought_P Parameter: Age (day) Value: 8
  misc_feature: MA Experiment 20000437 PARAMETER Experiment Name: At_Drought_P Parameter: Organism Value: A. thaliana
  misc_feature: MA Experiment 20000437 PARAMETER Experiment Name: At_Drought_P Parameter: Plant Line Value: WS
  misc_feature: MA Experiment 20000437 PARAMETER Experiment Name: At_Drought_P Parameter: Timepoint (hr) Value: 24
  misc_feature: MA Experiment 20000437 PARAMETER Experiment Name: At_Drought_P Parameter: Tissue Value: Whole Plant
  misc_feature: MA Experiment 20000437 PARAMETER Experiment Name: At_Drought_P Parameter: Treatment Value: Drought vs. No Drought
  misc_feature: MA Experiment ID: 20000439 Result: Up-regulated in Transcription
  misc_feature: MA Experiment 20000439 PARAMETER Experiment Name: At_Roots__P Parameter: Age (day) Value: 14 vs. 21
  misc_feature: MA Experiment 20000439 PARAMETER Experiment Name: At_Roots__P Parameter: Organism Value: A. thaliana
  misc_feature: MA Experiment 20000439 PARAMETER Experiment Name: At_Roots__P Parameter: Tissue Value: Roots vs. Whole Plant
  misc_feature: MA Experiment ID: 20001451 Result: Down-regulated in Transcription
  misc_feature: MA Experiment 20001451 PARAMETER Experiment Name: At_Far-red-induction_P Parameter: Age (day) Value: 7
  misc_feature: MA Experiment 20001451 PARAMETER Experiment Name: At_Far-red-induction_P Parameter: Light Value: Far-red vs. White
  misc_feature: MA Experiment 20001451 PARAMETER Experiment Name: At_Far-red-induction_P Parameter: Organism Value: A. thaliana
  misc_feature: MA Experiment 20001451 PARAMETER Experiment Name: At_Far-red-induction_P Parameter: Plant Line Value: Columbia
  misc_feature: MA Experiment 20001451 PARAMETER Experiment Name: At_Far-red-induction_P Parameter: Timepoint (hr) Value: 24
  misc_feature: MA Experiment 20001451 PARAMETER Experiment Name: At_Far-red-induction_P Parameter: Tissue Value: Whole Plant
  misc_feature: MA Experiment ID: 20001911 Result: Down-regulated in Transcription
  misc_feature: MA Experiment 20001911 PARAMETER Experiment Name: At_Drought_Reproduction_P Parameter: Age (day) Value: 40
  misc_feature: MA Experiment 20001911 PARAMETER Experiment Name: At_Drought_Reproduction_P Parameter: Organism Value: A. thaliana
  misc_feature: MA Experiment 20001911 PARAMETER Experiment Name: At_Drought_Reproduction_P Parameter: Plant Line Value: WS
  misc_feature: MA Experiment 20001911 PARAMETER Experiment Name: At_Drought_Reproduction_P Parameter: Timepoint (day) Value: 10
  misc_feature: MA Experiment 20001911 PARAMETER Experiment Name: At_Drought_Reproduction_P Parameter: Tissue Value: Flowers
  misc_feature: MA Experiment 20001911 PARAMETER Experiment Name: At_Drought_Reproduction_P Parameter: Treatment Value: Drought vs. No Drought
atggctattggagatagagctatgtttactgttttgcttctattcattgcttcgatctctggattctctgttgttcgttgtgttactgatccatctgatggagtctctggcactcttggatacttgctctcagaccttaagtcactcagaaaattggatgttagtggtaacagcatccatgatacacttccatatcagttgccaccgaatctcacaagcctgaatgtaagtggtaattcacttacaatgtcaataggagatatctttgctgatcataagtcactggcaaccttggacctttctcataacaacttcagtggcgatcttcctagttccttaagcacagtgtccacactttccgttctttatgttcagaacaatcaattgacaggttccatcgatgttctctcggggttgcctttgaaaactttaaatgttgcaaacaatcatttcaatggatccatacctaaggagcttagttctattcagaccttaatatatgatggtaattcctttgataacgtccctgcctctcctcagccagaaagacctggcaaaaaagagacaccttctggttctaagaaacccaaaattggttctgaagagaaatcttcagactctggcaagggtttgtctggtggagtagtcactggtatagtgttcggttctctatttgttgctggtattatagcacttgttctttacttgtgccttcacaagaaaaaacggaaagttagaggaagtacaagagcttcccaaagaagtcttccgcttagtggaacacctgaggtgcaggagcagagggtaaaaagtgtagcatccgttgcagacttgaagtcttcacctgcagaaaaagtaacggttgatcgcgttatgaagaacggctctataagtagaataagatctcctatcactgcttcacaatacactgtttcctctctgcaagttgcaacaaacagctttagtcaagaaaacatcattggtgaaggttctctaggccgtgtctatagagcagagttccccaatggaaagataatggcgattaagaagattgataatgcagcactttcattacaagaagaagataatttcttagaagccgtttcaaatatgtcgcggttgaggcatccaaacattgttcccttggctggatactgcaccgagcatggtcaacgtcttctagtgtatgaatatgtaggaaatgggaatctagatgatacgcttcacacgaatgatgatagaagcatgaatctgacttggaatgcgcgtgttaaagtggctcttggaactgccaaggctttagagtacttgcacgaagtttgcttgccttcaattgtccatagaaacttcaaatcagcgaatatattgctagacgaagaacttaatcctcacctatcagacagtggtttagctgctttgacacctaacactgagagacaggtttcaactcaagtggtaggttcatttggatacagcgctccagagtttgcactgtcgggaatttacacagtgaaaagtgatgtatacacttttggagtagtcatgcttgagctcttaactggtcggaagcctcttgacagctcgaggacgagagcagagcaatcactagtgagatgggcaacaccgcagcttcacgatatagatgctttgtctaaaatggttgatccttctcttaatggcatgtatccagctaagtcactgtctcgttttgcggacatcattgctctctgtattcagccggaaccagagttcaggcctccaatgtcagaggtggtgcaacagctagtaagattagttcaaagggcaagtgttgtcaaacgaagatcaagtgatgacactggattttcatacaggacacctgaacacgagcacgtcgatatctcattctga

SEQ ID NO: 76771 - protein, 629 aa, Arabidopsis thaliana
  peptide (1)..(629): Ceres Seq. ID no. 11401902
  misc_feature (292)..(629): Homolog of NCBI NO: 15234728 NR Description: serine/threonine protein kinase like protein; id: At4g22130.1 [Arabidopsis thaliana] >gi|11259536|pir||T49120
  misc_feature (34)..(613): Homolog of NCBI NO: 7489783 NR Description: leucine-rich repeat transmembrane protein kinase
  misc_feature (49)..(623): Homolog of NCBI NO: 15217283 NR Description: Putative leucine-rich repeat transmembrane
  misc_feature (69)..(623): Homolog of NCBI NO: 7489784 NR Description: leucine-rich repeat transmembrane protein kinase
  misc_feature (271)..(623): Homolog of NCBI NO: 37533916 NR Description: putative leucine-rich repeat transmembrane
  misc_feature (20)..(282): Homolog of NCBI NO: 37533916 NR Description: putative leucine-rich repeat transmembrane
  misc_feature (242)..(614): Homolog of NCBI NO: 18399502 NR Description: putative LRR receptor protein kinase; protein id: supported by cDNA: gi_15810274 [Arabidopsis thaliana] putative LRR receptor protein kinase receptor protein kinase
  misc_feature (22)..(210): Homolog of NCBI NO: 18399502 NR Description: putative LRR receptor protein kinase; protein id: supported by cDNA: gi_15810274 [Arabidopsis thaliana] putative LRR receptor protein kinase receptor protein kinase
  misc_feature (242)..(614): Homolog of NCBI NO: 25411997 NR Description: probable LRR receptor protein kinase [imported] -
  misc_feature (36)..(210): Homolog of NCBI NO: 25411997 NR Description: probable LRR receptor protein kinase [imported] -
MAIGDRAMFTVLLLFIASISGFSVVRCVTDPSDGVSGTLGYLLSDLKSLRKLDVSGNSIHDTLPYQLPPNLTSLNVSGNSLTMSIGDIFADHKSLATLDLSHNNFSGDLPSSLSTVSTLSVLYVQNNQLTGSIDVLSGLPLKTLNVANNHFNGSIPKELSSIQTLIYDGNSFDNVPASPQPERPGKKETPSGSKKPKIGSEEKSSDSGKGLSGGVVTGIVFGSLFVAGIIALVLYLCLHKKKRKVRGSTRASQRSLPLSGTPEVQEQRVKSVASVADLKSSPAEKVTVDRVMKNGSISRIRSPITASQYTVSSLQVATNSFSQENIIGEGSLGRVYRAEFPNGKIMAIKKIDNAALSLQEEDNFLEAVSNMSRLRHPNIVPLAGYCTEHGQRLLVYEYVGNGNLDDTLHTNDDRSMNLTWNARVKVALGTAKALEYLHEVCLPSIVHRNFKSANILLDEELNPHLSDSGLAALTPNTERQVSTQVVGSFGYSAPEFALSGIYTVKSDVYTFGVVMLELLTGRKPLDSSRTRAEQSLVRWATPQLHDIDALSKMVDPSLNGMYPAKSLSRFADIIALCIQPEPEFRPPMSEVVQQLVRLVQRASVVKRRSSDDTGFSYRTPEHEHVDISF

SEQ ID NO: 76772 - protein, 622 aa, Arabidopsis thaliana
  peptide (1)..(622): Ceres Seq. ID no. 11401903
  misc_feature (285)..(622): Homolog of NCBI NO: 15234728 NR Description: serine/threonine protein kinase like protein; id: At4g22130.1 [Arabidopsis thaliana] >gi|11259536|pir||T49120
  misc_feature (27)..(606): Homolog of NCBI NO: 7489783 NR Description: leucine-rich repeat transmembrane protein kinase
  misc_feature (42)..(616): Homolog of NCBI NO: 15217283 NR Description: Putative leucine-rich repeat transmembrane
  misc_feature (62)..(616): Homolog of NCBI NO: 7489784 NR Description: leucine-rich repeat transmembrane protein kinase
  misc_feature (264)..(616): Homolog of NCBI NO: 37533916 NR Description: putative leucine-rich repeat transmembrane
  misc_feature (13)..(275): Homolog of NCBI NO: 37533916 NR Description: putative leucine-rich repeat transmembrane
  misc_feature (235)..(607): Homolog of NCBI NO: 18399502 NR Description: putative LRR receptor protein kinase; protein id: supported by cDNA: gi_15810274 [Arabidopsis thaliana] putative LRR receptor protein kinase receptor protein kinase
  misc_feature (15)..(203): Homolog of NCBI NO: 18399502 NR Description: putative LRR receptor protein kinase; protein id: supported by cDNA: gi_15810274 [Arabidopsis thaliana] putative LRR receptor protein kinase receptor protein kinase
  misc_feature (235)..(607): Homolog of NCBI NO: 25411997 NR Description: probable LRR receptor protein kinase [imported] -
  misc_feature (29)..(203): Homolog of NCBI NO: 25411997 NR Description: probable LRR receptor protein kinase [imported] -
MFTVLLLFIASISGFSVVRCVTDPSDGVSGTLGYLLSDLKSLRKLDVSGNSIHDTLPYQLPPNLTSLNVSGNSLTMSIGDIFADHKSLATLDLSHNNFSGDLPSSLSTVSTLSVLYVQNNQLTGSIDVLSGLPLKTLNVANNHFNGSIPKELSSIQTLIYDGNSFDNVPASPQPERPGKKETPSGSKKPKIGSEEKSSDSGKGLSGGVVTGIVFGSLFVAGIIALVLYLCLHKKKRKVRGSTRASQRSLPLSGTPEVQEQRVKSVASVADLKSSPAEKVTVDRVMKNGSISRIRSPITASQYTVSSLQVATNSFSQENIIGEGSLGRVYRAEFPNGKIMAIKKIDNAALSLQEEDNFLEAVSNMSRLRHPNIVPLAGYCTEHGQRLLVYEYVGNGNLDDTLHTNDDRSMNLTWNARVKVALGTAKALEYLHEVCLPSIVHRNFKSANILLDEELNPHLSDSGLAALTPNTERQVSTQVVGSFGYSAPEFALSGIYTVKSDVYTFGVVMLELLTGRKPLDSSRTRAEQSLVRWATPQLHDIDALSKMVDPSLNGMYPAKSLSRFADIIALCIQPEPEFRPPMSEVVQQLVRLVQRASVVKRRSSDDTGFSYRTPEHEHVDISF

SEQ ID NO: 76773 - protein, 547 aa, Arabidopsis thaliana
  peptide (1)..(547): Ceres Seq. ID no. 11401904
  misc_feature (210)..(547): Homolog of NCBI NO: 15234728 NR Description: serine/threonine protein kinase like protein; id: At4g22130.1 [Arabidopsis thaliana] >gi|11259536|pir||T49120
  misc_feature (1)..(531): Homolog of NCBI NO: 7489783 NR Description: leucine-rich repeat transmembrane protein kinase
  misc_feature (1)..(541): Homolog of NCBI NO: 15217283 NR Description: Putative leucine-rich repeat transmembrane
  misc_feature (1)..(541): Homolog of NCBI NO: 7489784 NR Description: leucine-rich repeat transmembrane protein kinase
  misc_feature (189)..(541): Homolog of NCBI NO: 37533916 NR Description: putative leucine-rich repeat transmembrane
  misc_feature (1)..(200): Homolog of NCBI NO: 37533916 NR Description: putative leucine-rich repeat transmembrane
  misc_feature (160)..(532): Homolog of NCBI NO: 18399502 NR Description: putative LRR receptor protein kinase; protein id: supported by cDNA: gi_15810274 [Arabidopsis thaliana] putative LRR receptor protein kinase receptor protein kinase
  misc_feature (1)..(128): Homolog of NCBI NO: 18399502 NR Description: putative LRR receptor protein kinase; protein id: supported by cDNA: gi_15810274 [Arabidopsis thaliana] putative LRR receptor protein kinase receptor protein kinase
  misc_feature (160)..(532): Homolog of NCBI NO: 25411997 NR Description: probable LRR receptor protein kinase [imported] -
  misc_feature (1)..(128): Homolog of NCBI NO: 25411997 NR Description: probable LRR receptor protein kinase [imported] -
MSIGDIFADHKSLATLDLSHNNFSGDLPSSLSTVSTLSVLYVQNNQLTGSIDVLSGLPLKTLNVANNHFNGSIPKELSSIQTLIYDGNSFDNVPASPQPERPGKKETPSGSKKPKIGSEEKSSDSGKGLSGGVVTGIVFGSLFVAGIIALVLYLCLHKKKRKVRGSTRASQRSLPLSGTPEVQEQRVKSVASVADLKSSPAEKVTVDRVMKNGSISRIRSPITASQYTVSSLQVATNSFSQENIIGEGSLGRVYRAEFPNGKIMAIKKIDNAALSLQEEDNFLEAVSNMSRLRHPNIVPLAGYCTEHGQRLLVYEYVGNGNLDDTLHTNDDRSMNLTWNARVKVALGTAKALEYLHEVCLPSIVHRNFKSANILLDEELNPHLSDSGLAALTPNTERQVSTQVVGSFGYSAPEFALSGIYTVKSDVYTFGVVMLELLTGRKPLDSSRTRAEQSLVRWATPQLHDIDALSKMVDPSLNGMYPAKSLSRFADIIALCIQPEPEFRPPMSEVVQQLVRLVQRASVVKRRSSDDTGFSYRTPEHEHVDISF

SEQ ID NO: 76774 - DNA, 1736 bp, Arabidopsis thaliana
  misc_feature (1)..(1736): Ceres Seq. ID no. 11403153
  misc_feature: MA Experiment ID: 20000184 Result: Up-regulated in Transcription
  misc_feature: MA Experiment 20000184 PARAMETER Experiment Name: At_Shoots__P Parameter: Age (day) Value: 7
  misc_feature: MA Experiment 20000184 PARAMETER Experiment Name: At_Shoots__P Parameter: Tissue Value: Shoots vs. Whole Plant
  misc_feature: MA Experiment ID: 20001557 Result: Up-regulated in Transcription
  misc_feature: MA Experiment 20001557 PARAMETER Experiment Name: At_Drought_Soil_Dry_P Parameter: Age (day) Value: 27
  misc_feature: MA Experiment 20001557 PARAMETER Experiment Name: At_Drought_Soil_Dry_P Parameter: Organism Value: A. thaliana
  misc_feature: MA Experiment 20001557 PARAMETER Experiment Name: At_Drought_Soil_Dry_P Parameter: Plant Line Value: WS
  misc_feature: MA Experiment 20001557 PARAMETER Experiment Name: At_Drought_Soil_Dry_P Parameter: Post Timepoint (hr) Value: 3
  misc_feature: MA Experiment 20001557 PARAMETER Experiment Name: At_Drought_Soil_Dry_P Parameter: Post-Treatment Value: Re-Water vs. No Drought
  misc_feature: MA Experiment 20001557 PARAMETER Experiment Name: At_Drought_Soil_Dry_P Parameter: Timepoint (day) Value: 13
  misc_feature: MA Experiment 20001557 PARAMETER Experiment Name: At_Drought_Soil_Dry_P Parameter: Treatment Value: Drought vs. No Drought
  misc_feature: MA Experiment ID: 20001558 Result: Up-regulated in Transcription
  misc_feature: MA Experiment 20001558 PARAMETER Experiment Name: At_Drought_Soil_Dry_P Parameter: Age (day) Value: 27
  misc_feature: MA Experiment 20001558 PARAMETER Experiment Name: At_Drought_Soil_Dry_P Parameter: Organism Value: A. thaliana
  misc_feature: MA Experiment 20001558 PARAMETER Experiment Name: At_Drought_Soil_Dry_P Parameter: Plant Line Value: WS
  misc_feature: MA Experiment 20001558 PARAMETER Experiment Name: At_Drought_Soil_Dry_P Parameter: Post Timepoint (hr) Value: 6
  misc_feature: MA Experiment 20001558 PARAMETER Experiment Name: At_Drought_Soil_Dry_P Parameter: Post-Treatment Value: Re-Water vs. No Drought
  misc_feature: MA Experiment 20001558 PARAMETER Experiment Name: At_Drought_Soil_Dry_P Parameter: Timepoint (day) Value: 13
  misc_feature: MA Experiment 20001558 PARAMETER Experiment Name: At_Drought_Soil_Dry_P Parameter: Treatment Value: Drought vs. No Drought
gaattcctcgagctacgtcagggccagtctctcgcaatcttcgctcttctctttgctctctctctctcaacgcggttcagatccgagtttgggagattcaagctccctgaaaaaagccctttactctcgcttaccaactttgctccagcatggcaggatctgcaccagaaggcacacagtttgatgcacgtcagtttgaccagaaactcaatgaagtacttgagggacaagatgagttcttcacatcctatgatgatgttcatgagagctttgatgccatgggtcttcaagagaaccttctcaggggtatttatgcttatggttttgagaagccttctgctattcagcaaagaggaatcgtccccttctgtaagggtcttgatgtgattcaacaggctcagtctggtactgggaaaacagcaactttctgctctggtgtcttgcagcagctggacttctcccttatccagtgtcaggctttggttctagctccaactagagagcttgctcagcaaattgagaaggtcatgagggcccttggtgattaccttggtgtcaaggttcacgcctgtgttggtggaaccagtgtccgtgaggatcagcgcatcctccaagctggtgtccatgttgttgttggaactccagggcgtgtctttgacatgttgaagaggcagtctcttcgtgctgacaacatcaagatgtttgttctcgatgaagctgatgaaatgctctcccgtggtttcaaggaccagatctatgacatattccagcttcttccaccaaagatccaagttggtgtgttctccgcaacaatgccaccagaagctcttgagatcacaaggaagttcatgagcaagccagtgagaatcttggtgaagcgtgatgagcttacccttgaaggtatcaagcagttctacgtcaacgttgagaaagaagagtggaagctcgagacactctgtgatctctacgagactcttgccatcactcagagtgtcatcttcgtgaacaccaggcgtaaggttgattggctcacagacaaaatgagaagccgtgaccacacagtctctgcaactcacggagacatggaccagaacaccagggacatcatcatgagagagttcaggtctggttcctcccgtgttctcatcaccactgacctcttagctcgtggtattgatgtccaacaagtctccctggttatcaacttcgatctcccaactcagccagagaactaccttcaccgtatcggaagaagtggaaggttcgggagaaagggtgttgcgatcaatttcgtgacccgtgatgatgagaggatgctgtttgatattcagaaattctacaatgtggttgtcgaagagctgccttcgaacgtggccgatctgctgtgaagggagaaaagaagtcggttctgttgctgtgtttgctctgccgtactagtatcaccggagaagaaaggttttcttgttttgcaaggcactctttgatctgattttgacccgtcgtctatcagcgatttacatttcttaaattttcttagttgttgttctctcctctctctcccagctacgaacatatctctctcttcttgaccatttttaagtttaagtcatatggagtatttatttcttcactattttaatattcggctttgttgtttgtctttgatttttgtatcaatcaaatcttttcatcaaagtttggttttaagctaaaccctgacgtagctcgaggaattc

SEQ ID NO: 76775 - protein, 412 aa, Arabidopsis thaliana; identical to SEQ ID NO: 21228
  peptide (1)..(412): Ceres Seq. ID no. 11403154
  misc_feature (52)..(255): Pfam Name: DEAD/DEAH box helicase Pfam Description: DEAD/DEAH box helicase
  misc_feature (1)..(412): Homolog of NCBI NO: 18400210 NR Description: eukaryotic translation initiation factor 4A-1 protein id: At3g13920.1, supported by cDNA: 29310., supported by gi_15293046, supported by cDNA: gi_15450485, supported by cDNA:
  misc_feature (1)..(412): Homolog of NCBI NO: 19698881 NR Description: eukaryotic translation initiation factor
  misc_feature (1)..(412): Homolog of NCBI NO: 21555870 NR Description: Eukaryotic initiation factor 4A, putative
  misc_feature (1)..(412): Homolog of NCBI NO: 15221761 NR Description: eukaryotic translation initiation factor 4A-2 protein id: At1g54270.1, supported by cDNA: 3997., supported by
  misc_feature (1)..(412): Homolog of NCBI NO: 1170506 NR Description: Eukaryotic initiation factor 4A-2 (eIF-4A-2)
  misc_feature (1)..(412): Homolog of NCBI NO: 2119938 NR Description: translation initiation factor eIF-4A.14 - common
  misc_feature (1)..(412): Homolog of NCBI NO: 2500520 NR Description: Eukaryotic initiation factor 4A-14 (eIF-4A-14)
  misc_feature (1)..(412): Homolog of NCBI NO: 2500518 NR Description: Eukaryotic initiation factor 4A-11 (eIF-4A-11)
  misc_feature (1)..(412): Homolog of NCBI NO: 2119933 NR Description: translation initiation factor eIF-4A.11 - common
  misc_feature (1)..(412): Homolog of NCBI NO: 1170511 NR Description: Eukaryotic initiation factor 4A-10 (eIF-4A-10)

SEQ ID NO: 76776 - protein, 369 aa, Arabidopsis thaliana; identical to SEQ ID NO: 21229
  peptide (1)..(369): Ceres Seq. ID no. 11403155
  misc_feature (9)..(212): Pfam Name: DEAD/DEAH box helicase Pfam Description: DEAD/DEAH box helicase
  misc_feature (1)..(369): Homolog of NCBI NO: 18400210 NR Description: eukaryotic translation initiation factor 4A-1 protein id: At3g13920.1, supported by cDNA: 29310., supported by gi_15293046, supported by cDNA: gi_15450485, supported by cDNA:
  misc_feature (1)..(369): Homolog of NCBI NO: 19698881 NR Description: eukaryotic translation initiation factor
  misc_feature (1)..(369): Homolog of NCBI NO: 21555870 NR Description: Eukaryotic initiation factor 4A, putative
  misc_feature (1)..(369): Homolog of NCBI NO: 15221761 NR Description: eukaryotic translation initiation factor 4A-2 protein id: At1g54270.1, supported by cDNA: 3997., supported by
  misc_feature (1)..(369): Homolog of NCBI NO: 1170506 NR Description: Eukaryotic initiation factor 4A-2 (eIF-4A-2)
  misc_feature (1)..(369): Homolog of NCBI NO: 2119938 NR Description: translation initiation factor eIF-4A.14 - common
  misc_feature (1)..(369): Homolog of NCBI NO: 2500520 NR Description: Eukaryotic initiation factor 4A-14 (eIF-4A-14)
  misc_feature (1)..(369): Homolog of NCBI NO: 2500518 NR Description: Eukaryotic initiation factor 4A-11 (eIF-4A-11)
  misc_feature (1)..(369): Homolog of NCBI NO: 2119933 NR Description: translation initiation factor eIF-4A.11 - common
  misc_feature (1)..(369): Homolog of NCBI NO: 1170511 NR Description: Eukaryotic initiation factor 4A-10 (eIF-4A-10)

SEQ ID NO: 76777 - protein, 286 aa, Arabidopsis thaliana; identical to SEQ ID NO: 21230
  peptide (1)..(286): Ceres Seq. ID no. 11403156
  misc_feature (1)..(129): Pfam Name: DEAD/DEAH box helicase Pfam Description: DEAD/DEAH box helicase
  misc_feature (1)..(286): Homolog of NCBI NO: 18400210 NR Description: eukaryotic translation initiation factor 4A-1 protein id: At3g13920.1, supported by cDNA: 29310., supported by gi_15293046, supported by cDNA: gi_15450485, supported by cDNA:
  misc_feature (1)..(286): Homolog of NCBI NO: 19698881 NR Description: eukaryotic translation initiation factor
  misc_feature (1)..(286): Homolog of NCBI NO: 21555870 NR Description: Eukaryotic initiation factor 4A, putative
  misc_feature (1)..(286): Homolog of NCBI NO: 15221761 NR Description: eukaryotic translation initiation factor 4A-2 protein id: At1g54270.1, supported by cDNA: 3997., supported by
  misc_feature (1)..(286): Homolog of NCBI NO: 1170506 NR Description: Eukaryotic initiation factor 4A-2 (eIF-4A-2)
  misc_feature (1)..(286): Homolog of NCBI NO: 2119938 NR Description: translation initiation factor eIF-4A.14 - common
  misc_feature (1)..(286): Homolog of NCBI NO: 2500520 NR Description: Eukaryotic initiation factor 4A-14 (eIF-4A-14)
  misc_feature (1)..(286): Homolog of NCBI NO: 2500518 NR Description: Eukaryotic initiation factor 4A-11 (eIF-4A-11)
  misc_feature (1)..(286): Homolog of NCBI NO: 2119933 NR Description: translation initiation factor eIF-4A.11 - common
  misc_feature (1)..(286): Homolog of NCBI NO: 1170511 NR Description: Eukaryotic initiation factor 4A-10 (eIF-4A-10)

SEQ ID NO: 76778 - DNA, 2124 bp, Arabidopsis thaliana
  misc_feature (1)..(2124): Ceres Seq. ID no. 11403170
  misc_feature: MA Experiment ID: 108434 Result: Up-regulated in Transcription
  misc_feature: MA Experiment 108434 PARAMETER Experiment Name: At_Root_Tips_cDNA_P Parameter: Tissue Value: Root Tips
  misc_feature: MA Experiment ID: 108461 Result: Up-regulated in Transcription
  misc_feature: MA Experiment 108461 PARAMETER Experiment Name: At_Germinating_Seeds_cDNA_P Parameter: Age (day) Value: 1 vs. 0
  misc_feature: MA Experiment 108461 PARAMETER Experiment Name: At_Germinating_Seeds_cDNA_P Parameter: Tissue Value: Germinating Seeds
  misc_feature: MA Experiment ID: 108462 Result: Up-regulated in Transcription
  misc_feature: MA Experiment 108462 PARAMETER Experiment Name: At_Germinating_Seeds_cDNA_P Parameter: Age (day) Value: 2 vs. 0
  misc_feature: MA Experiment 108462 PARAMETER Experiment Name: At_Germinating_Seeds_cDNA_P Parameter: Tissue Value: Germinating Seeds
  misc_feature: MA Experiment ID: 108573 Result: Down-regulated in Transcription
  misc_feature: MA Experiment 108573 PARAMETER Experiment Name: At_Drought_cDNA_P Parameter: Timepoint (hr) Value: 6
  misc_feature: MA Experiment 108573 PARAMETER Experiment Name: At_Drought_cDNA_P Parameter: Tissue Value: Aerial
  misc_feature: MA Experiment 108573 PARAMETER Experiment Name: At_Drought_cDNA_P Parameter: Treatment Value: Drought vs. No Drought
  misc_feature: MA Experiment ID: 108576 Result: Down-regulated in Transcription
  misc_feature: MA Experiment 108576 PARAMETER Experiment Name: At_42deg_Heat_cDNA_P Parameter: Temperature (deg C) Value: 42 vs. 22
  misc_feature: MA Experiment 108576 PARAMETER Experiment Name: At_42deg_Heat_cDNA_P Parameter: Timepoint (hr) Value: 1
  misc_feature: MA Experiment 108576 PARAMETER Experiment Name: At_42deg_Heat_cDNA_P Parameter: Tissue Value: Aerial
  misc_feature: MA Experiment ID: 108579 Result: Up-regulated in Transcription
  misc_feature: MA Experiment 108579 PARAMETER Experiment Name: At_4deg_Cold_cDNA_P Parameter: Temperature (deg C) Value: 4 vs. 22
  misc_feature: MA Experiment 108579 PARAMETER Experiment Name: At_4deg_Cold_cDNA_P Parameter: Timepoint (hr) Value: 6
  misc_feature: MA Experiment 108579 PARAMETER Experiment Name: At_4deg_Cold_cDNA_P Parameter: Tissue Value: Aerial
  misc_feature: MA Experiment ID: 108595 Result: Up-regulated in Transcription
  misc_feature: MA Experiment 108595 PARAMETER Experiment Name: At_Ler-pi_Ovule_cDNA_P Parameter: Plant Line Value: null
  misc_feature: MA Experiment ID: 20000069 Result: Down-regulated in Transcription
  misc_feature: MA Experiment 20000069 PARAMETER Experiment Name: At_100uM_ABA_Mutants_cDNA_P Parameter: Plant Line Value: CS23
  misc_feature: MA Experiment 20000069 PARAMETER Experiment Name: At_100uM_ABA_Mutants_cDNA_P Parameter: Timepoint (hr) Value: 6
  misc_feature: MA Experiment 20000069 PARAMETER Experiment Name: At_100uM_ABA_Mutants_cDNA_P Parameter: Tissue Value: Aerial
  misc_feature: MA Experiment 20000069 PARAMETER Experiment Name: At_100uM_ABA_Mutants_cDNA_P Parameter: Treatment Value: 100uM ABA vs. No Treatment
  misc_feature: MA Experiment ID: 20000070 Result: Down-regulated in Transcription
  misc_feature: MA Experiment 20000070 PARAMETER Experiment Name: At_100uM_ABA_Mutants_cDNA_P Parameter: Plant Line Value: CS24
  misc_feature: MA Experiment 20000070 PARAMETER Experiment Name: At_100uM_ABA_Mutants_cDNA_P Parameter: Timepoint (hr) Value: 6
  misc_feature: MA Experiment 20000070 PARAMETER Experiment Name: At_100uM_ABA_Mutants_cDNA_P Parameter: Tissue Value: Aerial
  misc_feature: MA Experiment 20000070 PARAMETER Experiment Name: At_100uM_ABA_Mutants_cDNA_P Parameter: Treatment Value: 100uM ABA vs. No Treatment
  misc_feature: MA Experiment ID: 20000071 Result: Down-regulated in Transcription
  misc_feature: MA Experiment 20000071 PARAMETER Experiment Name: At_100uM_ABA_Mutants_cDNA_P Parameter: Plant Line Value: CS8104
  misc_feature: MA Experiment 20000071 PARAMETER Experiment Name: At_100uM_ABA_Mutants_cDNA_P Parameter: Timepoint (hr) Value: 6
  misc_feature: MA Experiment 20000071 PARAMETER Experiment Name: At_100uM_ABA_Mutants_cDNA_P Parameter: Tissue Value: Aerial
  misc_feature: MA Experiment 20000071 PARAMETER Experiment Name: At_100uM_ABA_Mutants_cDNA_P Parameter: Treatment Value: 100uM ABA vs. No Treatment
  misc_feature: MA Experiment ID: 20000072 Result: Down-regulated in Transcription
  misc_feature: MA Experiment 20000072 PARAMETER Experiment Name: At_100uM_ABA_Mutants_cDNA_P Parameter: Plant Line Value: CS8105
  misc_feature: MA Experiment 20000072 PARAMETER Experiment Name: At_100uM_ABA_Mutants_cDNA_P Parameter: Timepoint (hr) Value: 6
  misc_feature: MA Experiment 20000072 PARAMETER Experiment Name: At_100uM_ABA_Mutants_cDNA_P Parameter: Tissue Value: Aerial
  misc_feature: MA Experiment 20000072 PARAMETER Experiment Name: At_100uM_ABA_Mutants_cDNA_P Parameter: Treatment Value: 100uM ABA vs. No Treatment
  misc_feature: MA Experiment ID: 20000086 Result: Down-regulated in Transcription
  misc_feature: MA Experiment 20000086 PARAMETER Experiment Name: At_100uM_ABA_Mutants_cDNA_P Parameter: Plant Line Value: CS22
  misc_feature: MA Experiment 20000086 PARAMETER Experiment Name: At_100uM_ABA_Mutants_cDNA_P Parameter: Timepoint (hr) Value: 6
  misc_feature: MA Experiment 20000086 PARAMETER Experiment Name: At_100uM_ABA_Mutants_cDNA_P Parameter: Tissue Value: Aerial
  misc_feature: MA Experiment 20000086 PARAMETER Experiment Name: At_100uM_ABA_Mutants_cDNA_P Parameter: Treatment Value: 100uM ABA vs. No Treatment
  misc_feature: MA Experiment ID: 20000087 Result: Down-regulated in Transcription
  misc_feature: MA Experiment 20000087 PARAMETER Experiment Name: At_100uM_ABA_Mutants_cDNA_P Parameter: Plant Line Value: WS
  misc_feature: MA Experiment 20000087 PARAMETER Experiment Name: At_100uM_ABA_Mutants_cDNA_P Parameter: Timepoint (hr) Value: 6
  misc_feature: MA Experiment 20000087 PARAMETER Experiment Name: At_100uM_ABA_Mutants_cDNA_P Parameter: Tissue Value: Aerial
  misc_feature: MA Experiment 20000087 PARAMETER Experiment Name: At_100uM_ABA_Mutants_cDNA_P Parameter: Treatment Value: 100uM ABA vs. No Treatment
  misc_feature: MA Experiment ID: 20000090 Result: Down-regulated in Transcription
  misc_feature: MA Experiment ID: 20000093 Result: Down-regulated in Transcription
  misc_feature: MA Experiment 20000093 PARAMETER Experiment Name: At_42deg_Heat_cDNA_P Parameter: Temperature (deg C) Value: 42 vs. 22
  misc_feature: MA Experiment 20000093 PARAMETER Experiment Name: At_42deg_Heat_cDNA_P Parameter: Timepoint (hr) Value: 0.5
  misc_feature: MA Experiment 20000093 PARAMETER Experiment Name: At_42deg_Heat_cDNA_P Parameter: Tissue Value: Aerial
  misc_feature: MA Experiment ID: 20000111 Result: Down-regulated in Transcription
  misc_feature: MA Experiment 20000111 PARAMETER Experiment Name: At_42deg_Heat_cDNA_P Parameter: Temperature (deg C) Value: 42 vs. 22
  misc_feature: MA Experiment 20000111 PARAMETER Experiment Name: At_42deg_Heat_cDNA_P Parameter: Timepoint (hr) Value: 6
  misc_feature: MA Experiment 20000111 PARAMETER Experiment Name: At_42deg_Heat_cDNA_P Parameter: Tissue Value: Aerial
  misc_feature: MA Experiment ID: 20000112 Result: Down-regulated in Transcription
  misc_feature: MA Experiment 20000112 PARAMETER Experiment Name: At_42deg_Heat_cDNA_P Parameter: Temperature (deg C) Value: 42 vs. 22
  misc_feature: MA Experiment 20000112 PARAMETER Experiment Name: At_42deg_Heat_cDNA_P Parameter: Timepoint (hr) Value: 2
  misc_feature: MA Experiment 20000112 PARAMETER Experiment Name: At_42deg_Heat_cDNA_P Parameter: Tissue Value: Aerial
  misc_feature: MA Experiment ID: 20000113 Result: Down-regulated in Transcription
  misc_feature: MA Experiment 20000113 PARAMETER Experiment Name: At_42deg_Heat_cDNA_P Parameter: Temperature (deg C) Value: 42 vs. 22
  misc_feature: MA Experiment 20000113 PARAMETER Experiment Name: At_42deg_Heat_cDNA_P Parameter: Timepoint (hr) Value: 8
  misc_feature: MA Experiment 20000113 PARAMETER Experiment Name: At_42deg_Heat_cDNA_P Parameter: Tissue Value: Aerial
  misc_feature: MA Experiment ID: 20000117 Result: Down-regulated in Transcription
  misc_feature: MA Experiment 20000117 PARAMETER Experiment Name: At_100uM_ABA_Mutants_cDNA_P Parameter: Plant Line Value: Columbia
  misc_feature: MA Experiment 20000117 PARAMETER Experiment Name: At_100uM_ABA_Mutants_cDNA_P Parameter: Timepoint (hr) Value: 6
  misc_feature: MA Experiment 20000117 PARAMETER Experiment Name: At_100uM_ABA_Mutants_cDNA_P Parameter: Tissue Value: Aerial
  misc_feature: MA Experiment 20000117 PARAMETER Experiment Name: At_100uM_ABA_Mutants_cDNA_P Parameter: Treatment Value: 100uM ABA vs. No Treatment
  misc_feature: MA Experiment ID: 20000144 Result: Down-regulated in Transcription
  misc_feature: MA Experiment 20000144 PARAMETER Experiment Name: At_42deg_Heat_cDNA_P Parameter: Temperature (deg C) Value: 42 vs. 22
  misc_feature: MA Experiment 20000144 PARAMETER Experiment Name: At_42deg_Heat_cDNA_P Parameter: Timepoint (hr) Value: 1
  misc_feature: MA Experiment 20000144 PARAMETER Experiment Name: At_42deg_Heat_cDNA_P Parameter: Tissue Value: Aerial
  misc_feature: MA Experiment ID: 20000171 Result: Down-regulated in Transcription
  misc_feature: MA Experiment 20000171 PARAMETER Experiment Name: At_42deg_Heat_P Parameter: Age (day) Value: 14
  misc_feature: MA Experiment 20000171 PARAMETER Experiment Name: At_42deg_Heat_P Parameter: Organism Value: A. thaliana
  misc_feature: MA Experiment 20000171 PARAMETER Experiment Name: At_42deg_Heat_P Parameter: Plant Line Value: WS
  misc_feature: MA Experiment 20000171 PARAMETER Experiment Name: At_42deg_Heat_P Parameter: Temperature (deg C) Value: 42 vs. 22
  misc_feature: MA Experiment 20000171 PARAMETER Experiment Name: At_42deg_Heat_P Parameter: Timepoint (hr) Value: 1
  misc_feature: MA Experiment 20000171 PARAMETER Experiment Name: At_42deg_Heat_P Parameter: Tissue Value: Aerial
  misc_feature: MA Experiment ID: 20000180 Result: Up-regulated in Transcription
  misc_feature: MA Experiment 20000180 PARAMETER Experiment Name: At_Germinating_Seeds_P Parameter: Age (hr) Value: 24 vs. 0
  misc_feature: MA Experiment 20000180 PARAMETER Experiment Name: At_Germinating_Seeds_P Parameter: Tissue Value: Germinating Seeds
  misc_feature: MA Experiment ID: 20000184 Result: Up-regulated in Transcription
  misc_feature: MA Experiment 20000184 PARAMETER Experiment Name: At_Shoots__P Parameter: Age (day) Value: 7
  misc_feature: MA Experiment 20000184 PARAMETER Experiment Name: At_Shoots__P Parameter: Tissue Value: Shoots vs. Whole Plant
  misc_feature: MA Experiment ID: 20000185 Result: Down-regulated in Transcription
  misc_feature: MA Experiment 20000185 PARAMETER Experiment Name: At_Roots__P Parameter: Age (day) Value: 7 vs. 21
  misc_feature: MA Experiment 20000185 PARAMETER Experiment Name: At_Roots__P Parameter: Organism Value: A. thaliana
  misc_feature: MA Experiment 20000185 PARAMETER Experiment Name: At_Roots__P Parameter: Tissue Value: Roots vs. Whole Plant
  misc_feature: MA Experiment ID: 20000224 Result: Up-regulated in Transcription
  misc_feature: MA Experiment ID: 20000234 Result: Up-regulated in Transcription
  misc_feature: MA Experiment 20000234 PARAMETER Experiment Name: At_Siliques_P Parameter: Age (day) Value: 21
  misc_feature: MA Experiment 20000234 PARAMETER Experiment Name: At_Siliques_P Parameter: Organism Value: A. thaliana
  misc_feature: MA Experiment 20000234 PARAMETER Experiment Name: At_Siliques_P Parameter: Plant Line Value: WS
  misc_feature: MA Experiment 20000234 PARAMETER Experiment Name: At_Siliques_P Parameter: Tissue Value: Less Than 5mm Siliques vs. Whole Plant
  misc_feature: MA Experiment ID: 20000235 Result: Up-regulated in Transcription
  misc_feature: MA Experiment 20000235 PARAMETER Experiment Name: At_Siliques_P Parameter: Age (day) Value: 21
  misc_feature: MA Experiment 20000235 PARAMETER Experiment Name: At_Siliques_P Parameter: Organism Value: A. thaliana
  misc_feature: MA Experiment 20000235 PARAMETER Experiment Name: At_Siliques_P Parameter: Plant Line Value: WS
  misc_feature: MA Experiment 20000235 PARAMETER Experiment Name: At_Siliques_P Parameter: Tissue Value: 5-10mm Siliques vs. Whole Plant
  misc_feature: MA Experiment ID: 20000264 Result: Up-regulated in Transcription
  misc_feature: MA Experiment 20000264 PARAMETER Experiment Name: At_Open_Flower_P Parameter: Age (day) Value: 21
  misc_feature: MA Experiment 20000264 PARAMETER Experiment Name: At_Open_Flower_P Parameter: Plant Line Value: WS
  misc_feature: MA Experiment 20000264 PARAMETER Experiment Name: At_Open_Flower_P Parameter: Tissue Value: Open Flower vs. Whole Plant
  misc_feature: MA Experiment ID: 20000265 Result: Up-regulated in Transcription
  misc_feature: MA Experiment 20000265 PARAMETER Experiment Name: At_Open_Flower_P Parameter: Age (day) Value: 21
  misc_feature: MA Experiment 20000265 PARAMETER Experiment Name: At_Open_Flower_P Parameter: Plant Line Value: WS
  misc_feature: MA Experiment 20000265 PARAMETER Experiment Name: At_Open_Flower_P Parameter: Tissue Value: Closed Flower vs. Whole Plant
  misc_feature: MA Experiment ID: 20000286 Result: Up-regulated in Transcription
  misc_feature: MA Experiment 20000286 PARAMETER Experiment Name: At_Open_Flower_P Parameter: Age (day) Value: 21
  misc_feature: MA Experiment 20000286 PARAMETER Experiment Name: At_Open_Flower_P Parameter: Plant Line Value: WS
  misc_feature: MA Experiment 20000286 PARAMETER Experiment Name: At_Open_Flower_P Parameter: Tissue Value: Half Open vs. Whole Plant
  misc_feature: MA Experiment ID: 20000436 Result: Down-regulated in Transcription
  misc_feature: MA Experiment 20000436 PARAMETER Experiment Name: At_Drought_P Parameter: Age (day) Value: 7
  misc_feature: MA Experiment 20000436 PARAMETER Experiment Name: At_Drought_P Parameter: Organism Value: A. thaliana
  misc_feature: MA Experiment 20000436 PARAMETER Experiment Name: At_Drought_P Parameter: Plant Line Value: WS
  misc_feature: MA Experiment 20000436 PARAMETER Experiment Name: At_Drought_P Parameter: Timepoint (hr) Value: 12
  misc_feature: MA Experiment 20000436 PARAMETER Experiment Name: At_Drought_P Parameter: Tissue Value: Whole Plant
  misc_feature: MA Experiment 20000436 PARAMETER Experiment Name: At_Drought_P Parameter: Treatment Value: Drought vs. No Drought
  misc_feature: MA Experiment ID: 20000437 Result: Down-regulated in Transcription
  misc_feature: MA Experiment 20000437 PARAMETER Experiment Name: At_Drought_P Parameter: Age (day) Value: 8
  misc_feature: MA Experiment 20000437 PARAMETER Experiment Name: At_Drought_P Parameter: Organism Value: A. thaliana
  misc_feature: MA Experiment 20000437 PARAMETER Experiment Name: At_Drought_P Parameter: Plant Line Value: WS
  misc_feature: MA Experiment 20000437 PARAMETER Experiment Name: At_Drought_P Parameter: Timepoint (hr) Value: 24
  misc_feature: MA Experiment 20000437 PARAMETER Experiment Name: At_Drought_P Parameter: Tissue Value: Whole Plant
  misc_feature: MA Experiment 20000437 PARAMETER Experiment Name: At_Drought_P Parameter: Treatment Value: Drought vs. No Drought
  misc_feature: MA Experiment ID: 20000439 Result: Down-regulated in Transcription
  misc_feature: MA Experiment 20000439 PARAMETER Experiment Name: At_Roots__P Parameter: Age (day) Value: 14 vs. 21
  misc_feature: MA Experiment 20000439 PARAMETER Experiment Name: At_Roots__P Parameter: Organism Value: A. thaliana
  misc_feature: MA Experiment 20000439 PARAMETER Experiment Name: At_Roots__P Parameter: Tissue Value: Roots vs. Whole Plant
  misc_feature: MA Experiment ID: 20000573 Result: Down-regulated in Transcription
  misc_feature: MA Experiment 20000573 PARAMETER Experiment Name: At_100uM_ABA_Mutants__P Parameter: Organism Value: A. thaliana
  misc_feature: MA Experiment 20000573 PARAMETER Experiment Name: At_100uM_ABA_Mutants__P Parameter: Plant Line Value: CS22 vs. Ler wt
  misc_feature: MA Experiment 20000573 PARAMETER Experiment Name: At_100uM_ABA_Mutants__P Parameter: Timepoint (hr) Value: N/A
  misc_feature: MA Experiment 20000573 PARAMETER Experiment Name: At_100uM_ABA_Mutants__P Parameter: Tissue Value: Whole Plant
  misc_feature: MA Experiment 20000573 PARAMETER Experiment Name: At_100uM_ABA_Mutants__P Parameter: Treatment Value: None
  misc_feature: MA Experiment ID: 20000574 Result: Down-regulated in Transcription
  misc_feature: MA Experiment 20000574 PARAMETER Experiment Name: At_100uM_ABA_Mutants__P Parameter: Organism Value: A. thaliana
  misc_feature: MA Experiment 20000574 PARAMETER Experiment Name: At_100uM_ABA_Mutants__P Parameter: Plant Line Value: CS23 vs. Ler wt
  misc_feature: MA Experiment 20000574 PARAMETER Experiment Name: At_100uM_ABA_Mutants__P Parameter: Timepoint (hr) Value: N/A
  misc_feature: MA Experiment 20000574 PARAMETER Experiment Name: At_100uM_ABA_Mutants__P Parameter: Tissue Value: Whole Plant
  misc_feature: MA Experiment 20000574 PARAMETER Experiment Name: At_100uM_ABA_Mutants__P Parameter: Treatment Value: None
  misc_feature: MA Experiment ID: 20000794 Result: Down-regulated in Transcription
  misc_feature: MA Experiment 20000794 PARAMETER Experiment Name: At_Petals_P Parameter: Age (day) Value: 23-25 days
  misc_feature: MA Experiment 20000794 PARAMETER Experiment Name: At_Petals_P Parameter: Plant Line Value: WS
  misc_feature: MA Experiment 20000794 PARAMETER Experiment Name: At_Petals_P Parameter: Tissue Value: Petals vs. Whole plant
  misc_feature: MA Experiment ID: 20001248 Result: Down-regulated in Transcription
  misc_feature: MA Experiment 20001248 PARAMETER Experiment Name: At_Far-red-induction_P Parameter: Age (day) Value: 7
  misc_feature: MA Experiment 20001248 PARAMETER Experiment Name: At_Far-red-induction_P Parameter: Light Value: Far-red vs. White
  misc_feature: MA Experiment 20001248 PARAMETER Experiment Name: At_Far-red-induction_P Parameter: Organism Value: A. thaliana
  misc_feature: MA Experiment 20001248 PARAMETER Experiment Name: At_Far-red-induction_P Parameter: Plant Line Value: Columbia
  misc_feature: MA Experiment 20001248 PARAMETER Experiment Name: At_Far-red-induction_P Parameter: Timepoint (hr) Value: 4
  misc_feature: MA Experiment 20001248 PARAMETER Experiment Name: At_Far-red-induction_P Parameter: Tissue Value: Whole Plant
  misc_feature: MA Experiment ID: 20001450 Result: Down-regulated in Transcription
  misc_feature: MA Experiment 20001450 PARAMETER Experiment Name: At_Far-red-induction_P Parameter: Age (day) Value: 7
  misc_feature: MA Experiment 20001450 PARAMETER Experiment Name: At_Far-red-induction_P Parameter: Light Value: Far-red vs. White
  misc_feature: MA Experiment 20001450 PARAMETER Experiment Name: At_Far-red-induction_P Parameter: Organism Value: A. thaliana
  misc_feature: MA Experiment 20001450 PARAMETER Experiment Name: At_Far-red-induction_P Parameter: Plant Line Value: Columbia
  misc_feature: MA Experiment 20001450 PARAMETER Experiment Name: At_Far-red-induction_P Parameter: Timepoint (hr) Value: 8
  misc_feature: MA Experiment 20001450 PARAMETER Experiment Name: At_Far-red-induction_P Parameter: Tissue Value: Whole Plant
  misc_feature: MA Experiment ID: 20001451 Result: Down-regulated in Transcription
  misc_feature: MA Experiment 20001451 PARAMETER Experiment Name: At_Far-red-induction_P Parameter: Age (day) Value: 7
  misc_feature: MA Experiment 20001451 PARAMETER Experiment Name: At_Far-red-induction_P Parameter: Light Value: Far-red vs. White
  misc_feature: MA Experiment 20001451 PARAMETER Experiment Name: At_Far-red-induction_P Parameter: Organism Value: A. thaliana
  misc_feature: MA Experiment 20001451 PARAMETER Experiment Name: At_Far-red-induction_P Parameter: Plant Line Value: Columbia
  misc_feature: MA Experiment 20001451 PARAMETER Experiment Name: At_Far-red-induction_P Parameter: Timepoint (hr) Value: 24
  misc_feature: MA Experiment 20001451 PARAMETER Experiment Name: At_Far-red-induction_P Parameter: Tissue Value: Whole Plant
  misc_feature: MA Experiment ID: 20001555 Result: Down-regulated in Transcription
  misc_feature: MA Experiment 20001555 PARAMETER Experiment Name: At_Drought_Soil_Dry_P Parameter: Age (day) Value: 24
  misc_feature: MA Experiment 20001555 PARAMETER Experiment Name: At_Drought_Soil_Dry_P Parameter: Organism Value: A. thaliana
  misc_feature: MA Experiment 20001555 PARAMETER Experiment Name: At_Drought_Soil_Dry_P Parameter: Plant Line Value: WS
  misc_feature: MA Experiment 20001555 PARAMETER Experiment Name: At_Drought_Soil_Dry_P Parameter: Post Timepoint (hr) Value: None
  misc_feature: MA Experiment 20001555 PARAMETER Experiment Name: At_Drought_Soil_Dry_P Parameter: Post-Treatment Value: None
  misc_feature: MA Experiment 20001555 PARAMETER Experiment Name: At_Drought_Soil_Dry_P Parameter: Timepoint (day) Value: 10
  misc_feature: MA Experiment 20001555 PARAMETER Experiment Name: At_Drought_Soil_Dry_P Parameter: Treatment Value: Drought vs. No Drought
  misc_feature: MA Experiment ID: 20001557 Result: Up-regulated in Transcription
  misc_feature: MA Experiment 20001557 PARAMETER Experiment Name: At_Drought_Soil_Dry_P Parameter: Age (day) Value: 27
  misc_feature: MA Experiment 20001557 PARAMETER Experiment Name: At_Drought_Soil_Dry_P Parameter: Organism Value: A. thaliana
  misc_feature: MA Experiment 20001557 PARAMETER Experiment Name: At_Drought_Soil_Dry_P Parameter: Plant Line Value: WS
  misc_feature: MA Experiment 20001557 PARAMETER Experiment Name: At_Drought_Soil_Dry_P Parameter: Post Timepoint (hr) Value: 3
  misc_feature: MA Experiment 20001557 PARAMETER Experiment Name: At_Drought_Soil_Dry_P Parameter: Post-Treatment Value: Re-Water vs. No Drought
  misc_feature: MA Experiment 20001557 PARAMETER Experiment Name: At_Drought_Soil_Dry_P Parameter: Timepoint (day) Value: 13
  misc_feature: MA Experiment 20001557 PARAMETER Experiment Name: At_Drought_Soil_Dry_P Parameter: Treatment Value: Drought vs. No Drought
  misc_feature: MA Experiment ID: 20001558 Result: Up-regulated in Transcription
  misc_feature: MA Experiment 20001558 PARAMETER Experiment Name: At_Drought_Soil_Dry_P Parameter: Age (day) Value: 27
  misc_feature: MA Experiment 20001558 PARAMETER Experiment Name: At_Drought_Soil_Dry_P Parameter: Organism Value: A. thaliana
  misc_feature: MA Experiment 20001558 PARAMETER Experiment Name: At_Drought_Soil_Dry_P Parameter: Plant Line Value: WS
  misc_feature: MA Experiment 20001558 PARAMETER Experiment Name: At_Drought_Soil_Dry_P Parameter: Post Timepoint (hr) Value: 6
  misc_feature: MA Experiment 20001558 PARAMETER Experiment Name: At_Drought_Soil_Dry_P Parameter: Post-Treatment Value: Re-Water vs. No Drought
  misc_feature: MA Experiment 20001558 PARAMETER Experiment Name: At_Drought_Soil_Dry_P Parameter: Timepoint (day) Value: 13
  misc_feature: MA Experiment 20001558 PARAMETER Experiment Name: At_Drought_Soil_Dry_P Parameter: Treatment Value: Drought vs. No Drought
  misc_feature: MA Experiment ID: 20001560 Result: Up-regulated in Transcription
  misc_feature: MA Experiment 20001560 PARAMETER Experiment Name: At_Drought_Soil_Dry_P Parameter: Age (day) Value: 28
  misc_feature: MA Experiment 20001560 PARAMETER Experiment Name: At_Drought_Soil_Dry_P Parameter: Organism Value: A. thaliana
  misc_feature: MA Experiment 20001560 PARAMETER Experiment Name: At_Drought_Soil_Dry_P Parameter: Plant Line Value: WS
  misc_feature: MA Experiment 20001560 PARAMETER Experiment Name: At_Drought_Soil_Dry_P Parameter: Post Timepoint (hr) Value: None
  misc_feature: MA Experiment 20001560 PARAMETER Experiment Name: At_Drought_Soil_Dry_P Parameter: Post-Treatment Value: None
  misc_feature: MA Experiment 20001560 PARAMETER Experiment Name: At_Drought_Soil_Dry_P Parameter: Timepoint (day) Value: 14
  misc_feature: MA Experiment 20001560 PARAMETER Experiment Name: At_Drought_Soil_Dry_P Parameter: Treatment Value: Drought vs. No Drought
  misc_feature: MA Experiment ID: 20001906 Result: Down-regulated in Transcription
  misc_feature: MA Experiment 20001906 PARAMETER Experiment Name: At_Drought_Reproduction_P Parameter: Age (day) Value: 35
  misc_feature: MA Experiment 20001906 PARAMETER Experiment Name: At_Drought_Reproduction_P Parameter: Organism Value: A. thaliana
  misc_feature: MA Experiment 20001906 PARAMETER Experiment Name: At_Drought_Reproduction_P Parameter: Plant Line Value: WS
  misc_feature: MA Experiment 20001906 PARAMETER Experiment Name: At_Drought_Reproduction_P Parameter: Timepoint (day) Value: 5
  misc_feature: MA Experiment 20001906 PARAMETER Experiment Name: At_Drought_Reproduction_P Parameter: Tissue Value: Siliques
  misc_feature: MA Experiment 20001906 PARAMETER Experiment Name: At_Drought_Reproduction_P Parameter: Treatment Value: Drought vs. No Drought
  misc_feature: MA Experiment ID: 20001908 Result: Down-regulated in Transcription
  misc_feature: MA Experiment 20001908 PARAMETER Experiment Name: At_Drought_Reproduction_P Parameter: Age (day) Value: 40
  misc_feature: MA Experiment 20001908 PARAMETER Experiment Name: At_Drought_Reproduction_P Parameter: Organism Value: A. thaliana
  misc_feature: MA Experiment 20001908 PARAMETER Experiment Name: At_Drought_Reproduction_P Parameter: Plant Line Value: WS
  misc_feature: MA Experiment 20001908 PARAMETER Experiment Name: At_Drought_Reproduction_P Parameter: Timepoint (day) Value: 10
  misc_feature: MA Experiment 20001908 PARAMETER Experiment Name: At_Drought_Reproduction_P Parameter: Tissue Value: Siliques
  misc_feature: MA Experiment 20001908 PARAMETER Experiment Name: At_Drought_Reproduction_P Parameter: Treatment Value: Drought vs. No Drought
  misc_feature: MA Experiment ID: 20001911 Result: Down-regulated in Transcription
  misc_feature: MA Experiment 20001911 PARAMETER Experiment Name: At_Drought_Reproduction_P Parameter: Age (day) Value: 40
  misc_feature: MA Experiment 20001911 PARAMETER Experiment Name: At_Drought_Reproduction_P Parameter: Organism Value: A. thaliana
  misc_feature: MA Experiment 20001911 PARAMETER Experiment Name: At_Drought_Reproduction_P Parameter: Plant Line Value: WS
  misc_feature: MA Experiment 20001911 PARAMETER Experiment Name: At_Drought_Reproduction_P Parameter: Timepoint (day) Value: 10
  misc_feature: MA Experiment 20001911 PARAMETER Experiment Name: At_Drought_Reproduction_P Parameter: Tissue Value: Flowers
  misc_feature: MA Experiment 20001911 PARAMETER Experiment Name: At_Drought_Reproduction_P Parameter: Treatment Value: Drought vs. No Drought
cggtggcggccgcactagaactagnggatcccccgggctgcangaattcggcacgagaagttgatgcagaagcaataataacaaaacaaaaaaacattaaaaaaaaaagctcttcagttttggtttctgcagtctccaatggctctcaagctctttctctttgctcttcttctctgtctcccgacttctctctcctccactgcctctaaaggtaaagagaagaagtcgaagtttaatccatacagatacacattcatcgataaagcaagcacattctcatcatcttcctcatcttcattttcatccaacggtcaagattcgtcctacgactacatagtcatcggaggtggaaccgcagggtgtcctctcgccgcaacgttgtcgcagaatttcagcgttcttgttttagagagaggtggcgttccgtttacaaacgcaaacgtttctttcctcaggaattttcacatcggacttgctgacatttcagcttcttccgcgtctcaagcgtttgtttccactgacggcgtttacaacgcccgtgctagagttctcggtggcggttcctgtattaacgccggtttttactccagagccgatgctgcgttcgtgaagcgagcaggatgggatccgaagctggtgaaggagtcgtatccatgggtggagagagagattgttcatcagccaaagttaacgttatggcagaaagctctcagagacagtcttttagaggttggagtcagacctttcaatggtttcacttacgatcacgtttccggaaccaaaatcggcggtacaatattcgacagattcggccgtcgtcacaccgcggcggagcttctcgcttacgctaatcctcagaagcttagagtcttgatctacgccaccgtgcaaaaaatcgtctttgacacttctggaacaaggcctcgagtaacaggagtaatattcaaagatgagaaaggtaatcaacaccaggctttactctcgaatagaaagggaagtgaagtgatcttatctagtggagctattgggtcaccacagatgctgatgttaagtgggattggacctaagaaggagcttcagaggctgaagattcctgtggttttagagaatgagcatgtagggaaaggaatggctgataatcccatgaacacgatcttggtgccttcaaaggcgcctatagagcagtcacttattcagactgttggaattacaaagatgggtgtgtatgttgaagccagtactggctttgggcaatctcctgagagtattcatactcactatgggattatgtcgaacaagaatgaattgttttccaccattcctgcaaagcagagaagaccagaagcaacgcaagcttacatcacaagaaacaaataccaacttcacgaagcattcaatggaagtttcatcttggagaaacttgcttacccgatctctagagggcatttgagcttggtcaacacaaatgttgatgacaacccttcagtcaccttcaattactttaaacacccggtggatctccaacgctgtgttgaagccattcgtcttgtttccaaagtggtgacgtctaaccgtttcttaaactacacgcagtgtgacaagcaaaacgtacacaagatgcttagcttaagcgtcaaggcaaacatcaatctaaggccaaagcaactgaacgataccaaatcaatggctcagttctgcaaagacactgttgtcacaatctggcactaccatggtggatgtcttgtgggtaaagttgtgagccctaaccgcaaagttcttggtgtcgacaggctcagagttattgatggttcaacgtttgacgagtctccaggaaccaacccgcaagctactatgatgatgatgggaagatacatgggagtcaagattcttcgggagagacttggaaacaaagctggtgtttagtttgcagattgagcttttatggtagacaaattcgtagcagataattctgttgtggaattgtgttggagaatatctctctctgtctccttctctgttatttgatattcgattcattgaagtataggatcatattgtctaatgaactgtgtaaccctctattgggcaatcggctctgttgcttattagcttgtgtgaaaagtt

SEQ ID NO: 76779 - protein, 594 aa, Arabidopsis thaliana
  peptide (1)..(594): Ceres Seq. ID no. 11403171
  misc_feature (63)..(328): Pfam Name: GMC oxidoreductase Pfam Description: GMC oxidoreductase
  misc_feature (1)..(594): Homolog of NCBI NO: 11357159 NR Description: adhesion of calyx edges protein ACE [imported] -
  misc_feature (51)..(594): Homolog of NCBI NO: 37572986 NR Description: putative mandelonitrile lyase [Oryza sativa
  misc_feature (41)..(591): Homolog of NCBI NO: 22329512 NR Description: hypothetical protein; protein id: At1g12570.1,
  misc_feature (41)..(591): Homolog of NCBI NO: 17978954 NR Description: At1g12570/T12C24_9 [Arabidopsis thaliana]
  misc_feature (61)..(591): Homolog of NCBI NO: 8778640 NR Description: F5O11.31 [Arabidopsis thaliana]
  misc_feature (61)..(591): Homolog of NCBI NO: 9502391 NR Description: T12C24.11 [Arabidopsis thaliana]
  misc_feature (41)..(591): Homolog of NCBI NO: 15242236 NR Description: mandelonitrile lyase-like protein; protein id: supported by cDNA: gi_14194160 [Arabidopsis thaliana]
  misc_feature (61)..(587): Homolog of NCBI NO: 11358959 NR Description: probable mandelonitrile lyase (EC 4.1.2.10) - rice >gi|7649261|gb|AAF65820.1|AF251031_1 putative
  misc_feature (41)..(577): Homolog of NCBI NO: 10177730 NR Description: mandelonitrile lyase-like protein [Arabidopsis
  misc_feature (59)..(577): Homolog of NCBI NO: 10177728 NR Description: mandelonitrile lyase-like protein [Arabidopsis
MALKLFLFALLLCLPTSLSSTASKGKEKKSKFNPYRYTFIDKASTFSSSSSSSFSSNGQDSSYDYIVIGGGTAGCPLAATLSQNFSVLVLERGGVPFTNANVSFLRNFHIGLADISASSASQAFVSTDGVYNARARVLGGGSCINAGFYSRADAAFVKRAGWDPKLVKESYPWVEREIVHQPKLTLWQKALRDSLLEVGVRPFNGFTYDHVSGTKIGGTIFDRFGRRHTAAELLAYANPQKLRVLIYATVQKIVFDTSGTRPRVTGVIFKDEKGNQHQALLSNRKGSEVILSSGAIGSPQMLMLSGIGPKKELQRLKIPVVLENEHVGKGMADNPMNTILVPSKAPIEQSLIQTVGITKMGVYVEASTGFGQSPESIHTHYGIMSNKNELFSTIPAKQRRPEATQAYITRNKYQLHEAFNGSFILEKLAYPISRGHLSLVNTNVDDNPSVTFNYFKHPVDLQRCVEAIRLVSKVVTSNRFLNYTQCDKQNVHKMLSLSVKANINLRPKQLNDTKSMAQFCKDTVVTIWHYHGGCLVGKVVSPNRKVLGVDRLRVIDGSTFDESPGTNPQATMMMMGRYMGVKILRERLGNKAGV

SEQ ID NO: 76780 - DNA, 1436 bp, Arabidopsis thaliana
  misc_feature (1)..(1436): Ceres Seq. ID no. 11403187
  misc_feature: MA Experiment ID: 108576 Result: Down-regulated in Transcription
  misc_feature: MA Experiment 108576 PARAMETER Experiment Name: At_42deg_Heat_cDNA_P Parameter: Temperature (deg C) Value: 42 vs. 22
  misc_feature: MA Experiment 108576 PARAMETER Experiment Name: At_42deg_Heat_cDNA_P Parameter: Timepoint (hr) Value: 1
  misc_feature: MA Experiment 108576 PARAMETER Experiment Name: At_42deg_Heat_cDNA_P Parameter: Tissue Value: Aerial
  misc_feature: MA Experiment ID: 108577 Result: Down-regulated in Transcription
  misc_feature: MA Experiment 108577 PARAMETER Experiment Name: At_42deg_Heat_cDNA_P Parameter: Temperature (deg C) Value: 42 vs. 22
  misc_feature: MA Experiment 108577 PARAMETER Experiment Name: At_42deg_Heat_cDNA_P Parameter: Timepoint (hr) Value: 6
  misc_feature: MA Experiment 108577 PARAMETER Experiment Name: At_42deg_Heat_cDNA_P Parameter: Tissue Value: Aerial
  misc_feature: MA Experiment ID: 20000144 Result: Down-regulated in Transcription
  misc_feature: MA Experiment 20000144 PARAMETER Experiment Name: At_42deg_Heat_cDNA_P Parameter: Temperature (deg C) Value: 42 vs. 22
  misc_feature: MA Experiment 20000144 PARAMETER Experiment Name: At_42deg_Heat_cDNA_P Parameter: Timepoint (hr) Value: 1
  misc_feature: MA Experiment 20000144 PARAMETER Experiment Name: At_42deg_Heat_cDNA_P Parameter: Tissue Value: Aerial
cggtggcggccgctctagaactagtggatcccccgggctgcaggaattccctttttaggtccaaagatcgagagagaagagaagatttgaaatttttttgttttataaagtttcgtcttaagcgatcgattttttgtgcgaaagattgaaactttttggtaagataattgtgttgtgtggttggatcgtggaggtgggtcttctttggaatggcgcaacaagggcagggaagcatggaccctgccgctctcgatgatatcattcgtcgtttgttggattacagaaaccctaagcctggtaccaaacaggctatgctcaacgagtctgagatccgtcagctttgcatcgtctctagagagatttttcttcaacagcctaaccttcttgagctcgaagctcctatcaagatctgcggtgatattcatggacaatactcagatctattgaggctgtttgagtatggaggcttcccacctacagctaactatttattcttaggagattacgtagacaggggcaagcagagtttggagactatttgtcttctgcttgcttacaaaatcaaataccctgagaacttttttcttctaagaggaaaccacgaatgtgcttctattaacagaatctatggattctatgatgaatgtaaacgtcgattcagtgtgagactctggaaagtgtttacagattcttttaactgtctccctgttgctgctgttatagacgataagatattatgtatgcacggtgccatttctcccgatttgaccaacgtggaacagattaagaacattaagcgacctactgatgttcctgactctggtttgctctgtgatctgctttggtctgatccaagcaaagatgtcaaaggttgggggatgaatgaccgtggagtctcttacacgtttggccctgacaaagtcgcggagtttctaataaagaatgatatggatctcatctgccgtgcccaccaggttgtagaggatggatatgagtttttcgccgatagacagcttgttacgatattttctgctcccaactactgtggtgaatttgacaatgctggtgctatgatgagtgttgatgaaagtttaatgtgctctttccaaattcttaagcctgctgatcgaaagccccggttcttatgaagtaaagagttgaaacctcgcgggaaagaagaggaaaaaggcgatacgaaagcgggagagacatttgaagctccctgagactttgtccggaggccttgcaaaggcaaaaaaacataatttacatgttatatcatcttatttgaactcttgccatttcttttctcaaaacactttatgttcttatgatcttctcctctgactctatatagacagtaaaaaaaagtctgcaaattttcattctttttcaacaaaaaaaaaaaggaattcgatatcaagcttatcgatacc

SEQ ID NO: 76781 - protein, 312 aa, Arabidopsis thaliana
  peptide (1)..(312): Ceres Seq. ID no. 11403188
  misc_feature (63)..(258): Pfam Name: Calcineurin-like phosphoesterase Pfam Description: Calcineurin-like phosphoesterase
  misc_feature (1)..(312): Homolog of NCBI NO: 99751 NR Description: phosphoprotein phosphatase (EC 3.1.3.16) 1A
  misc_feature (1)..(312): Homolog of NCBI NO: 15237829 NR Description: protein phosphatase 1A; protein id: At5g59160.1, by cDNA: gi_166796 [Arabidopsis thaliana] Serine/threonine protein phosphatase PP1 isozyme 2
  misc_feature (1)..(311): Homolog of NCBI NO: 15232651 NR Description: phosphoprotein phosphatase 1, PP1; protein id: supported by cDNA: 32787., supported by cDNA: gi_166802 thaliana] >gi|1346759|sp|P48485|PP15_ARATH Serine/threonine
  misc_feature (9)..(311): Homolog of NCBI NO: 21592807 NR Description: phosphoprotein phosphatase [Arabidopsis thaliana]
  misc_feature (1)..(312): Homolog of NCBI NO: 5917726 NR Description: serine/threonine protein phosphatase 1; PP1
  misc_feature (1)..(312): Homolog of NCBI NO: 11133833 NR Description: Serine/threonine protein phosphatase PP1 isozyme 2
  misc_feature (3)..(312): Homolog of NCBI NO: 11133831 NR Description: Serine/threonine protein phosphatase PP1 isozyme 1
  misc_feature (7)..(312): Homolog of NCBI NO: 1346764 NR Description: SERINE/THREONINE PROTEIN PHOSPHATASE PP1
  misc_feature (4)..(312): Homolog of NCBI NO: 15225576 NR Description: phosphoprotein phosphatase type 1 catalytic protein id: At2g39840.1, supported by cDNA: gi_166800 thaliana] >gi|1346758|sp|P48484|PP14_ARATH Serine/threonine
  misc_feature (4)..(312): Homolog of NCBI NO: 7209508 NR Description: type 1 protein phosphatase-1 [Vicia faba]
MAQQGQGSMDPAALDDIIRRLLDYRNPKPGTKQAMLNESEIRQLCIVSREIFLQQPNLLELEAPIKICGDIHGQYSDLLRLFEYGGFPPTANYLFLGDYVDRGKQSLETICLLLAYKIKYPENFFLLRGNHECASINRIYGFYDECKRRFSVRLWKVFTDSFNCLPVAAVIDDKILCMHGAISPDLTNVEQIKNIKRPTDVPDSGLLCDLLWSDPSKDVKGWGMNDRGVSYTFGPDKVAEFLIKNDMDLICRAHQVVEDGYEFFADRQLVTIFSAPNYCGEFDNAGAMMSVDESLMCSFQILKPADRKPRFL

SEQ ID NO: 76782 - protein, 304 aa, Arabidopsis thaliana
  peptide (1)..(304): Ceres Seq. ID no. 11403189
  misc_feature (55)..(250): Pfam Name: Calcineurin-like phosphoesterase Pfam Description: Calcineurin-like phosphoesterase
  misc_feature (1)..(304): Homolog of NCBI NO: 99751 NR Description: phosphoprotein phosphatase (EC 3.1.3.16) 1A
  misc_feature (1)..(304): Homolog of NCBI NO: 15237829 NR Description: protein phosphatase 1A; protein id: At5g59160.1, by cDNA: gi_166796 [Arabidopsis thaliana] Serine/threonine protein phosphatase PP1 isozyme 2
  misc_feature (1)..(303): Homolog of NCBI NO: 15232651 NR Description: phosphoprotein phosphatase 1, PP1; protein id: supported by cDNA: 32787., supported by cDNA: gi_166802 thaliana] >gi|1346759|sp|P48485|PP15_ARATH Serine/threonine
  misc_feature (1)..(303): Homolog of NCBI NO: 21592807 NR Description: phosphoprotein phosphatase [Arabidopsis thaliana]
  misc_feature (1)..(304): Homolog of NCBI NO: 5917726 NR Description: serine/threonine protein phosphatase 1; PP1
  misc_feature (1)..(304): Homolog of NCBI NO: 11133833 NR Description: Serine/threonine protein phosphatase PP1 isozyme 2
  misc_feature (1)..(304): Homolog of NCBI NO: 11133831 NR Description: Serine/threonine protein phosphatase PP1 isozyme 1
  misc_feature (1)..(304): Homolog of NCBI NO: 1346764 NR Description: SERINE/THREONINE PROTEIN PHOSPHATASE PP1
  misc_feature (1)..(304): Homolog of NCBI NO: 15225576 NR Description: phosphoprotein phosphatase type 1 catalytic protein id: At2g39840.1, supported by cDNA: gi_166800 thaliana] >gi|1346758|sp|P48484|PP14_ARATH Serine/threonine
  misc_feature (1)..(304): Homolog of NCBI NO: 7209508 NR Description: type 1 protein phosphatase-1 [Vicia faba]
MDPAALDDIIRRLLDYRNPKPGTKQAMLNESEIRQLCIVSREIFLQQPNLLELEAPIKICGDIHGQYSDLLRLFEYGGFPPTANYLFLGDYVDRGKQSLETICLLLAYKIKYPENFFLLRGNHECASINRIYGFYDECKRRFSVRLWKVFTDSFNCLPVAAVIDDKILCMHGAISPDLTNVEQIKNIKRPTDVPDSGLLCDLLWSDPSKDVKGWGMNDRGVSYTFGPDKVAEFLIKNDMDLICRAHQVVEDGYEFFADRQLVTIFSAPNYCGEFDNAGAMMSVDESLMCSFQILKPADRKPRFL

SEQ ID NO: 76783 - protein, 278 aa, Arabidopsis thaliana
  peptide (1)..(278): Ceres Seq. ID no. 11403190
  misc_feature (29)..(224): Pfam Name: Calcineurin-like phosphoesterase Pfam Description: Calcineurin-like phosphoesterase
  misc_feature (1)..(278): Homolog of NCBI NO: 99751 NR Description: phosphoprotein phosphatase (EC 3.1.3.16) 1A
  misc_feature (1)..(278): Homolog of NCBI NO: 15237829 NR Description: protein phosphatase 1A; protein id: At5g59160.1, by cDNA: gi_166796 [Arabidopsis thaliana] Serine/threonine protein phosphatase PP1 isozyme 2
  misc_feature (1)..(277): Homolog of NCBI NO: 15232651 NR Description: phosphoprotein phosphatase 1, PP1; protein id: supported by cDNA: 32787., supported by cDNA: gi_166802 thaliana] >gi|1346759|sp|P48485|PP15_ARATH Serine/threonine
  misc_feature (1)..(277): Homolog of NCBI NO: 21592807 NR Description: phosphoprotein phosphatase [Arabidopsis thaliana]
  misc_feature (1)..(278): Homolog of NCBI NO: 5917726 NR Description: serine/threonine protein phosphatase 1; PP1
  misc_feature (1)..(278): Homolog of NCBI NO: 11133833 NR Description: Serine/threonine protein phosphatase PP1 isozyme 2
  misc_feature (1)..(278): Homolog of NCBI NO: 11133831 NR Description: Serine/threonine protein phosphatase PP1 isozyme 1
  misc_feature (1)..(278): Homolog of NCBI NO: 1346764 NR Description: SERINE/THREONINE PROTEIN PHOSPHATASE PP1
  misc_feature (1)..(278): Homolog of NCBI NO: 15225576 NR Description: phosphoprotein phosphatase type 1 catalytic protein id: At2g39840.1, supported by cDNA: gi_166800 thaliana] >gi|1346758|sp|P48484|PP14_ARATH Serine/threonine
  misc_feature (1)..(278): Homolog of NCBI NO: 7209508 NR Description: type 1 protein phosphatase-1 [Vicia faba]
MLNESEIRQLCIVSREIFLQQPNLLELEAPIKICGDIHGQYSDLLRLFEYGGFPPTANYLFLGDYVDRGKQSLETICLLLAYKIKYPENFFLLRGNHECASINRIYGFYDECKRRFSVRLWKVFTDSFNCLPVAAVIDDKILCMHGAISPDLTNVEQIKNIKRPTDVPDSGLLCDLLWSDPSKDVKGWGMNDRGVSYTFGPDKVAEFLIKNDMDLICRAHQVVEDGYEFFADRQLVTIFSAPNYCGEFDNAGAMMSVDESLMCSFQILKPADRKPRFL

SEQ ID NO: 76784 - DNA, 870 bp, Arabidopsis thaliana
  misc_feature (1)..(870): Ceres Seq. ID no. 11438591
  misc_feature: MA Experiment ID: 108462 Result: Up-regulated in Transcription
  misc_feature: MA Experiment 108462 PARAMETER Experiment Name: At_Germinating_Seeds_cDNA_P Parameter: Age (day) Value: 2 vs. 0
  misc_feature: MA Experiment 108462 PARAMETER Experiment Name: At_Germinating_Seeds_cDNA_P Parameter: Tissue Value: Germinating Seeds
  misc_feature: MA Experiment ID: 108464 Result: Up-regulated in Transcription
  misc_feature: MA Experiment 108464 PARAMETER Experiment Name: At_Germinating_Seeds_cDNA_P Parameter: Age (day) Value: 4 vs. 0
  misc_feature: MA Experiment 108464 PARAMETER Experiment Name: At_Germinating_Seeds_cDNA_P Parameter: Tissue Value: Germinating Seeds
  misc_feature: MA Experiment ID: 108488 Result: Up-regulated in Transcription
  misc_feature: MA Experiment ID: 20000111 Result: Up-regulated in Transcription
  misc_feature: MA Experiment 20000111 PARAMETER Experiment Name: At_42deg_Heat_cDNA_P Parameter: Temperature (deg C) Value: 42 vs. 22
  misc_feature: MA Experiment 20000111 PARAMETER Experiment Name: At_42deg_Heat_cDNA_P Parameter: Timepoint (hr) Value: 6
  misc_feature: MA Experiment 20000111 PARAMETER Experiment Name: At_42deg_Heat_cDNA_P Parameter: Tissue Value: Aerial
atggccgcctccacaatggctctctcctcccctgccttcgccggaaaggctgtgaacctttcccccgcggcatctgaagtcctcggaagcggccgtgtgacaatgaggaagactgttgccaagccaaagggtccatcaggcagcccatggtacggatccgaccgagtcaagtacttgggtccattctctggcgagtcaccgagctaccttaccggagagttccccggagactacggatgggacaccgctggactttcagctgatcccgagacattcgcaaggaaccgtgagctagaagttatccacagcaggtgggctatgctcggagccctaggctgcgtcttccctgagcttttggctaggaacggagtcaagttcggagaggcggtttggttcaaggccggttcacagatctttagcgatggaggactcgattacttgggaaaccctagcttggtccacgctcagagcattttggccatttgggccactcaagttatcttgatgggagctgttgaaggctacagagtcgcaggaaatgagccgttgggagaggccgaggacttgctttaccccggtggcagcttcgacccattgggtcttgctaccgacccagaggctttcgcggagttgaaggtgaaggagctcaagaacggaagattggctatgttctctatgtttggattcttcgttcaagccattgtcactggtaagggaccgatagagaaccttgctgaccatttggccgatccagtcaacaacaacgcatgggccttcgcaaccaactttgttcccggaaagtgagccaagttttatcagtttgtattttgcttttctttcagtcttttgaattcgagtgagagacatgag

SEQ ID NO: 76785 - protein, 267 aa, Arabidopsis thaliana
  peptide (1)..(267): Ceres Seq. ID no. 11438592
  misc_feature (65)..(234): Pfam Name: Chlorophyll A-B binding protein Pfam Description: Chlorophyll A-B binding protein
  misc_feature (1)..(267): Homolog of NCBI NO: 17473828 NR Description: chlorophyll a/b-binding protein [Arabidopsis
  misc_feature (1)..(267): Homolog of NCBI NO: 18397286 NR Description: photosystem II type I chlorophyll a /b binding putative; protein id: At1g29910.1, supported by cDNA: gi_17473827
  misc_feature (1)..(267): Homolog of NCBI NO: 15220615 NR Description: light-harvesting chlorophyll a/b binding protein; id: At1g29930.1, supported by cDNA: gi_15010743, supported by
  misc_feature (1)..(267): Homolog of NCBI NO: 18403546 NR Description: photosystem II type I chlorophyll a /b binding protein id: At2g34420.1, supported by cDNA: gi_13926259, by cDNA: gi_14517451, supported by cDNA: gi_15027898, supported
  misc_feature (1)..(267): Homolog of NCBI NO: 115778 NR Description: Chlorophyll A-B binding protein 1, chloroplast
  misc_feature (1)..(267): Homolog of NCBI NO: 18403549 NR Description: photosystem II type I chlorophyll a /b binding protein id: At2g34430.1, supported by cDNA: 23727., supported by
  misc_feature (1)..(267): Homolog of NCBI NO: 18266039 NR Description: chlorophyll a/b binding protein [Brassica
  misc_feature (1)..(267): Homolog of NCBI NO: 21592428 NR Description: putative photosystem II type I chlorophyll a b
  misc_feature (20)..(267): Homolog of NCBI NO: 12324161 NR Description: chlorophyll A-B-binding protein 2 precursor, 5'
  misc_feature (1)..(267): Homolog of NCBI NO: 115819 NR Description: Chlorophyll A-B binding protein 1B, chloroplast
MAASTMALSSPAFAGKAVNLSPAASEVLGSGRVTMRKTVAKPKGPSGSPWYGSDRVKYLGPFSGESPSYLTGEFPGDYGWDTAGLSADPETFARNRELEVIHSRWAMLGALGCVFPELLARNGVKFGEAVWFKAGSQIFSDGGLDYLGNPSLVHAQSILAIWATQVILMGAVEGYRVAGNEPLGEAEDLLYPGGSFDPLGLATDPEAFAELKVKELKNGRLAMFSMFGFFVQAIVTGKGPIENLADHLADPVNNNAWAFATNFVPGK

SEQ ID NO: 76786 - protein, 262 aa, Arabidopsis thaliana
  peptide (1)..(262): Ceres Seq. ID no. 11438593
  misc_feature (60)..(229): Pfam Name: Chlorophyll A-B binding protein Pfam Description: Chlorophyll A-B binding protein
  misc_feature (1)..(262): Homolog of NCBI NO: 17473828 NR Description: chlorophyll a/b-binding protein [Arabidopsis
  misc_feature (1)..(262): Homolog of NCBI NO: 18397286 NR Description: photosystem II type I chlorophyll a /b binding putative; protein id: At1g29910.1, supported by cDNA: gi_17473827
  misc_feature (1)..(262): Homolog of NCBI NO: 15220615 NR Description: light-harvesting chlorophyll a/b binding protein; id: At1g29930.1, supported by cDNA: gi_15010743, supported by
  misc_feature (1)..(262): Homolog of NCBI NO: 18403546 NR Description: photosystem II type I chlorophyll a /b binding protein id: At2g34420.1, supported by cDNA: gi_13926259, by cDNA: gi_14517451, supported by cDNA: gi_15027898, supported
  misc_feature (1)..(262): Homolog of NCBI NO: 115778 NR Description: Chlorophyll A-B binding protein 1, chloroplast
  misc_feature (1)..(262): Homolog of NCBI NO: 18403549 NR Description: photosystem II type I chlorophyll a /b binding protein id: At2g34430.1, supported by cDNA: 23727., supported by
  misc_feature (1)..(262): Homolog of NCBI NO: 18266039 NR Description: chlorophyll a/b binding protein [Brassica
  misc_feature (1)..(262): Homolog of NCBI NO: 21592428 NR Description: putative photosystem II type I chlorophyll a b
  misc_feature (15)..(262): Homolog of NCBI NO: 12324161 NR Description: chlorophyll A-B-binding protein 2 precursor, 5'
  misc_feature (1)..(262): Homolog of NCBI NO: 115819 NR Description: Chlorophyll A-B binding protein 1B, chloroplast
MALSSPAFAGKAVNLSPAASEVLGSGRVTMRKTVAKPKGPSGSPWYGSDRVKYLGPFSGESPSYLTGEFPGDYGWDTAGLSADPETFARNRELEVIHSRWAMLGALGCVFPELLARNGVKFGEAVWFKAGSQIFSDGGLDYLGNPSLVHAQSILAIWATQVILMGAVEGYRVAGNEPLGEAEDLLYPGGSFDPLGLATDPEAFAELKVKELKNGRLAMFSMFGFFVQAIVTGKGPIENLADHLADPVNNNAWAFATNFVPGK

SEQ ID NO: 76787 - protein, 233 aa, Arabidopsis thaliana
  peptide (1)..(233): Ceres Seq. ID no. 11438594
  misc_feature (31)..(200): Pfam Name: Chlorophyll A-B binding protein Pfam Description: Chlorophyll A-B binding protein
  misc_feature (1)..(233): Homolog of NCBI NO: 17473828 NR Description: chlorophyll a/b-binding protein [Arabidopsis
  misc_feature (1)..(233): Homolog of NCBI NO: 18397286 NR Description: photosystem II type I chlorophyll a /b binding putative; protein id: At1g29910.1, supported by cDNA: gi_17473827
  misc_feature (1)..(233): Homolog of NCBI NO: 15220615 NR Description: light-harvesting chlorophyll a/b binding protein; id: At1g29930.1, supported by cDNA: gi_15010743, supported by
  misc_feature (1)..(233): Homolog of NCBI NO: 18403546 NR Description: photosystem II type I chlorophyll a /b binding protein id: At2g34420.1, supported by cDNA: gi_13926259, by cDNA: gi_14517451, supported by cDNA: gi_15027898, supported
  misc_feature (1)..(233): Homolog of NCBI NO: 115778 NR Description: Chlorophyll A-B binding protein 1, chloroplast
  misc_feature (1)..(233): Homolog of NCBI NO: 18403549 NR Description: photosystem II type I chlorophyll a /b binding protein id: At2g34430.1, supported by cDNA: 23727., supported by
  misc_feature (1)..(233): Homolog of NCBI NO: 18266039 NR Description: chlorophyll a/b binding protein [Brassica
  misc_feature (1)..(233): Homolog of NCBI NO: 21592428 NR Description: putative photosystem II type I chlorophyll a b
  misc_feature (1)..(233): Homolog of NCBI NO: 12324161 NR Description: chlorophyll A-B-binding protein 2 precursor, 5'
  misc_feature (1)..(233): Homolog of NCBI NO: 115819 NR Description: Chlorophyll A-B binding protein 1B, chloroplast
MRKTVAKPKGPSGSPWYGSDRVKYLGPFSGESPSYLTGEFPGDYGWDTAGLSADPETFARNRELEVIHSRWAMLGALGCVFPELLARNGVKFGEAVWFKAGSQIFSDGGLDYLGNPSLVHAQSILAIWATQVILMGAVEGYRVAGNEPLGEAEDLLYPGGSFDPLGLATDPEAFAELKVKELKNGRLAMFSMFGFFVQAIVTGKGPIENLADHLADPVNNNAWAFATNFVPGK

SEQ ID NO: 76788 - DNA, 942 bp, Arabidopsis thaliana
  misc_feature (1)..(942): Ceres Seq. ID no. 11438660
  misc_feature: MA Experiment ID: 20000171 Result: Up-regulated in Transcription
  misc_feature: MA Experiment 20000171 PARAMETER Experiment Name: At_42deg_Heat_P Parameter: Age (day) Value: 14
  misc_feature: MA Experiment 20000171 PARAMETER Experiment Name: At_42deg_Heat_P Parameter: Organism Value: A. thaliana
  misc_feature: MA Experiment 20000171 PARAMETER Experiment Name: At_42deg_Heat_P Parameter: Plant Line Value: WS
  misc_feature: MA Experiment 20000171 PARAMETER Experiment Name: At_42deg_Heat_P Parameter: Temperature (deg C) Value: 42 vs. 22
  misc_feature: MA Experiment 20000171 PARAMETER Experiment Name: At_42deg_Heat_P Parameter: Timepoint (hr) Value: 1
  misc_feature: MA Experiment 20000171 PARAMETER Experiment Name: At_42deg_Heat_P Parameter: Tissue Value: Aerial
  misc_feature: MA Experiment ID: 20000173 Result: Up-regulated in Transcription
  misc_feature: MA Experiment 20000173 PARAMETER Experiment Name: At_42deg_Heat_P Parameter: Age (day) Value: 14
  misc_feature: MA Experiment 20000173 PARAMETER Experiment Name: At_42deg_Heat_P Parameter: Organism Value: A. thaliana
  misc_feature: MA Experiment 20000173 PARAMETER Experiment Name: At_42deg_Heat_P Parameter: Plant Line Value: WS
  misc_feature: MA Experiment 20000173 PARAMETER Experiment Name: At_42deg_Heat_P Parameter: Temperature (deg C) Value: 42 vs. 22
  misc_feature: MA Experiment 20000173 PARAMETER Experiment Name: At_42deg_Heat_P Parameter: Timepoint (hr) Value: 6
  misc_feature: MA Experiment 20000173 PARAMETER Experiment Name: At_42deg_Heat_P Parameter: Tissue Value: Aerial
  misc_feature: MA Experiment ID: 20000180 Result: Down-regulated in Transcription
  misc_feature: MA Experiment 20000180 PARAMETER Experiment Name: At_Germinating_Seeds_P Parameter: Age (hr) Value: 24 vs. 0
  misc_feature: MA Experiment 20000180 PARAMETER Experiment Name: At_Germinating_Seeds_P Parameter: Tissue Value: Germinating Seeds
  misc_feature: MA Experiment ID: 20001247 Result: Down-regulated in Transcription
  misc_feature: MA Experiment 20001247 PARAMETER Experiment Name: At_Far-red-induction_P Parameter: Age (day) Value: 7
  misc_feature: MA Experiment 20001247 PARAMETER Experiment Name: At_Far-red-induction_P Parameter: Light Value: Far-red vs. White
  misc_feature: MA Experiment 20001247 PARAMETER Experiment Name: At_Far-red-induction_P Parameter: Organism Value: A. thaliana
  misc_feature: MA Experiment 20001247 PARAMETER Experiment Name: At_Far-red-induction_P Parameter: Plant Line Value: Columbia
  misc_feature: MA Experiment 20001247 PARAMETER Experiment Name: At_Far-red-induction_P Parameter: Timepoint (hr) Value: 1
  misc_feature: MA Experiment 20001247 PARAMETER Experiment Name: At_Far-red-induction_P Parameter: Tissue Value: Whole Plant
  misc_feature: MA Experiment ID: 20001556 Result: Up-regulated in Transcription
  misc_feature: MA Experiment 20001556 PARAMETER Experiment Name: At_Drought_Soil_Dry_P Parameter: Age (day) Value: 26
  misc_feature: MA Experiment 20001556 PARAMETER Experiment Name: At_Drought_Soil_Dry_P Parameter: Organism Value: A. thaliana
  misc_feature: MA Experiment 20001556 PARAMETER Experiment Name: At_Drought_Soil_Dry_P Parameter: Plant Line Value: WS
  misc_feature: MA Experiment 20001556 PARAMETER Experiment Name: At_Drought_Soil_Dry_P Parameter: Post Timepoint (hr) Value: None
  misc_feature: MA Experiment 20001556 PARAMETER Experiment Name: At_Drought_Soil_Dry_P Parameter: Post-Treatment Value: None
  misc_feature: MA Experiment 20001556 PARAMETER Experiment Name: At_Drought_Soil_Dry_P Parameter: Timepoint (day) Value: 12
  misc_feature: MA Experiment 20001556 PARAMETER Experiment Name: At_Drought_Soil_Dry_P Parameter: Treatment Value: Drought vs. No Drought
  misc_feature: MA Experiment ID: 20001558 Result: Up-regulated in Transcription
  misc_feature: MA Experiment 20001558 PARAMETER Experiment Name: At_Drought_Soil_Dry_P Parameter: Age (day) Value: 27
  misc_feature: MA Experiment 20001558 PARAMETER Experiment Name: At_Drought_Soil_Dry_P Parameter: Organism Value: A. thaliana
  misc_feature: MA Experiment 20001558 PARAMETER Experiment Name: At_Drought_Soil_Dry_P Parameter: Plant Line Value: WS
  misc_feature: MA Experiment 20001558 PARAMETER Experiment Name: At_Drought_Soil_Dry_P Parameter: Post Timepoint (hr) Value: 6
  misc_feature: MA Experiment 20001558 PARAMETER Experiment Name: At_Drought_Soil_Dry_P Parameter: Post-Treatment Value: Re-Water vs. No Drought
  misc_feature: MA Experiment 20001558 PARAMETER Experiment Name: At_Drought_Soil_Dry_P Parameter: Timepoint (day) Value: 13
  misc_feature: MA Experiment 20001558 PARAMETER Experiment Name: At_Drought_Soil_Dry_P Parameter: Treatment Value: Drought vs. No Drought
  misc_feature: MA Experiment ID: 20001757 Result: Up-regulated in Transcription
  misc_feature: MA Experiment 20001757 PARAMETER Experiment Name: At_50mM_NH4NO3_L-to-H_P Parameter: Timepoint (hr) Value: 6
  misc_feature: MA Experiment 20001757 PARAMETER Experiment Name: At_50mM_NH4NO3_L-to-H_P Parameter: Tissue Value: Leaf
  misc_feature: MA Experiment 20001757 PARAMETER Experiment Name: At_50mM_NH4NO3_L-to-H_P Parameter: Treatment Value: 50mM NH4NO3 vs 100mM Mannitol
atggatttctccaaagaggaaactcctaagtctccagaagaaatggtcgctgcttatgaagaaacttgcgcccaaggacttggcatcagcgtggaagaggctaagcaaaggatgtatgcttgtagcacaactacttaccaaggatttcaagcaatcatgactgaacaagaatcagaaaagttcaaggatctacccggagtggttttcatcttgccagattcctacattgatccccagaacaaagagtatggaggagataaatacgagaatggagtgataacacacaggccaccaccgattcagagtggcagagcaagacctcgtcctagatttgaccgttcaggaggaggaagtggtggtccccaaaacttccaaagaaacacacagtatggtcagcaaccaccaatgcaaggtggtggagggagctatggtcctcaacagggctatgccactccaggacaaggtcagggaactcaagcgcctccaccatttcaaggaggttataaccaaggcccgagatctccaccacctccatatcaggcaggttacaatcaaggccagggatctccagtgcctccatatcaggcaggttacaatcaagtccagggatctccagtgcctccataccaaggaacacaaagcagttacggtcaaggtggatctgggaactatagtcaagggccacaaggtggttacaaccaaggaggacctaggaattacaatccacagggagctggaaactttggtcctgcatctggagctggaaacttaggtcctgcacctggagctggaaatcctggctatggtcaggggtattctggaccaggacaagagcagaatcagacattcccacaggcagatcagaggaatcgagactggaacaacaataatccagcaggccagcccgggtctgaccaatttccacagggaagaaggtactag

SEQ ID NO: 76789 - protein, 313 aa, Arabidopsis thaliana
  peptide (1)..(313): Ceres Seq. ID no. 11438661
  misc_feature (98)..(306): Pfam Name: High molecular weight glutenin subunit Pfam Description: High molecular weight glutenin subunit
  misc_feature (1)..(306): Homolog of NCBI NO: 15235263 NR Description: DAG-like protein; protein id: At4g20020.1
  misc_feature (136)..(313): Homolog of NCBI NO: 19310564 NR Description: putative DAG protein [Arabidopsis thaliana]
  misc_feature (1)..(310): Homolog of NCBI NO: 15241580 NR Description: unknown protein; protein id: At5g44780.1 thaliana] >gi|2660672|gb|AAC79143.1| similar to pMS10 protein thaliana] >gi|9758382|dbj|BAB08831.1| gene_id:K23L20.12~unknown
  misc_feature (13)..(296): Homolog of NCBI NO: 18400602 NR Description: expressed protein; protein id: At3g15000.1, by cDNA: gi_16226542 [Arabidopsis thaliana] Unknown mitochondrial protein At3g15000
  misc_feature (13)..(311): Homolog of NCBI NO: 15219250 NR Description: plastid protein, putative; protein id: [Arabidopsis thaliana] >gi|7769870|gb|AAF69548.1|AC008007_23
  misc_feature (71)..(311): Homolog of NCBI NO: 15241580 NR Description: unknown protein; protein id: At5g44780.1 thaliana] >gi|2660672|gb|AAC79143.1| similar to pMS10 protein thaliana] >gi|9758382|dbj|BAB08831.1| gene_id:K23L20.12~unknown
  misc_feature (1)..(106): Homolog of NCBI NO: 6014904 NR Description: DAG PROTEIN, CHLOROPLAST PRECURSOR
  misc_feature (1)..(134): Homolog of NCBI NO: 15220382 NR Description: DAG protein, putative; protein id: At1g11430.1, by cDNA: 35647. [Arabidopsis thaliana] T23J18.10 [Arabidopsis thaliana] >gi|26450103|dbj|BAC42171.1|
  misc_feature (1)..(134): Homolog of NCBI NO: 21593052 NR Description: DAG protein, putative [Arabidopsis thaliana]
  misc_feature (98)..(285): Homolog of NCBI NO: 15241580 NR Description: unknown protein; protein id: At5g44780.1 thaliana] >gi|2660672|gb|AAC79143.1| similar to pMS10 protein thaliana] >gi|9758382|dbj|BAB08831.1| gene_id:K23L20.12~unknown
MDFSKEETPKSPEEMVAAYEETCAQGLGISVEEAKQRMYACSTTTYQGFQAIMTEQESEKFKDLPGVVFILPDSYIDPQNKEYGGDKYENGVITHRPPPIQSGRARPRPRFDRSGGGSGGPQNFQRNTQYGQQPPMQGGGGSYGPQQGYATPGQGQGTQAPPPFQGGYNQGPRSPPPPYQAGYNQGQGSPVPPYQAGYNQVQGSPVPPYQGTQSSYGQGGSGNYSQGPQGGYNQGGPRNYNPQGAGNFGPASGAGNLGPAPGAGNPGYGQGYSGPGQEQNQTFPQADQRNRDWNNNNPAGQPGSDQFPQGRRY

SEQ ID NO: 76790 - protein, 299 aa, Arabidopsis thaliana
  peptide (1)..(299): Ceres Seq. ID no. 11438662
  misc_feature (84)..(292): Pfam Name: High molecular weight glutenin subunit Pfam Description: High molecular weight glutenin subunit
  misc_feature (1)..(292): Homolog of NCBI NO: 15235263 NR Description: DAG-like protein; protein id: At4g20020.1
  misc_feature (122)..(299): Homolog of NCBI NO: 19310564 NR Description: putative DAG protein [Arabidopsis thaliana]
  misc_feature (1)..(296): Homolog of NCBI NO: 15241580 NR Description: unknown protein; protein id: At5g44780.1 thaliana] >gi|2660672|gb|AAC79143.1| similar to pMS10 protein thaliana] >gi|9758382|dbj|BAB08831.1| gene_id:K23L20.12~unknown
  misc_feature (1)..(282): Homolog of NCBI NO: 18400602 NR Description: expressed protein; protein id: At3g15000.1, by cDNA: gi_16226542 [Arabidopsis thaliana] Unknown mitochondrial protein At3g15000
  misc_feature (1)..(297): Homolog of NCBI NO: 15219250 NR Description: plastid protein, putative; protein id: [Arabidopsis thaliana] >gi|7769870|gb|AAF69548.1|AC008007_23
  misc_feature (57)..(297): Homolog of NCBI NO: 15241580 NR Description: unknown protein; protein id: At5g44780.1 thaliana] >gi|2660672|gb|AAC79143.1| similar to pMS10 protein thaliana] >gi|9758382|dbj|BAB08831.1| gene_id:K23L20.12~unknown
  misc_feature (1)..(92): Homolog of NCBI NO: 6014904 NR Description: DAG PROTEIN, CHLOROPLAST PRECURSOR
  misc_feature (1)..(120): Homolog of NCBI NO: 15220382 NR Description: DAG protein, putative; protein id: At1g11430.1, by cDNA: 35647. [Arabidopsis thaliana] T23J18.10 [Arabidopsis thaliana] >gi|26450103|dbj|BAC42171.1|
  misc_feature (1)..(120): Homolog of NCBI NO: 21593052 NR Description: DAG protein, putative [Arabidopsis thaliana]
  misc_feature (84)..(271): Homolog of NCBI NO: 15241580 NR Description: unknown protein; protein id: At5g44780.1 thaliana] >gi|2660672|gb|AAC79143.1| similar to pMS10 protein thaliana] >gi|9758382|dbj|BAB08831.1| gene_id:K23L20.12~unknown
MVAAYEETCAQGLGISVEEAKQRMYACSTTTYQGFQAIMTEQESEKFKDLPGVVFILPDSYIDPQNKEYGGDKYENGVITHRPPPIQSGRARPRPRFDRSGGGSGGPQNFQRNTQYGQQPPMQGGGGSYGPQQGYATPGQGQGTQAPPPFQGGYNQGPRSPPPPYQAGYNQGQGSPVPPYQAGYNQVQGSPVPPYQGTQSSYGQGGSGNYSQGPQGGYNQGGPRNYNPQGAGNFGPASGAGNLGPAPGAGNPGYGQGYSGPGQEQNQTFPQADQRNRDWNNNNPAGQPGSDQFPQGRRY

SEQ ID NO: 76791 - protein, 276 aa, Arabidopsis thaliana
  peptide (1)..(276): Ceres Seq. ID no. 11438663
  misc_feature (61)..(269): Pfam Name: High molecular weight glutenin subunit Pfam Description: High molecular weight glutenin subunit
  misc_feature (1)..(269): Homolog of NCBI NO: 15235263 NR Description: DAG-like protein; protein id: At4g20020.1
  misc_feature (99)..(276): Homolog of NCBI NO: 19310564 NR Description: putative DAG protein [Arabidopsis thaliana]
  misc_feature (1)..(273): Homolog of NCBI NO: 15241580 NR Description: unknown protein; protein id: At5g44780.1 thaliana] >gi|2660672|gb|AAC79143.1| similar to pMS10 protein thaliana] >gi|9758382|dbj|BAB08831.1| gene_id:K23L20.12~unknown
  misc_feature (1)..(259): Homolog of NCBI NO: 18400602 NR Description: expressed protein; protein id: At3g15000.1, by cDNA: gi_16226542 [Arabidopsis thaliana] Unknown mitochondrial protein At3g15000
  misc_feature (1)..(274): Homolog of NCBI NO: 15219250 NR Description: plastid protein, putative; protein id: [Arabidopsis thaliana] >gi|7769870|gb|AAF69548.1|AC008007_23
  misc_feature (34)..(274): Homolog of NCBI NO: 15241580 NR Description: unknown protein; protein id: At5g44780.1 thaliana] >gi|2660672|gb|AAC79143.1| similar to pMS10 protein thaliana] >gi|9758382|dbj|BAB08831.1| gene_id:K23L20.12~unknown
  misc_feature (1)..(69): Homolog of NCBI NO: 6014904 NR Description: DAG PROTEIN, CHLOROPLAST PRECURSOR
  misc_feature (1)..(97): Homolog of NCBI NO: 15220382 NR Description: DAG protein, putative; protein id: At1g11430.1, by cDNA: 35647. [Arabidopsis thaliana] T23J18.10 [Arabidopsis thaliana] >gi|26450103|dbj|BAC42171.1|
  misc_feature (1)..(97): Homolog of NCBI NO: 21593052 NR Description: DAG protein, putative [Arabidopsis thaliana]
  misc_feature (61)..(248): Homolog of NCBI NO: 15241580 NR Description: unknown protein; protein id: At5g44780.1 thaliana] >gi|2660672|gb|AAC79143.1| similar to pMS10 protein thaliana] >gi|9758382|dbj|BAB08831.1| gene_id:K23L20.12~unknown
MYACSTTTYQGFQAIMTEQESEKFKDLPGVVFILPDSYIDPQNKEYGGDKYENGVITHRPPPIQSGRARPRPRFDRSGGGSGGPQNFQRNTQYGQQPPMQGGGGSYGPQQGYATPGQGQGTQAPPPFQGGYNQGPRSPPPPYQAGYNQGQGSPVPPYQAGYNQVQGSPVPPYQGTQSSYGQGGSGNYSQGPQGGYNQGGPRNYNPQGAGNFGPASGAGNLGPAPGAGNPGYGQGYSGPGQEQNQTFPQADQRNRDWNNNNPAGQPGSDQFPQGRRY

SEQ ID NO: 76792 - DNA, 974 bp, Arabidopsis thaliana
  misc_feature (1)..(974): Ceres Seq. ID no. 12322564
  misc_feature: MA Experiment ID: 108434 Result: Up-regulated in Transcription
  misc_feature: MA Experiment 108434 PARAMETER Experiment Name: At_Root_Tips_cDNA_P Parameter: Tissue Value: Root Tips
  misc_feature: MA Experiment ID: 108462 Result: Down-regulated in Transcription
  misc_feature: MA Experiment 108462 PARAMETER Experiment Name: At_Germinating_Seeds_cDNA_P Parameter: Age (day) Value: 2 vs. 0
  misc_feature: MA Experiment 108462 PARAMETER Experiment Name: At_Germinating_Seeds_cDNA_P Parameter: Tissue Value: Germinating Seeds
  misc_feature: MA Experiment ID: 108463 Result: Down-regulated in Transcription
  misc_feature: MA Experiment 108463 PARAMETER Experiment Name: At_Germinating_Seeds_cDNA_P Parameter: Age (day) Value: 3 vs. 0
  misc_feature: MA Experiment 108463 PARAMETER Experiment Name: At_Germinating_Seeds_cDNA_P Parameter: Tissue Value: Germinating Seeds
  misc_feature: MA Experiment ID: 108464 Result: Down-regulated in Transcription
  misc_feature: MA Experiment 108464 PARAMETER Experiment Name: At_Germinating_Seeds_cDNA_P Parameter: Age (day) Value: 4 vs. 0
  misc_feature: MA Experiment 108464 PARAMETER Experiment Name: At_Germinating_Seeds_cDNA_P Parameter: Tissue Value: Germinating Seeds
  misc_feature: MA Experiment ID: 20000111 Result: Up-regulated in Transcription
  misc_feature: MA Experiment 20000111 PARAMETER Experiment Name: At_42deg_Heat_cDNA_P Parameter: Temperature (deg C) Value: 42 vs. 22
  misc_feature: MA Experiment 20000111 PARAMETER Experiment Name: At_42deg_Heat_cDNA_P Parameter: Timepoint (hr) Value: 6
  misc_feature: MA Experiment 20000111 PARAMETER Experiment Name: At_42deg_Heat_cDNA_P Parameter: Tissue Value: Aerial
  misc_feature: MA Experiment ID: 20000113 Result: Up-regulated in Transcription
  misc_feature: MA Experiment 20000113 PARAMETER Experiment Name: At_42deg_Heat_cDNA_P Parameter: Temperature (deg C) Value: 42 vs. 22
  misc_feature: MA Experiment 20000113 PARAMETER Experiment Name: At_42deg_Heat_cDNA_P Parameter: Timepoint (hr) Value: 8
  misc_feature: MA Experiment 20000113 PARAMETER Experiment Name: At_42deg_Heat_cDNA_P Parameter: Tissue Value: Aerial
  misc_feature: MA Experiment ID: 20000224 Result: Down-regulated in Transcription
  misc_feature: MA Experiment ID: 20000794 Result: Down-regulated in Transcription
  misc_feature: MA Experiment 20000794 PARAMETER Experiment Name: At_Petals_P Parameter: Age (day) Value: 23-25 days
  misc_feature: MA Experiment 20000794 PARAMETER Experiment Name: At_Petals_P Parameter: Plant Line Value: WS
  misc_feature: MA Experiment 20000794 PARAMETER Experiment Name: At_Petals_P Parameter: Tissue Value: Petals vs. Whole plant
  misc_feature: MA Experiment ID: 20001557 Result: Up-regulated in Transcription
  misc_feature: MA Experiment 20001557 PARAMETER Experiment Name: At_Drought_Soil_Dry_P Parameter: Age (day) Value: 27
  misc_feature: MA Experiment 20001557 PARAMETER Experiment Name: At_Drought_Soil_Dry_P Parameter: Organism Value: A. thaliana
  misc_feature: MA Experiment 20001557 PARAMETER Experiment Name: At_Drought_Soil_Dry_P Parameter: Plant Line Value: WS
  misc_feature: MA Experiment 20001557 PARAMETER Experiment Name: At_Drought_Soil_Dry_P Parameter: Post Timepoint (hr) Value: 3
  misc_feature: MA Experiment 20001557 PARAMETER Experiment Name: At_Drought_Soil_Dry_P Parameter: Post-Treatment Value: Re-Water vs. No Drought
  misc_feature: MA Experiment 20001557 PARAMETER Experiment Name: At_Drought_Soil_Dry_P Parameter: Timepoint (day) Value: 13
  misc_feature: MA Experiment 20001557 PARAMETER Experiment Name: At_Drought_Soil_Dry_P Parameter: Treatment Value: Drought vs. No Drought
ccactacgtctctctctcttgctctccctcttcaagtcggctcctttattgctacagtgaaaaagtttcgagctttagaaacaatggcggctttccccaacctcaactctggctccggattgaagaagctcgatgagcatcttctcactcgcagttacatcactgggtaccaagcttcaaaggatgatatcactgtgtttacagctctttcaaagcccccaacttcagagtttgtcaatgtatctcgttggttcaaccacatcgatgccctcttgaggatctctggtgtctctgctgaaggaagtggtgtcattgttgaagggtcatcacctatcacagaagaggctgttgctactccccctgcagctgattctaaggatactgctgctgaagaagaagatgatgatgatgttgaccttttcggggaggagaccgaagaggaaaagaaagctgctgaagagagagcagcttctgtgaaggcatctacaaagaagaaagaatccggaaagtcatcagttttgatggatatcaagccgtgggatgatgagacggacatgaagaagctagaggaagctgtaagatccattcagatggaaggattgttttggggagcatcaaagcttgtacccgttggttacggtatcaagaagttgcacatcatgtgcaccattgttgatgaccttgtatctatcgacaccatgatcgaagagcaactcactgttgaaccgatcaatgaatatgtccagagttgtgacattgttgccttcaacaagatatgaggatggagaatagcttgaaggaagaactgtttatgttgttgttttcttctctatatccagttttgttacctgtttttattgtactctgtgggagggcttttaccaactctgattcattttgatatatgtgaagacaattcagttttgtcttaaagtttccaccaaatctcaaatacgaaaaatcataagtttgat

SEQ ID NO: 76793 - protein, 258 aa, Arabidopsis thaliana
  peptide (1)..(258): Ceres Seq. ID no. 12322565
  misc_feature (169)..(258): Pfam Name: EF-1 guanine nucleotide exchange domain Pfam Description: EF-1 guanine nucleotide exchange domain
  misc_feature (28)..(258): Homolog of NCBI NO: 15224107 NR Description: putative elongation factor beta-1; protein id: supported by cDNA: 35337., supported by cDNA: gi_17473803, by cDNA: gi_20148478 [Arabidopsis thaliana]
  misc_feature (28)..(258): Homolog of NCBI NO: 21593028 NR Description: putative elongation factor beta-1 [Arabidopsis
  misc_feature (28)..(258): Homolog of NCBI NO: 2119929 NR Description: translation elongation factor eEF-1 beta chain -
  misc_feature (28)..(258): Homolog of NCBI NO: 25299531 NR Description: probable elongation factor 1-beta [imported] -
  misc_feature (28)..(258): Homolog of NCBI NO: 30691619 NR Description: elongation factor 1-beta -related [Arabidopsis
  misc_feature (28)..(258): Homolog of NCBI NO: 480620 NR Description: translation elongation factor eEF-1 beta-A1 chain Arabidopsis thaliana (cv. Colombia) >gi|398608|emb|CAA52751.1|
  misc_feature (31)..(258): Homolog of NCBI NO: 38232568 NR Description: translational elongation factor 1 subunit Bbeta
  misc_feature (31)..(258): Homolog of NCBI NO: 6015064 NR Description: ELONGATION FACTOR 1-BETA (EF-1-BETA)
  misc_feature (31)..(258): Homolog of NCBI NO: 6015063 NR Description: ELONGATION FACTOR 1-BETA (EF-1-BETA)
  misc_feature (30)..(258): Homolog of NCBI NO: 6166140 NR Description: ELONGATION FACTOR 1-BETA (EF-1-BETA)
TTSLSLALPLQVGSFIATVKKFRALETMAAFPNLNSGSGLKKLDEHLLTRSYITGYQASKDDITVFTALSKPPTSEFVNVSRWFNHIDALLRISGVSAEGSGVIVEGSSPITEEAVATPPAADSKDTAAEEEDDDDVDLFGEETEEEKKAAEERAASVKASTKKKESGKSSVLMDIKPWDDETDMKKLEEAVRSIQMEGLFWGASKLVPVGYGIKKLHIMCTIVDDLVSIDTMIEEQLTVEPINEYVQSCDIVAFNKI

SEQ ID NO: 76794 - protein, 231 aa, Arabidopsis thaliana
  peptide (1)..(231): Ceres Seq. ID no. 12322566
  misc_feature (142)..(231): Pfam Name: EF-1 guanine nucleotide exchange domain Pfam Description: EF-1 guanine nucleotide exchange domain
  misc_feature (1)..(231): Homolog of NCBI NO: 15224107 NR Description: putative elongation factor beta-1; protein id: supported by cDNA: 35337., supported by cDNA: gi_17473803, by cDNA: gi_20148478 [Arabidopsis thaliana]
  misc_feature (1)..(231): Homolog of NCBI NO: 21593028 NR Description: putative elongation factor beta-1 [Arabidopsis
  misc_feature (1)..(231): Homolog of NCBI NO: 2119929 NR Description: translation elongation factor eEF-1 beta chain -
  misc_feature (1)..(231): Homolog of NCBI NO: 25299531 NR Description: probable elongation factor 1-beta [imported] -
  misc_feature (1)..(231): Homolog of NCBI NO: 30691619 NR Description: elongation factor 1-beta -related [Arabidopsis
  misc_feature (1)..(231): Homolog of NCBI NO: 480620 NR Description: translation elongation factor eEF-1 beta-A1 chain Arabidopsis thaliana (cv. Colombia) >gi|398608|emb|CAA52751.1|
  misc_feature (4)..(231): Homolog of NCBI NO: 38232568 NR Description: translational elongation factor 1 subunit Bbeta
  misc_feature (4)..(231): Homolog of NCBI NO: 6015064 NR Description: ELONGATION FACTOR 1-BETA (EF-1-BETA)
  misc_feature (4)..(231): Homolog of NCBI NO: 6015063 NR Description: ELONGATION FACTOR 1-BETA (EF-1-BETA)
  misc_feature (3)..(231): Homolog of NCBI NO: 6166140 NR Description: ELONGATION FACTOR 1-BETA (EF-1-BETA)
MAAFPNLNSGSGLKKLDEHLLTRSYITGYQASKDDITVFTALSKPPTSEFVNVSRWFNHIDALLRISGVSAEGSGVIVEGSSPITEEAVATPPAADSKDTAAEEEDDDDVDLFGEETEEEKKAAEERAASVKASTKKKESGKSSVLMDIKPWDDETDMKKLEEAVRSIQMEGLFWGASKLVPVGYGIKKLHIMCTIVDDLVSIDTMIEEQLTVEPINEYVQSCDIVAFNKI

SEQ ID NO: 76795 - DNA, 1560 bp, Arabidopsis thaliana
  misc_feature (1)..(1560): Ceres Seq. ID no. 12325078
  misc_feature: MA Experiment ID: 20000173 Result: Down-regulated in Transcription
  misc_feature: MA Experiment 20000173 PARAMETER Experiment Name: At_42deg_Heat_P Parameter: Age (day) Value: 14
  misc_feature: MA Experiment 20000173 PARAMETER Experiment Name: At_42deg_Heat_P Parameter: Organism Value: A. thaliana
  misc_feature: MA Experiment 20000173 PARAMETER Experiment Name: At_42deg_Heat_P Parameter: Plant Line Value: WS
  misc_feature: MA Experiment 20000173 PARAMETER Experiment Name: At_42deg_Heat_P Parameter: Temperature (deg C) Value: 42 vs. 22
  misc_feature: MA Experiment 20000173 PARAMETER Experiment Name: At_42deg_Heat_P Parameter: Timepoint (hr) Value: 6
  misc_feature: MA Experiment 20000173 PARAMETER Experiment Name: At_42deg_Heat_P Parameter: Tissue Value: Aerial
  misc_feature: MA Experiment ID: 20000179 Result: Up-regulated in Transcription
  misc_feature: MA Experiment 20000179 PARAMETER Experiment Name: At_Germinating_Seeds_P Parameter: Age (hr) Value: 6 vs. 0
  misc_feature: MA Experiment 20000179 PARAMETER Experiment Name: At_Germinating_Seeds_P Parameter: Tissue Value: Germinating Seeds
  misc_feature: MA Experiment ID: 20000180 Result: Up-regulated in Transcription
  misc_feature: MA Experiment 20000180 PARAMETER Experiment Name: At_Germinating_Seeds_P Parameter: Age (hr) Value: 24 vs. 0
  misc_feature: MA Experiment 20000180 PARAMETER Experiment Name: At_Germinating_Seeds_P Parameter: Tissue Value: Germinating Seeds
  misc_feature: MA Experiment ID: 20000794 Result: Down-regulated in Transcription
  misc_feature: MA Experiment 20000794 PARAMETER Experiment Name: At_Petals_P Parameter: Age (day) Value: 23-25 days
  misc_feature: MA Experiment 20000794 PARAMETER Experiment Name: At_Petals_P Parameter: Plant Line Value: WS
  misc_feature: MA Experiment 20000794 PARAMETER Experiment Name: At_Petals_P Parameter: Tissue Value: Petals vs. Whole plant
  misc_feature: MA Experiment ID: 20001911 Result: Down-regulated in Transcription
  misc_feature: MA Experiment 20001911 PARAMETER Experiment Name: At_Drought_Reproduction_P Parameter: Age (day) Value: 40
  misc_feature: MA Experiment 20001911 PARAMETER Experiment Name: At_Drought_Reproduction_P Parameter: Organism Value: A. thaliana
  misc_feature: MA Experiment 20001911 PARAMETER Experiment Name: At_Drought_Reproduction_P Parameter: Plant Line Value: WS
  misc_feature: MA Experiment 20001911 PARAMETER Experiment Name: At_Drought_Reproduction_P Parameter: Timepoint (day) Value: 10
  misc_feature: MA Experiment 20001911 PARAMETER Experiment Name: At_Drought_Reproduction_P Parameter: Tissue Value: Flowers
  misc_feature: MA Experiment 20001911 PARAMETER Experiment Name: At_Drought_Reproduction_P Parameter: Treatment Value: Drought vs. No Drought
gtcaacacagatcagaatctgaggctttggccgagacgagagaagcagaagaagaaaatggcggagactgtacattctccgatcgttacttacgcatcgatgttatcgcttctcgccttctgtccacctttcgtcattctcctatggtacacaatggttcatcaggatggttctgttactcagacctttggcttcttttgggagaatggagttcaaggacttatcaacatatggccaagacccactttgattgcttggaaaattatattttgctatggagcatttgaagctattcttcagctgcttctgcctggtaaaagagttgagggtccaatatctccagccggaaaccgaccagtttacaaggccaatggtctggctgcttactttgtgacactagcaacctatcttggtctttggtggtttggaatcttcaaccctgcaattgtctatgatcacttgggtgaaatattttcggcactaatattcggaagcttcatattttgtgttttgttgtacataaaaggccatgttgcaccttcatcaagtgactctggttcatgtggtaacctaataattgacttctattggggcatggagttgtaccctcgaattggtaagagctttgacatcaaggtgtttactaattgcagattcggaatgatgtcttgggcagttcttgcagtcacgtactgcataaaacagtatgaaataaatggcaaagtatctgattcaatgctggtgaacaccatcctgatgctggtgtatgtcacaaaattcttctggtgggaagctggttattggaacaccatggacattgcacatgaccgagctggattctatatatgctggggttgtctagtgtgggtgccttctgtctacacttctccaggcatgtaccttgtgaaccaccccgtcgaactcggaactcagttggcaatatacattctcgttgcaggaattctgtgcatttacataaactatgactgtgatagacaaaggcaagagttcaggaggacaaacgggaaatgtttggtttggggaagggccccgtcaaagattgtggcgtcgtatactacaacatctggtgaaactaaaactagtcttctcttaacgtctggatggtggggattggctcgtcatttccattatgttcctgagatcttaagtgctttcttctggaccgtaccggctctcttcgataacttcttggcatacttctacgtcatatttctcacccttcttctctttgatcgagccaagagagacgatgaccgatgccgatcaaagtatgggaaatattggaagctgtattgtgagaaagtcaaatacaggatcattccgggaatttattgattgtaacgaagtctgttgttctcattttctacttattacgttaattcgaacgttggaatcatcaaaagaccgtgccaaaacaaaaatgcaaattgatgcgatagacattcttttgctgatttgtatgctataggttttcaaatctctagctacacttatgtatttccctagattatcaaagttagcctgccgttttctaatttt

SEQ ID NO: 76796 - protein, 451 aa, Arabidopsis thaliana
  peptide (1)..(451): Ceres Seq. ID no. 12325079
  misc_feature (22)..(451): Pfam Name: Ergosterol biosynthesis ERG4/ERG24 family Pfam Description: Ergosterol biosynthesis ERG4/ERG24 family
  misc_feature (20)..(451): Homolog of NCBI NO: 15222967 NR Description: sterol delta7 reductase; protein id: At1g50430.1, by cDNA: gi_1245181, supported by cDNA: gi_20466245 [Arabidopsis
  misc_feature (20)..(451): Homolog of NCBI NO: 1245182 NR Description: sterol delta-7 reductase
  misc_feature (21)..(451): Homolog of NCBI NO: 39726086 NR Description: sterol delta-7 reductase [Tropaeolum majus]
  misc_feature (35)..(448): Homolog of NCBI NO: 29654463 NR Description: ergosterol biosynthesis ERG4/ERG24 family protein burnetii RSA 493] >gi|29541730|gb|AAO90669.1| ergosterol
  misc_feature (32)..(451): Homolog of NCBI NO: 38969866 NR Description: 7-dehydrocholesterol reductase [Silurana
  misc_feature (32)..(451): Homolog of NCBI NO: 27924199 NR Description: Similar to 7-dehydrocholesterol reductase
  misc_feature (32)..(451): Homolog of NCBI NO: 6681179 NR Description: 7-dehydrocholesterol reductase [Mus musculus]
  misc_feature (33)..(451): Homolog of NCBI NO: 11693158 NR Description: 7-dehydrocholesterol reductase [Rattus norvegicus]
  misc_feature (32)..(451): Homolog of NCBI NO: 3171089 NR Description: 7-dehydrocholesterol reductase [Homo sapiens]
  misc_feature (32)..(451): Homolog of NCBI NO: 4503321 NR Description: 7-dehydrocholesterol reductase;
VNTDQNLRLWPRREKQKKKMAETVHSPIVTYASMLSLLAFCPPFVILLWYTMVHQDGSVTQTFGFFWENGVQGLINIWPRPTLIAWKIIFCYGAFEAILQLLLPGKRVEGPISPAGNRPVYKANGLAAYFVTLATYLGLWWFGIFNPAIVYDHLGEIFSALIFGSFIFCVLLYIKGHVAPSSSDSGSCGNLIIDFYWGMELYPRIGKSFDIKVFTNCRFGMMSWAVLAVTYCIKQYEINGKVSDSMLVNTILMLVYVTKFFWWEAGYWNTMDIAHDRAGFYICWGCLVWVPSVYTSPGMYLVNHPVELGTQLAIYILVAGILCIYINYDCDRQRQEFRRTNGKCLVWGRAPSKIVASYTTTSGETKTSLLLTSGWWGLARHFHYVPEILSAFFWTVPALFDNFLAYFYVIFLTLLLFDRAKRDDDRCRSKYGKYWKLYCEKVKYRIIPGIY

SEQ ID NO: 76797 - protein, 432 aa, Arabidopsis thaliana; identical to SEQ ID NO: 37667
  peptide (1)..(432): Ceres Seq. ID no. 12325080
  misc_feature (3)..(432): Pfam Name: Ergosterol biosynthesis ERG4/ERG24 family Pfam Description: Ergosterol biosynthesis ERG4/ERG24 family
  misc_feature (1)..(432): Homolog of NCBI NO: 15222967 NR Description: sterol delta7 reductase; protein id: At1g50430.1, by cDNA: gi_1245181, supported by cDNA: gi_20466245 [Arabidopsis
  misc_feature (1)..(432): Homolog of NCBI NO: 1245182 NR Description: sterol delta-7 reductase
  misc_feature (2)..(432): Homolog of NCBI NO: 39726086 NR Description: sterol delta-7 reductase [Tropaeolum majus]
  misc_feature (16)..(429): Homolog of NCBI NO: 29654463 NR Description: ergosterol biosynthesis ERG4/ERG24 family protein burnetii RSA 493] >gi|29541730|gb|AAO90669.1| ergosterol
  misc_feature (13)..(432): Homolog of NCBI NO: 38969866 NR Description: 7-dehydrocholesterol reductase [Silurana
  misc_feature (13)..(432): Homolog of NCBI NO: 27924199 NR Description: Similar to 7-dehydrocholesterol reductase
  misc_feature (13)..(432): Homolog of NCBI NO: 6681179 NR Description: 7-dehydrocholesterol reductase [Mus musculus]
  misc_feature (14)..(432): Homolog of NCBI NO: 11693158 NR Description: 7-dehydrocholesterol reductase [Rattus norvegicus]
  misc_feature (13)..(432): Homolog of NCBI NO: 3171089 NR Description: 7-dehydrocholesterol reductase [Homo sapiens]
  misc_feature (13)..(432): Homolog of NCBI NO: 4503321 NR Description: 7-dehydrocholesterol reductase;

SEQ ID NO: 76798 - protein, 418 aa, Arabidopsis thaliana; identical to SEQ ID NO: 37668
  peptide (1)..(418): Ceres Seq. ID no. 12325081
  misc_feature (1)..(418): Pfam Name: Ergosterol biosynthesis ERG4/ERG24 family Pfam Description: Ergosterol biosynthesis ERG4/ERG24 family
  misc_feature (1)..(418): Homolog of NCBI NO: 15222967 NR Description: sterol delta7 reductase; protein id: At1g50430.1, by cDNA: gi_1245181, supported by cDNA: gi_20466245 [Arabidopsis
  misc_feature (1)..(418): Homolog of NCBI NO: 1245182 NR Description: sterol delta-7 reductase
  misc_feature (1)..(418): Homolog of NCBI NO: 39726086 NR Description: sterol delta-7 reductase [Tropaeolum majus]
  misc_feature (2)..(415): Homolog of NCBI NO: 29654463 NR Description: ergosterol biosynthesis ERG4/ERG24 family protein burnetii RSA 493] >gi|29541730|gb|AAO90669.1| ergosterol
  misc_feature (1)..(418): Homolog of NCBI NO: 38969866 NR Description: 7-dehydrocholesterol reductase [Silurana
  misc_feature (1)..(418): Homolog of NCBI NO: 27924199 NR Description: Similar to 7-dehydrocholesterol reductase
  misc_feature (1)..(418): Homolog of NCBI NO: 6681179 NR Description: 7-dehydrocholesterol reductase [Mus musculus]
  misc_feature (1)..(418): Homolog of NCBI NO: 11693158 NR Description: 7-dehydrocholesterol reductase [Rattus norvegicus]
  misc_feature (1)..(418): Homolog of NCBI NO: 3171089 NR Description: 7-dehydrocholesterol reductase [Homo sapiens]
  misc_feature (1)..(418): Homolog of NCBI NO: 4503321 NR Description: 7-dehydrocholesterol reductase;

SEQ ID NO: 76799 - DNA, 1151 bp, Arabidopsis thaliana
  misc_feature (1)..(1151): Ceres Seq. ID no. 12325886
  misc_feature: MA Experiment ID: 108434 Result: Up-regulated in Transcription
  misc_feature: MA Experiment 108434 PARAMETER Experiment Name: At_Root_Tips_cDNA_P Parameter: Tissue Value: Root Tips
  misc_feature: MA Experiment ID: 108461 Result: Up-regulated in Transcription
  misc_feature: MA Experiment 108461 PARAMETER Experiment Name: At_Germinating_Seeds_cDNA_P Parameter: Age (day) Value: 1 vs. 0
  misc_feature: MA Experiment 108461 PARAMETER Experiment Name: At_Germinating_Seeds_cDNA_P Parameter: Tissue Value: Germinating Seeds
  misc_feature: MA Experiment ID: 108463 Result: Up-regulated in Transcription
  misc_feature: MA Experiment 108463 PARAMETER Experiment Name: At_Germinating_Seeds_cDNA_P Parameter: Age (day) Value: 3 vs. 0
  misc_feature: MA Experiment 108463 PARAMETER Experiment Name: At_Germinating_Seeds_cDNA_P Parameter: Tissue Value: Germinating Seeds
  misc_feature: MA Experiment ID: 108464 Result: Up-regulated in Transcription
  misc_feature: MA Experiment 108464 PARAMETER Experiment Name: At_Germinating_Seeds_cDNA_P Parameter: Age (day) Value: 4 vs. 0
  misc_feature: MA Experiment 108464 PARAMETER Experiment Name: At_Germinating_Seeds_cDNA_P Parameter: Tissue Value: Germinating Seeds
  misc_feature: MA Experiment ID: 108489 Result: Down-regulated in Transcription
  misc_feature: MA Experiment ID: 20000070 Result: Down-regulated in Transcription
  misc_feature: MA Experiment 20000070 PARAMETER Experiment Name: At_100uM_ABA_Mutants_cDNA_P Parameter: Plant Line Value: CS24
  misc_feature: MA Experiment 20000070 PARAMETER Experiment Name: At_100uM_ABA_Mutants_cDNA_P Parameter: Timepoint (hr) Value: 6
  misc_feature: MA Experiment 20000070 PARAMETER Experiment Name: At_100uM_ABA_Mutants_cDNA_P Parameter: Tissue Value: Aerial
  misc_feature: MA Experiment 20000070 PARAMETER Experiment Name: At_100uM_ABA_Mutants_cDNA_P Parameter: Treatment Value: 100uM ABA vs. No Treatment
  misc_feature: MA Experiment ID: 20000072 Result: Down-regulated in Transcription
  misc_feature: MA Experiment 20000072 PARAMETER Experiment Name: At_100uM_ABA_Mutants_cDNA_P Parameter: Plant Line Value: CS8105
  misc_feature: MA Experiment 20000072 PARAMETER Experiment Name: At_100uM_ABA_Mutants_cDNA_P Parameter: Timepoint (hr) Value: 6
  misc_feature: MA Experiment 20000072 PARAMETER Experiment Name: At_100uM_ABA_Mutants_cDNA_P Parameter: Tissue Value: Aerial
  misc_feature: MA Experiment 20000072 PARAMETER Experiment Name: At_100uM_ABA_Mutants_cDNA_P Parameter: Treatment Value: 100uM ABA vs. No Treatment
  misc_feature: MA Experiment ID: 20000087 Result: Down-regulated in Transcription
  misc_feature: MA Experiment 20000087 PARAMETER Experiment Name: At_100uM_ABA_Mutants_cDNA_P Parameter: Plant Line Value: WS
  misc_feature: MA Experiment 20000087 PARAMETER Experiment Name: At_100uM_ABA_Mutants_cDNA_P Parameter: Timepoint (hr) Value: 6
  misc_feature: MA Experiment 20000087 PARAMETER Experiment Name: At_100uM_ABA_Mutants_cDNA_P Parameter: Tissue Value: Aerial
  misc_feature: MA Experiment 20000087 PARAMETER Experiment Name: At_100uM_ABA_Mutants_cDNA_P Parameter: Treatment Value: 100uM ABA vs. No Treatment
  misc_feature: MA Experiment ID: 20000088 Result: Down-regulated in Transcription
  misc_feature: MA Experiment 20000088 PARAMETER Experiment Name: At_100uM_ABA_Mutants_cDNA_P Parameter: Plant Line Value: Landsberg
  misc_feature: MA Experiment 20000088 PARAMETER Experiment Name: At_100uM_ABA_Mutants_cDNA_P Parameter: Timepoint (hr) Value: 6
  misc_feature: MA Experiment 20000088 PARAMETER Experiment Name: At_100uM_ABA_Mutants_cDNA_P Parameter: Tissue Value: Aerial
  misc_feature: MA Experiment 20000088 PARAMETER Experiment Name: At_100uM_ABA_Mutants_cDNA_P Parameter: Treatment Value: 100uM ABA vs. No Treatment
  misc_feature: MA Experiment ID: 20000090 Result: Down-regulated in Transcription
  misc_feature: MA Experiment ID: 20000111 Result: Down-regulated in Transcription
  misc_feature: MA Experiment 20000111 PARAMETER Experiment Name: At_42deg_Heat_cDNA_P Parameter: Temperature (deg C) Value: 42 vs. 22
  misc_feature: MA Experiment 20000111 PARAMETER Experiment Name: At_42deg_Heat_cDNA_P Parameter: Timepoint (hr) Value: 6
  misc_feature: MA Experiment 20000111 PARAMETER Experiment Name: At_42deg_Heat_cDNA_P Parameter: Tissue Value: Aerial
  misc_feature: MA Experiment ID: 20000113 Result: Down-regulated in Transcription
  misc_feature: MA Experiment 20000113 PARAMETER Experiment Name: At_42deg_Heat_cDNA_P Parameter: Temperature (deg C) Value: 42 vs. 22
  misc_feature: MA Experiment 20000113 PARAMETER Experiment Name: At_42deg_Heat_cDNA_P Parameter: Timepoint (hr) Value: 8
  misc_feature: MA Experiment 20000113 PARAMETER Experiment Name: At_42deg_Heat_cDNA_P Parameter: Tissue Value: Aerial
  misc_feature: MA Experiment ID: 20000185 Result: Up-regulated in Transcription
  misc_feature: MA Experiment 20000185 PARAMETER Experiment Name: At_Roots__P Parameter: Age (day) Value: 7 vs. 21
  misc_feature: MA Experiment 20000185 PARAMETER Experiment Name: At_Roots__P Parameter: Organism Value: A. thaliana
  misc_feature: MA Experiment 20000185 PARAMETER Experiment Name: At_Roots__P Parameter: Tissue Value: Roots vs. Whole Plant
  misc_feature: MA Experiment ID: 20000437 Result: Down-regulated in Transcription
  misc_feature: MA Experiment 20000437 PARAMETER Experiment Name: At_Drought_P Parameter: Age (day) Value: 8
  misc_feature: MA Experiment 20000437 PARAMETER Experiment Name: At_Drought_P Parameter: Organism Value: A. thaliana
  misc_feature: MA Experiment 20000437 PARAMETER Experiment Name: At_Drought_P Parameter: Plant Line Value: WS
  misc_feature: MA Experiment 20000437 PARAMETER Experiment Name: At_Drought_P Parameter: Timepoint (hr) Value: 24
  misc_feature: MA Experiment 20000437 PARAMETER Experiment Name: At_Drought_P Parameter: Tissue Value: Whole Plant
  misc_feature: MA Experiment 20000437 PARAMETER Experiment Name: At_Drought_P Parameter: Treatment Value: Drought vs. No Drought
  misc_feature: MA Experiment ID: 20000438 Result: Up-regulated in Transcription
  misc_feature: MA Experiment 20000438 PARAMETER Experiment Name: At_Shoots__P Parameter: Age (day) Value: 14
  misc_feature: MA Experiment 20000438 PARAMETER Experiment Name: At_Shoots__P Parameter: Tissue Value: Shoots vs. Whole Plant
  misc_feature: MA Experiment ID: 20000527 Result: Down-regulated in Transcription
  misc_feature: MA Experiment 20000527 PARAMETER Experiment Name: At_10percent_PEG_P Parameter: Age (day) Value: 20
  misc_feature: MA Experiment 20000527 PARAMETER Experiment Name: At_10percent_PEG_P Parameter: Organism Value: A. thaliana
  misc_feature: MA Experiment 20000527 PARAMETER Experiment Name: At_10percent_PEG_P Parameter: Plant Line Value: WS
  misc_feature: MA Experiment 20000527 PARAMETER Experiment Name: At_10percent_PEG_P Parameter: Timepoint (day) Value: 20
  misc_feature: MA Experiment 20000527 PARAMETER Experiment Name: At_10percent_PEG_P Parameter: Tissue Value: Whole Plant
  misc_feature: MA Experiment 20000527 PARAMETER Experiment Name: At_10percent_PEG_P Parameter: Treatment Value: 10percent PEG vs. No Treatment
  misc_feature: MA Experiment ID: 20000573 Result: Down-regulated in Transcription
  misc_feature: MA Experiment 20000573 PARAMETER Experiment Name: At_100uM_ABA_Mutants__P Parameter: Organism Value: A. thaliana
  misc_feature: MA Experiment 20000573 PARAMETER Experiment Name: At_100uM_ABA_Mutants__P Parameter: Plant Line Value: CS22 vs. Ler wt
  misc_feature: MA Experiment 20000573 PARAMETER Experiment Name: At_100uM_ABA_Mutants__P Parameter: Timepoint (hr) Value: N/A
  misc_feature: MA Experiment 20000573 PARAMETER Experiment Name: At_100uM_ABA_Mutants__P Parameter: Tissue Value: Whole Plant
  misc_feature: MA Experiment 20000573 PARAMETER Experiment Name: At_100uM_ABA_Mutants__P Parameter: Treatment Value: None
  misc_feature: MA Experiment ID: 20000574 Result: Down-regulated in Transcription
  misc_feature: MA Experiment 20000574 PARAMETER Experiment Name: At_100uM_ABA_Mutants__P Parameter: Organism Value: A. thaliana
  misc_feature: MA Experiment 20000574 PARAMETER Experiment Name: At_100uM_ABA_Mutants__P Parameter: Plant Line Value: CS23 vs. Ler wt
  misc_feature: MA Experiment 20000574 PARAMETER Experiment Name: At_100uM_ABA_Mutants__P Parameter: Timepoint (hr) Value: N/A
  misc_feature: MA Experiment 20000574 PARAMETER Experiment Name: At_100uM_ABA_Mutants__P Parameter: Tissue Value: Whole Plant
  misc_feature: MA Experiment 20000574 PARAMETER Experiment Name: At_100uM_ABA_Mutants__P Parameter: Treatment Value: None
  misc_feature: MA Experiment ID: 20000794 Result: Down-regulated in Transcription
  misc_feature: MA Experiment 20000794 PARAMETER Experiment Name: At_Petals_P Parameter: Age (day) Value: 23-25 days
  misc_feature: MA Experiment 20000794 PARAMETER Experiment Name: At_Petals_P Parameter: Plant Line Value: WS
  misc_feature: MA Experiment 20000794 PARAMETER Experiment Name: At_Petals_P Parameter: Tissue Value: Petals vs. Whole plant
  misc_feature: MA Experiment ID: 20001450 Result: Up-regulated in Transcription
  misc_feature: MA Experiment 20001450 PARAMETER Experiment Name: At_Far-red-induction_P Parameter: Age (day) Value: 7
  misc_feature: MA Experiment 20001450 PARAMETER Experiment Name: At_Far-red-induction_P Parameter: Light Value: Far-red vs. White
  misc_feature: MA Experiment 20001450 PARAMETER Experiment Name: At_Far-red-induction_P Parameter: Organism Value: A. thaliana
  misc_feature: MA Experiment 20001450 PARAMETER Experiment Name: At_Far-red-induction_P Parameter: Plant Line Value: Columbia
  misc_feature: MA Experiment 20001450 PARAMETER Experiment Name: At_Far-red-induction_P Parameter: Timepoint (hr) Value: 8
  misc_feature: MA Experiment 20001450 PARAMETER Experiment Name: At_Far-red-induction_P Parameter: Tissue Value: Whole Plant
  misc_feature: MA Experiment ID: 20001555 Result: Down-regulated in Transcription
  misc_feature: MA Experiment 20001555 PARAMETER Experiment Name: At_Drought_Soil_Dry_P Parameter: Age (day) Value: 24
  misc_feature: MA Experiment 20001555 PARAMETER Experiment Name: At_Drought_Soil_Dry_P Parameter: Organism Value: A. thaliana
  misc_feature: MA Experiment 20001555 PARAMETER Experiment Name: At_Drought_Soil_Dry_P Parameter: Plant Line Value: WS
  misc_feature: MA Experiment 20001555 PARAMETER Experiment Name: At_Drought_Soil_Dry_P Parameter: Post Timepoint (hr) Value: None
  misc_feature: MA Experiment 20001555 PARAMETER Experiment Name: At_Drought_Soil_Dry_P Parameter: Post-Treatment Value: None
  misc_feature: MA Experiment 20001555 PARAMETER Experiment Name: At_Drought_Soil_Dry_P Parameter: Timepoint (day) Value: 10
  misc_feature: MA Experiment 20001555 PARAMETER Experiment Name: At_Drought_Soil_Dry_P Parameter: Treatment Value: Drought vs. No Drought
  misc_feature: MA Experiment ID: 20001556 Result: Down-regulated in Transcription
  misc_feature: MA Experiment 20001556 PARAMETER Experiment Name: At_Drought_Soil_Dry_P Parameter: Age (day) Value: 26
  misc_feature: MA Experiment 20001556 PARAMETER Experiment Name: At_Drought_Soil_Dry_P Parameter: Organism Value: A. thaliana
  misc_feature: MA Experiment 20001556 PARAMETER Experiment Name: At_Drought_Soil_Dry_P Parameter: Plant Line Value: WS
  misc_feature: MA Experiment 20001556 PARAMETER Experiment Name: At_Drought_Soil_Dry_P Parameter: Post Timepoint (hr) Value: None
  misc_feature: MA Experiment 20001556 PARAMETER Experiment Name: At_Drought_Soil_Dry_P Parameter: Post-Treatment Value: None
  misc_feature: MA Experiment 20001556 PARAMETER Experiment Name: At_Drought_Soil_Dry_P Parameter: Timepoint (day) Value: 12
  misc_feature: MA Experiment 20001556 PARAMETER Experiment Name: At_Drought_Soil_Dry_P Parameter: Treatment Value: Drought vs. No Drought
  misc_feature: MA Experiment ID: 20001557 Result: Down-regulated in Transcription
  misc_feature: MA Experiment 20001557 PARAMETER Experiment Name: At_Drought_Soil_Dry_P Parameter: Age (day) Value: 27
  misc_feature: MA Experiment 20001557 PARAMETER Experiment Name: At_Drought_Soil_Dry_P Parameter: Organism Value: A. thaliana
  misc_feature: MA Experiment 20001557 PARAMETER Experiment Name: At_Drought_Soil_Dry_P Parameter: Plant Line Value: WS
  misc_feature: MA Experiment 20001557 PARAMETER Experiment Name: At_Drought_Soil_Dry_P Parameter: Post Timepoint (hr) Value: 3
  misc_feature: MA Experiment 20001557 PARAMETER Experiment Name: At_Drought_Soil_Dry_P Parameter: Post-Treatment Value: Re-Water vs. No Drought
  misc_feature: MA Experiment 20001557 PARAMETER Experiment Name: At_Drought_Soil_Dry_P Parameter: Timepoint (day) Value: 13
  misc_feature: MA Experiment 20001557 PARAMETER Experiment Name: At_Drought_Soil_Dry_P Parameter: Treatment Value: Drought vs. No Drought
  misc_feature: MA Experiment ID: 20001558 Result: Down-regulated in Transcription
  misc_feature: MA Experiment 20001558 PARAMETER Experiment Name: At_Drought_Soil_Dry_P Parameter: Age (day) Value: 27
  misc_feature: MA Experiment 20001558 PARAMETER Experiment Name: At_Drought_Soil_Dry_P Parameter: Organism Value: A. thaliana
  misc_feature: MA Experiment 20001558 PARAMETER Experiment Name: At_Drought_Soil_Dry_P Parameter: Plant Line Value: WS
  misc_feature: MA Experiment 20001558 PARAMETER Experiment Name: At_Drought_Soil_Dry_P Parameter: Post Timepoint (hr) Value: 6
  misc_feature: MA Experiment 20001558 PARAMETER Experiment Name: At_Drought_Soil_Dry_P Parameter: Post-Treatment Value: Re-Water vs. No Drought
  misc_feature: MA Experiment 20001558 PARAMETER Experiment Name: At_Drought_Soil_Dry_P Parameter: Timepoint (day) Value: 13
  misc_feature: MA Experiment 20001558 PARAMETER Experiment Name: At_Drought_Soil_Dry_P Parameter: Treatment Value: Drought vs. No Drought
  misc_feature: MA Experiment ID: 20001559 Result: Down-regulated in Transcription
  misc_feature: MA Experiment 20001559 PARAMETER Experiment Name: At_Drought_Soil_Dry_P Parameter: Age (day) Value: 28
  misc_feature: MA Experiment 20001559 PARAMETER Experiment Name: At_Drought_Soil_Dry_P Parameter: Organism Value: A. thaliana
  misc_feature: MA Experiment 20001559 PARAMETER Experiment Name: At_Drought_Soil_Dry_P Parameter: Plant Line Value: WS
  misc_feature: MA Experiment 20001559 PARAMETER Experiment Name: At_Drought_Soil_Dry_P Parameter: Post Timepoint (hr) Value: 29
  misc_feature: MA Experiment 20001559 PARAMETER Experiment Name: At_Drought_Soil_Dry_P Parameter: Post-Treatment Value: Re-Water vs. No Drought
  misc_feature: MA Experiment 20001559 PARAMETER Experiment Name: At_Drought_Soil_Dry_P Parameter: Timepoint (day) Value: 14
  misc_feature: MA Experiment 20001559 PARAMETER Experiment Name: At_Drought_Soil_Dry_P Parameter: Treatment Value: Drought vs. No Drought
  misc_feature: MA Experiment ID: 20001560 Result: Down-regulated in Transcription
  misc_feature: MA Experiment 20001560 PARAMETER Experiment Name: At_Drought_Soil_Dry_P Parameter: Age (day) Value: 28
  misc_feature: MA Experiment 20001560 PARAMETER Experiment Name: At_Drought_Soil_Dry_P Parameter: Organism Value: A. thaliana
  misc_feature: MA Experiment 20001560 PARAMETER Experiment Name: At_Drought_Soil_Dry_P Parameter: Plant Line Value: WS
  misc_feature: MA Experiment 20001560 PARAMETER Experiment Name: At_Drought_Soil_Dry_P Parameter: Post Timepoint (hr) Value: None
  misc_feature: MA Experiment 20001560 PARAMETER Experiment Name: At_Drought_Soil_Dry_P Parameter: Post-Treatment Value: None
  misc_feature: MA Experiment 20001560 PARAMETER Experiment Name: At_Drought_Soil_Dry_P Parameter: Timepoint (day) Value: 14
  misc_feature: MA Experiment 20001560 PARAMETER Experiment Name: At_Drought_Soil_Dry_P Parameter: Treatment Value: Drought vs. No Drought
  misc_feature: MA Experiment ID: 20001905 Result: Down-regulated in Transcription
  misc_feature: MA Experiment 20001905 PARAMETER Experiment Name: At_Drought_Reproduction_P Parameter: Age (day) Value: 40
  misc_feature: MA Experiment 20001905 PARAMETER Experiment Name: At_Drought_Reproduction_P Parameter: Organism Value: A. thaliana
  misc_feature: MA Experiment 20001905 PARAMETER Experiment Name: At_Drought_Reproduction_P Parameter: Plant Line Value: WS
  misc_feature: MA Experiment 20001905 PARAMETER Experiment Name: At_Drought_Reproduction_P Parameter: Timepoint (day) Value: 10
  misc_feature: MA Experiment 20001905 PARAMETER Experiment Name: At_Drought_Reproduction_P Parameter: Tissue Value: Rosettes
  misc_feature: MA Experiment 20001905 PARAMETER Experiment Name: At_Drought_Reproduction_P Parameter: Treatment Value: Drought vs. No Drought
tcttcactaataattcgtttaaacgcaaagaaaacagaccaacatggaagatcggtgcttgatcaagaacgatatcactgaattgattggtaacacaccaatggtgtatctgaacaatgttgttgatggttgcgtggctcgtatcgctgcgaagcttgagatgatggagccttgttctagcgtcaaagacagaatcgcgtatagtatgatcaaagatgcagaagacaaaggattgattactcccggaaagagtacattgatagagccaactgctggtaacaccgggattggtttagcttgcatgggagctgcaagaggctataaagtgatccttgtgatgccttcaactatgagcttagagagaagaatcattctgagggcactaggtgcagagcttcatctctcggaccagcgcataggccttaaaggaatgttggagaaaactgaagcgattttaagcaaaactcctggtggttacattccacaacaatttgaaaatcctgcaaaccccgagattcattaccgaaccacgggaccggaaatatggagagattcagccgggaaagtagatatattggtcgctggcgtagggactggtggaactgctactggagtagggaagttcctcaaggagcagaacaaagacatcaaggtttgtgtggtggaaccagtagaaagtccggtacttagcggaggtcaaccaggtccacatttgattcagggaattggctctggtatcgtcccattcaatttggacttaaccattgttgatgaaattattcaagtggcaggtgaagaggctattgaaacagccaagcttcttgccctcaaagaaggattactggtgggaatatcctctggagccgcagcagcggctgcgttaaaggttgcaaagcggccagaaaacgcggggaaactcattgtggtggtttttcctagtggaggagaacgttatttatcgactaaactgttcgattcgattagatatgaagcagagaatttgcctattgaatgaatgttggacgtgtgccggtttcgtgtgtaataagagacgttcgttccaagagtccaagatttcaatttgcttattactggtcaatgtgaaatgtataaaaagttgcatattcgattatgaataattttagttgact

SEQ ID NO: 76800 - protein, 323 aa, Arabidopsis thaliana; identical to SEQ ID NO: 75872
  peptide (1)..(323): Ceres Seq. ID no. 12325887
  misc_feature (11)..(300): Pfam Name: Pyridoxal-phosphate dependent enzyme Pfam Description: Pyridoxal-phosphate dependent enzyme
  misc_feature (1)..(323): Homolog of NCBI NO: 15241111 NR Description: cysteine synthase; protein id: At5g28020.1, by cDNA: 154690., supported by cDNA: gi_15983447, supported by gi_4996617 [Arabidopsis thaliana] >gi|4996618|dbj|BAA78561.1|
  misc_feature (1)..(323): Homolog of NCBI NO: 21553635 NR Description: cysteine synthase [Arabidopsis thaliana]
  misc_feature (1)..(323): Homolog of NCBI NO: 2245144 NR Description: O-acetylserine(thiol) lyase [Brassica juncea]
  misc_feature (1)..(323): Homolog of NCBI NO: 15241112 NR Description: cysteine synthase - like; protein id:
  misc_feature (2)..(323): Homolog of NCBI NO: 21593263 NR Description: putative cysteine synthase [Arabidopsis thaliana]
  misc_feature (2)..(323): Homolog of NCBI NO: 12322845 NR Description: putative cysteine synthase; 39489-37437
  misc_feature (2)..(323): Homolog of NCBI NO: 18397061 NR Description: putative cysteine synthase; protein id: supported by cDNA: 37566., supported by cDNA: gi_4996619 thaliana] >gi|25291706|pir||T52609 cysteine synthase (EC
  misc_feature (7)..(323): Homolog of NCBI NO: 38350579 NR Description: cysteine synthase [Nicotiana plumbaginifolia]
  misc_feature (1)..(323): Homolog of NCBI NO: 2493895 NR Description: Cysteine synthase (O-acetylserine sulfhydrylase)

SEQ ID NO: 76801 - protein, 304 aa, Arabidopsis thaliana; identical to SEQ ID NO: 75873
  peptide (1)..(304): Ceres Seq. ID no. 12325888
  misc_feature (1)..(281): Pfam Name: Pyridoxal-phosphate dependent enzyme Pfam Description: Pyridoxal-phosphate dependent enzyme
  misc_feature (1)..(304): Homolog of NCBI NO: 15241111 NR Description: cysteine synthase; protein id: At5g28020.1, by cDNA: 154690., supported by cDNA: gi_15983447, supported by gi_4996617 [Arabidopsis thaliana] >gi|4996618|dbj|BAA78561.1|
  misc_feature (1)..(304): Homolog of NCBI NO: 21553635 NR Description: cysteine synthase [Arabidopsis thaliana]
  misc_feature (1)..(304): Homolog of NCBI NO: 2245144 NR Description: O-acetylserine(thiol) lyase [Brassica juncea]
  misc_feature (1)..(304): Homolog of NCBI NO: 15241112 NR Description: cysteine synthase - like; protein id:
  misc_feature (1)..(304): Homolog of NCBI NO: 21593263 NR Description: putative cysteine synthase [Arabidopsis thaliana]
  misc_feature (1)..(304): Homolog of NCBI NO: 12322845 NR Description: putative cysteine synthase; 39489-37437
  misc_feature (1)..(304): Homolog of NCBI NO: 18397061 NR Description: putative cysteine synthase; protein id: supported by cDNA: 37566., supported by cDNA: gi_4996619 thaliana] >gi|25291706|pir||T52609 cysteine synthase (EC
  misc_feature (1)..(304): Homolog of NCBI NO: 38350579 NR Description: cysteine synthase [Nicotiana plumbaginifolia]
  misc_feature (1)..(304): Homolog of NCBI NO: 2493895 NR Description: Cysteine synthase (O-acetylserine sulfhydrylase)

SEQ ID NO: 76802 - protein, 284 aa, Arabidopsis thaliana; identical to SEQ ID NO: 75874
  peptide (1)..(284): Ceres Seq. ID no. 12325889
  misc_feature (1)..(261): Pfam Name: Pyridoxal-phosphate dependent enzyme Pfam Description: Pyridoxal-phosphate dependent enzyme
  misc_feature (1)..(284): Homolog of NCBI NO: 15241111 NR Description: cysteine synthase; protein id: At5g28020.1, by cDNA: 154690., supported by cDNA: gi_15983447, supported by gi_4996617 [Arabidopsis thaliana] >gi|4996618|dbj|BAA78561.1|
  misc_feature (1)..(284): Homolog of NCBI NO: 21553635 NR Description: cysteine synthase [Arabidopsis thaliana]
  misc_feature (1)..(284): Homolog of NCBI NO: 2245144 NR Description: O-acetylserine(thiol) lyase [Brassica juncea]
  misc_feature (1)..(284): Homolog of NCBI NO: 15241112 NR Description: cysteine synthase - like; protein id:
  misc_feature (1)..(284): Homolog of NCBI NO: 21593263 NR Description: putative cysteine synthase [Arabidopsis thaliana]
  misc_feature (1)..(284): Homolog of NCBI NO: 12322845 NR Description: putative cysteine synthase; 39489-37437
  misc_feature (1)..(284): Homolog of NCBI NO: 18397061 NR Description: putative cysteine synthase; protein id: supported by cDNA: 37566., supported by cDNA: gi_4996619 thaliana] >gi|25291706|pir||T52609 cysteine synthase (EC
  misc_feature (1)..(284): Homolog of NCBI NO: 38350579 NR Description: cysteine synthase [Nicotiana plumbaginifolia]
  misc_feature (1)..(284): Homolog of NCBI NO: 2493895 NR Description: Cysteine synthase (O-acetylserine sulfhydrylase)

SEQ ID NO: 76803 - DNA, 1829 bp, Arabidopsis thaliana
  misc_feature (1)..(1829): Ceres Seq. ID no. 12325986
  misc_feature: MA Experiment ID: 108434 Result: Down-regulated in Transcription
  misc_feature: MA Experiment 108434 PARAMETER Experiment Name: At_Root_Tips_cDNA_P Parameter: Tissue Value: Root Tips
  misc_feature: MA Experiment ID: 108435 Result: Up-regulated in Transcription
  misc_feature: MA Experiment 108435 PARAMETER Experiment Name: At_stm_Mutants_cDNA_P Parameter: Plant Line Value: wt Landsburg vs stm
  misc_feature: MA Experiment 108435 PARAMETER Experiment Name: At_stm_Mutants_cDNA_P Parameter: Tissue Value: Shoot Apical Meristem Region
  misc_feature: MA Experiment ID: 108561 Result: Up-regulated in Transcription
  misc_feature: MA Experiment 108561 PARAMETER Experiment Name: At_100uM_ABA_cDNA_P Parameter: Timepoint (hr) Value: 6
  misc_feature: MA Experiment 108561 PARAMETER Experiment Name: At_100uM_ABA_cDNA_P Parameter: Tissue Value: Aerial
  misc_feature: MA Experiment 108561 PARAMETER Experiment Name: At_100uM_ABA_cDNA_P Parameter: Treatment Value: 100uM ABA vs. No Treatment
  misc_feature: MA Experiment ID: 108573 Result: Up-regulated in Transcription
  misc_feature: MA Experiment 108573 PARAMETER Experiment Name: At_Drought_cDNA_P Parameter: Timepoint (hr) Value: 6
  misc_feature: MA Experiment 108573 PARAMETER Experiment Name: At_Drought_cDNA_P Parameter: Tissue Value: Aerial
  misc_feature: MA Experiment 108573 PARAMETER Experiment Name: At_Drought_cDNA_P Parameter: Treatment Value: Drought vs. No Drought
  misc_feature: MA Experiment ID: 108577 Result: Up-regulated in Transcription
  misc_feature: MA Experiment 108577 PARAMETER Experiment Name: At_42deg_Heat_cDNA_P Parameter: Temperature (deg C) Value: 42 vs. 22
  misc_feature: MA Experiment 108577 PARAMETER Experiment Name: At_42deg_Heat_cDNA_P Parameter: Timepoint (hr) Value: 6
  misc_feature: MA Experiment 108577 PARAMETER Experiment Name: At_42deg_Heat_cDNA_P Parameter: Tissue Value: Aerial
  misc_feature: MA Experiment ID: 108579 Result: Up-regulated in Transcription
  misc_feature: MA Experiment 108579 PARAMETER Experiment Name: At_4deg_Cold_cDNA_P Parameter: Temperature (deg C) Value: 4 vs. 22
  misc_feature: MA Experiment 108579 PARAMETER Experiment Name: At_4deg_Cold_cDNA_P Parameter: Timepoint (hr) Value: 6
  misc_feature: MA Experiment 108579 PARAMETER Experiment Name: At_4deg_Cold_cDNA_P Parameter: Tissue Value: Aerial
  misc_feature: MA Experiment ID: 108585 Result: Up-regulated in Transcription
  misc_feature: MA Experiment 108585 PARAMETER Experiment Name: At_5mM_NaNP_cDNA_P Parameter: Timepoint (hr) Value: 6
  misc_feature: MA Experiment 108585 PARAMETER Experiment Name: At_5mM_NaNP_cDNA_P Parameter: Tissue Value: Aerial
  misc_feature: MA Experiment 108585 PARAMETER Experiment Name: At_5mM_NaNP_cDNA_P Parameter: Treatment Value: null
  misc_feature: MA Experiment ID: 108595 Result: Down-regulated in Transcription
  misc_feature: MA Experiment 108595 PARAMETER Experiment Name: At_Ler-pi_Ovule_cDNA_P Parameter: Plant Line Value: null
  misc_feature: MA Experiment ID: 108668 Result: Up-regulated in Transcription
  misc_feature: MA Experiment 108668 PARAMETER Experiment Name: At_2mM_SA_cDNA_P Parameter: Plant Line Value: WS
  misc_feature: MA Experiment 108668 PARAMETER Experiment Name: At_2mM_SA_cDNA_P Parameter: Timepoint (hr) Value: 6
  misc_feature: MA Experiment 108668 PARAMETER Experiment Name: At_2mM_SA_cDNA_P Parameter: Treatment Value: 2mM SA vs. No Treatment
  misc_feature: MA Experiment ID: 20000089 Result: Down-regulated in Transcription
  misc_feature: MA Experiment ID: 20000090 Result: Down-regulated in Transcription
  misc_feature: MA Experiment ID: 20000182 Result: Up-regulated in Transcription
  misc_feature: MA Experiment 20000182 PARAMETER Experiment Name: At_2mM_SA_P Parameter: Age (day) Value: 14
  misc_feature: MA Experiment 20000182 PARAMETER Experiment Name: At_2mM_SA_P Parameter: Organism Value: A. thaliana
  misc_feature: MA Experiment 20000182 PARAMETER Experiment Name: At_2mM_SA_P Parameter: Plant Line Value: WS
  misc_feature: MA Experiment 20000182 PARAMETER Experiment Name: At_2mM_SA_P Parameter: Timepoint (hr) Value: 6
  misc_feature: MA Experiment 20000182 PARAMETER Experiment Name: At_2mM_SA_P Parameter: Tissue Value: Aerial
  misc_feature: MA Experiment 20000182 PARAMETER Experiment Name: At_2mM_SA_P Parameter: Treatment Value: 2mM SA vs. No Treatment
  misc_feature: MA Experiment ID: 20000184 Result: Up-regulated in Transcription
  misc_feature: MA Experiment 20000184 PARAMETER Experiment Name: At_Shoots__P Parameter: Age (day) Value: 7
  misc_feature: MA Experiment 20000184 PARAMETER Experiment Name: At_Shoots__P Parameter: Tissue Value: Shoots vs. Whole Plant
  misc_feature: MA Experiment ID: 20000185 Result: Up-regulated in Transcription
  misc_feature: MA Experiment 20000185 PARAMETER Experiment Name: At_Roots__P Parameter: Age (day) Value: 7 vs. 21
  misc_feature: MA Experiment 20000185 PARAMETER Experiment Name: At_Roots__P Parameter: Organism Value: A. thaliana
  misc_feature: MA Experiment 20000185 PARAMETER Experiment Name: At_Roots__P Parameter: Tissue Value: Roots vs. Whole Plant
  misc_feature: MA Experiment ID: 20000224 Result: Up-regulated in Transcription
  misc_feature: MA Experiment ID: 20000235 Result: Up-regulated in Transcription
  misc_feature: MA Experiment 20000235 PARAMETER Experiment Name: At_Siliques_P Parameter: Age (day) Value: 21
  misc_feature: MA Experiment 20000235 PARAMETER Experiment Name: At_Siliques_P Parameter: Organism Value: A. thaliana
  misc_feature: MA Experiment 20000235 PARAMETER Experiment Name: At_Siliques_P Parameter: Plant Line Value: WS
  misc_feature: MA Experiment 20000235 PARAMETER Experiment Name: At_Siliques_P Parameter: Tissue Value: 5-10mm Siliques vs. Whole Plant
  misc_feature: MA Experiment ID: 20000264 Result: Up-regulated in Transcription
  misc_feature: MA Experiment 20000264 PARAMETER Experiment Name: At_Open_Flower_P Parameter: Age (day) Value: 21
  misc_feature: MA Experiment 20000264 PARAMETER Experiment Name: At_Open_Flower_P Parameter: Plant Line Value: WS
  misc_feature: MA Experiment 20000264 PARAMETER Experiment Name: At_Open_Flower_P Parameter: Tissue Value: Open Flower vs. Whole Plant
  misc_feature: MA Experiment ID: 20000286 Result: Up-regulated in Transcription
  misc_feature: MA Experiment 20000286 PARAMETER Experiment Name: At_Open_Flower_P Parameter: Age (day) Value: 21
  misc_feature: MA Experiment 20000286 PARAMETER Experiment Name: At_Open_Flower_P Parameter: Plant Line Value: WS
  misc_feature: MA Experiment 20000286 PARAMETER Experiment Name: At_Open_Flower_P Parameter: Tissue Value: Half Open vs. Whole Plant
  misc_feature: MA Experiment ID: 20000439 Result: Up-regulated in Transcription
  misc_feature: MA Experiment 20000439 PARAMETER Experiment Name: At_Roots__P Parameter: Age (day) Value: 14 vs. 21
  misc_feature: MA Experiment 20000439 PARAMETER Experiment Name: At_Roots__P Parameter: Organism Value: A. thaliana
  misc_feature: MA Experiment 20000439 PARAMETER Experiment Name: At_Roots__P Parameter: Tissue Value: Roots vs. Whole Plant
  misc_feature: MA Experiment ID: 20000794 Result: Up-regulated in Transcription
  misc_feature: MA Experiment 20000794 PARAMETER Experiment Name: At_Petals_P Parameter: Age (day) Value: 23-25 days
  misc_feature: MA Experiment 20000794 PARAMETER Experiment Name: At_Petals_P Parameter: Plant Line Value: WS
  misc_feature: MA Experiment 20000794 PARAMETER Experiment Name: At_Petals_P Parameter: Tissue Value: Petals vs. Whole plant
  misc_feature: MA Experiment ID: 20001248 Result: Down-regulated in Transcription
  misc_feature: MA Experiment 20001248 PARAMETER Experiment Name: At_Far-red-induction_P Parameter: Age (day) Value: 7
  misc_feature: MA Experiment 20001248 PARAMETER Experiment Name: At_Far-red-induction_P Parameter: Light Value: Far-red vs. White
  misc_feature: MA Experiment 20001248 PARAMETER Experiment Name: At_Far-red-induction_P Parameter: Organism Value: A. thaliana
  misc_feature: MA Experiment 20001248 PARAMETER Experiment Name: At_Far-red-induction_P Parameter: Plant Line Value: Columbia
  misc_feature: MA Experiment 20001248 PARAMETER Experiment Name: At_Far-red-induction_P Parameter: Timepoint (hr) Value: 4
  misc_feature: MA Experiment 20001248 PARAMETER Experiment Name: At_Far-red-induction_P Parameter: Tissue Value: Whole Plant
  misc_feature: MA Experiment ID: 20001757 Result: Down-regulated in Transcription
  misc_feature: MA Experiment 20001757 PARAMETER Experiment Name: At_50mM_NH4NO3_L-to-H_P Parameter: Timepoint (hr) Value: 6
  misc_feature: MA Experiment 20001757 PARAMETER Experiment Name: At_50mM_NH4NO3_L-to-H_P Parameter: Tissue Value: Leaf
  misc_feature: MA Experiment 20001757 PARAMETER Experiment Name: At_50mM_NH4NO3_L-to-H_P Parameter: Treatment Value: 50mM NH4NO3 vs 100mM Mannitol
aatcatttgattatttcctcctctccgtatctgtgtctctcttctcttgatcttttagtgttcttgctttgtcgcttcaacgcttaagtttggatttgtgtgagtctgcataatcatggcgaggaagatgcttgttgatggtgagattgataaggtggcggctgatgaagccaacgcgacgcactatgattttgatttgtttgtcatcggtgccgggagtggcggtgttcgtgctgctaggttttcggctaatcatggcgctaaggttggtatttgtgagcttccatttcaccctattagctctgaggagattggaggcgttggtggaacctgtgttatccgtggttgtgttcctaaaaagattctcgtctatggagctacttacggtggtgaacttgaggatgctaaaaattatgggtgggaaataaatgagaaagtcgacttcacatggaagaagcttttgcaaaagaagactgatgagatactaagactgaataatatctacaagcggttattggcaaatgctgcggtgaaattgtatgaaggtgaaggaagagtagttggtcccaacgaagtggaggtgagacaaatagatggcacaaaaataagttataccgcaaagcacatattgattgccactggcagtcgggcgcaaaagcctaatattcctggacatgagctggctattacatctgatgaagctttgagcttggaagaatttcccaagcgtgctatagtgcttggaggagggtatattgctgtggagtttgcatcaatatggcgtggaatgggtgctactgtagatttattcttcaggaaggaacttccgctaaggggttttgatgacgaaatgagggcactagttgctagaaatcttgaaggaaggggcgttaatctgcatccacaaacaagtttgactcagttgacaaaaacagaccaggggatcaaagtcatatcgtcccatggggaggaattcgtggcagatgtcgtcctatttgctactggcagaagtcctaataccaaaagattgaatttagaagctgttggtgttgaacttgatcaggctggagctgtgaaggttgacgagtattcacgaactaatatacctagcatatgggctgtaggagatgccacaaaccgaattaaccttacacctgttgcgttaatggaggccacctgttttgcgaacactgcttttggtggaaagcctactaaagcagaatacagcaatgtcgcctgtgctgtattttgcataccaccactagctgtagtgggtctcagcgaagaagaagcagtagaacaagcaaccggtgatattctggtcttcacctcaggctttaatccaatgaagaacaccatttctggacgccaggaaaagacattgatgaagctaatagttgatgagaagagtgataaggttattggagcatccatgtgcggtcctgatgcagctgagatcatgcaggggattgcaattgcgctcaagtgtggagcaaccaaagcacaatttgatagcacggttgggatacatccatcttctgcagaggaatttgtgacaatgcgcagtgtgaccagacgcattgcccacaaacccaaacctaagacaaatctatgaaccgcaaaatataaagagctatatagcatgaaaactcggtacacttaatttgatcaaagagtcagacaacgatgagtttaatcatactcgtgtcccaataaaggatttgtaatttttgtttgtttgtatgatgcttctcttcttacttacttgagaaaacatcaaggtttcttctcttattgcttagtggaactttattacaaagaattattct

SEQ ID NO: 76804 - protein, 499 aa, Arabidopsis thaliana; identical to SEQ ID NO: 24219
  peptide (1)..(499): Ceres Seq. ID no. 12325987
  misc_feature (27)..(348): Pfam Name: Pyridine nucleotide-disulphide oxidoreductase Pfam Description: Pyridine nucleotide-disulphide oxidoreductase
  misc_feature (1)..(499): Homolog of NCBI NO: 15230074 NR Description: glutathione reductase, putative; protein id: supported by cDNA: gi_1022796, supported by cDNA: gi_13430631 thaliana] >gi|1346194|sp|P48641|GSHR_ARATH Glutathione reductase,
  misc_feature (1)..(499): Homolog of NCBI NO: 13430632 NR Description: putative glutathione reductase [Arabidopsis >gi|14532810|gb|AAK64087.1| putative glutathione reductase
  misc_feature (1)..(499): Homolog of NCBI NO: 21263645 NR Description: Glutathione reductase, cytosolic (GR) (GRase) glutathione reductase [Brassica rapa]
  misc_feature (1)..(499): Homolog of NCBI NO: 7431864 NR Description: glutathione-disulfide reductase (EC 1.8.1.7) -
  misc_feature (12)..(499): Homolog of NCBI NO: 2500115 NR Description: Glutathione reductase, chloroplast precursor (GR)
  misc_feature (1)..(499): Homolog of NCBI NO: 2500116 NR Description: Glutathione reductase, cytosolic (GR) (GRase)
  misc_feature (17)..(469): Homolog of NCBI NO: 10862871 NR Description: glutathione reductase [Mesembryanthemum
  misc_feature (1)..(499): Homolog of NCBI NO: 19860133 NR Description: Glutathione reductase, cytosolic (GR) (GRase)
  misc_feature (1)..(499): Homolog of NCBI NO: 7431855 NR Description: probable glutathione-disulfide reductase (EC - rice >gi|1841894|dbj|BAA11214.1| Glutathione Reductase [Oryza
  misc_feature (61)..(418): Homolog of NCBI NO: 6723469 NR Description: glutathione reductase [Betula pendula]

SEQ ID NO: 76805 - protein, 495 aa, Arabidopsis thaliana; identical to SEQ ID NO: 24220
  peptide (1)..(495): Ceres Seq. ID no. 12325988
  misc_feature (23)..(344): Pfam Name: Pyridine nucleotide-disulphide oxidoreductase Pfam Description: Pyridine nucleotide-disulphide oxidoreductase
  misc_feature (1)..(495): Homolog of NCBI NO: 15230074 NR Description: glutathione reductase, putative; protein id: supported by cDNA: gi_1022796, supported by cDNA: gi_13430631 thaliana] >gi|1346194|sp|P48641|GSHR_ARATH Glutathione reductase,
  misc_feature (1)..(495): Homolog of NCBI NO: 13430632 NR Description: putative glutathione reductase [Arabidopsis >gi|14532810|gb|AAK64087.1| putative glutathione reductase
  misc_feature (1)..(495): Homolog of NCBI NO: 21263645 NR Description: Glutathione reductase, cytosolic (GR) (GRase) glutathione reductase [Brassica rapa]
  misc_feature (1)..(495): Homolog of NCBI NO: 7431864 NR Description: glutathione-disulfide reductase (EC 1.8.1.7) -
  misc_feature (8)..(495): Homolog of NCBI NO: 2500115 NR Description: Glutathione reductase, chloroplast precursor (GR)
  misc_feature (1)..(495): Homolog of NCBI NO: 2500116 NR Description: Glutathione reductase, cytosolic (GR) (GRase)
  misc_feature (13)..(465): Homolog of NCBI NO: 10862871 NR Description: glutathione reductase [Mesembryanthemum
  misc_feature (1)..(495): Homolog of NCBI NO: 19860133 NR Description: Glutathione reductase, cytosolic (GR) (GRase)
  misc_feature (1)..(495): Homolog of NCBI NO: 7431855 NR Description: probable glutathione-disulfide reductase (EC - rice >gi|1841894|dbj|BAA11214.1| Glutathione Reductase [Oryza
  misc_feature (57)..(414): Homolog of NCBI NO: 6723469 NR Description: glutathione reductase [Betula pendula]

SEQ ID NO: 76806 - protein, 275 aa, Arabidopsis thaliana; identical to SEQ ID NO: 24221
  peptide (1)..(275): Ceres Seq. ID no. 12325989
  misc_feature (1)..(124): Pfam Name: Pyridine nucleotide-disulphide oxidoreductase Pfam Description: Pyridine nucleotide-disulphide oxidoreductase
  misc_feature (1)..(275): Homolog of NCBI NO: 15230074 NR Description: glutathione reductase, putative; protein id: supported by cDNA: gi_1022796, supported by cDNA: gi_13430631 thaliana] >gi|1346194|sp|P48641|GSHR_ARATH Glutathione reductase,
  misc_feature (1)..(275): Homolog of NCBI NO: 13430632 NR Description: putative glutathione reductase [Arabidopsis >gi|14532810|gb|AAK64087.1| putative glutathione reductase
  misc_feature (1)..(275): Homolog of NCBI NO: 21263645 NR Description: Glutathione reductase, cytosolic (GR) (GRase) glutathione reductase [Brassica rapa]
  misc_feature (1)..(275): Homolog of NCBI NO: 7431864 NR Description: glutathione-disulfide reductase (EC 1.8.1.7) -
  misc_feature (1)..(275): Homolog of NCBI NO: 2500115 NR Description: Glutathione reductase, chloroplast precursor (GR)
  misc_feature (1)..(275): Homolog of NCBI NO: 2500116 NR Description: Glutathione reductase, cytosolic (GR) (GRase)
  misc_feature (1)..(245): Homolog of NCBI NO: 10862871 NR Description: glutathione reductase [Mesembryanthemum
  misc_feature (1)..(275): Homolog of NCBI NO: 19860133 NR Description: Glutathione reductase, cytosolic (GR) (GRase)
  misc_feature (1)..(275): Homolog of NCBI NO: 7431855 NR Description: probable glutathione-disulfide reductase (EC - rice >gi|1841894|dbj|BAA11214.1| Glutathione Reductase [Oryza
  misc_feature (1)..(194): Homolog of NCBI NO: 6723469 NR Description: glutathione reductase [Betula pendula]

SEQ ID NO: 76807 - DNA, 1158 bp, Arabidopsis thaliana
  misc_feature (1)..(1158): Ceres Seq. ID no. 12326070
  misc_feature: MA Experiment ID: 108434 Result: Down-regulated in Transcription
  misc_feature: MA Experiment 108434 PARAMETER Experiment Name: At_Root_Tips_cDNA_P Parameter: Tissue Value: Root Tips
  misc_feature: MA Experiment ID: 108462 Result: Down-regulated in Transcription
  misc_feature: MA Experiment 108462 PARAMETER Experiment Name: At_Germinating_Seeds_cDNA_P Parameter: Age (day) Value: 2 vs. 0
  misc_feature: MA Experiment 108462 PARAMETER Experiment Name: At_Germinating_Seeds_cDNA_P Parameter: Tissue Value: Germinating Seeds
  misc_feature: MA Experiment ID: 108464 Result: Down-regulated in Transcription
  misc_feature: MA Experiment 108464 PARAMETER Experiment Name: At_Germinating_Seeds_cDNA_P Parameter: Age (day) Value: 4 vs. 0
  misc_feature: MA Experiment 108464 PARAMETER Experiment Name: At_Germinating_Seeds_cDNA_P Parameter: Tissue Value: Germinating Seeds
  misc_feature: MA Experiment ID: 108469 Result: Up-regulated in Transcription
  misc_feature: MA Experiment ID: 108574 Result: Up-regulated in Transcription
  misc_feature: MA Experiment 108574 PARAMETER Experiment Name: At_Wounding__cDNA_P Parameter: Timepoint (hr) Value: 1
  misc_feature: MA Experiment 108574 PARAMETER Experiment Name: At_Wounding__cDNA_P Parameter: Tissue Value: Aerial
  misc_feature: MA Experiment 108574 PARAMETER Experiment Name: At_Wounding__cDNA_P Parameter: Treatment Value: Wounding vs. No Wounding
  misc_feature: MA Experiment ID: 108579 Result: Up-regulated in Transcription
  misc_feature: MA Experiment 108579 PARAMETER Experiment Name: At_4deg_Cold_cDNA_P Parameter: Temperature (deg C) Value: 4 vs. 22
  misc_feature: MA Experiment 108579 PARAMETER Experiment Name: At_4deg_Cold_cDNA_P Parameter: Timepoint (hr) Value: 6
  misc_feature: MA Experiment 108579 PARAMETER Experiment Name: At_4deg_Cold_cDNA_P Parameter: Tissue Value: Aerial
  misc_feature: MA Experiment ID: 108585 Result: Up-regulated in Transcription
  misc_feature: MA Experiment 108585 PARAMETER Experiment Name: At_5mM_NaNP_cDNA_P Parameter: Timepoint (hr) Value: 6
  misc_feature: MA Experiment 108585 PARAMETER Experiment Name: At_5mM_NaNP_cDNA_P Parameter: Tissue Value: Aerial
  misc_feature: MA Experiment 108585 PARAMETER Experiment Name: At_5mM_NaNP_cDNA_P Parameter: Treatment Value: null
  misc_feature: MA Experiment ID: 108594 Result: Up-regulated in Transcription
  misc_feature: MA Experiment 108594 PARAMETER Experiment Name: At_Ler-rhl_Root_cDNA_P Parameter: Plant Line Value: null
  misc_feature: MA Experiment ID: 108595 Result: Up-regulated in Transcription
  misc_feature: MA Experiment 108595 PARAMETER Experiment Name: At_Ler-pi_Ovule_cDNA_P Parameter: Plant Line Value: null
  misc_feature: MA Experiment ID: 108668 Result: Up-regulated in Transcription
  misc_feature: MA Experiment 108668 PARAMETER Experiment Name: At_2mM_SA_cDNA_P Parameter: Plant Line Value: WS
  misc_feature: MA Experiment 108668 PARAMETER Experiment Name: At_2mM_SA_cDNA_P Parameter: Timepoint (hr) Value: 6
  misc_feature: MA Experiment 108668 PARAMETER Experiment Name: At_2mM_SA_cDNA_P Parameter: Treatment Value: 2mM SA vs. No Treatment
  misc_feature: MA Experiment ID: 20000072 Result: Up-regulated in Transcription
  misc_feature: MA Experiment 20000072 PARAMETER Experiment Name: At_100uM_ABA_Mutants_cDNA_P Parameter: Plant Line Value: CS8105
  misc_feature: MA Experiment 20000072 PARAMETER Experiment Name: At_100uM_ABA_Mutants_cDNA_P Parameter: Timepoint (hr) Value: 6
  misc_feature: MA Experiment 20000072 PARAMETER Experiment Name: At_100uM_ABA_Mutants_cDNA_P Parameter: Tissue Value: Aerial
  misc_feature: MA Experiment 20000072 PARAMETER Experiment Name: At_100uM_ABA_Mutants_cDNA_P Parameter: Treatment Value: 100uM ABA vs. No Treatment
  misc_feature: MA Experiment ID: 20000087 Result: Up-regulated in Transcription
  misc_feature: MA Experiment 20000087 PARAMETER Experiment Name: At_100uM_ABA_Mutants_cDNA_P Parameter: Plant Line Value: WS
  misc_feature: MA Experiment 20000087 PARAMETER Experiment Name: At_100uM_ABA_Mutants_cDNA_P Parameter: Timepoint (hr) Value: 6
  misc_feature: MA Experiment 20000087 PARAMETER Experiment Name: At_100uM_ABA_Mutants_cDNA_P Parameter: Tissue Value: Aerial
  misc_feature: MA Experiment 20000087 PARAMETER Experiment Name: At_100uM_ABA_Mutants_cDNA_P Parameter: Treatment Value: 100uM ABA vs. No Treatment
  misc_feature: MA Experiment ID: 20000088 Result: Up-regulated in Transcription
  misc_feature: MA Experiment 20000088 PARAMETER Experiment Name: At_100uM_ABA_Mutants_cDNA_P Parameter: Plant Line Value: Landsberg
  misc_feature: MA Experiment 20000088 PARAMETER Experiment Name: At_100uM_ABA_Mutants_cDNA_P Parameter: Timepoint (hr) Value: 6
  misc_feature: MA Experiment 20000088 PARAMETER Experiment Name: At_100uM_ABA_Mutants_cDNA_P Parameter: Tissue Value: Aerial
  misc_feature: MA Experiment 20000088 PARAMETER Experiment Name: At_100uM_ABA_Mutants_cDNA_P Parameter: Treatment Value: 100uM ABA vs. No Treatment
  misc_feature: MA Experiment ID: 20000089 Result: Up-regulated in Transcription
  misc_feature: MA Experiment ID: 20000112 Result: Up-regulated in Transcription
  misc_feature: MA Experiment 20000112 PARAMETER Experiment Name: At_42deg_Heat_cDNA_P Parameter: Temperature (deg C) Value: 42 vs. 22
  misc_feature: MA Experiment 20000112 PARAMETER Experiment Name: At_42deg_Heat_cDNA_P Parameter: Timepoint (hr) Value: 2
  misc_feature: MA Experiment 20000112 PARAMETER Experiment Name: At_42deg_Heat_cDNA_P Parameter: Tissue Value: Aerial
  misc_feature: MA Experiment ID: 20000113 Result: Up-regulated in Transcription
  misc_feature: MA Experiment 20000113 PARAMETER Experiment Name: At_42deg_Heat_cDNA_P Parameter: Temperature (deg C) Value: 42 vs. 22
  misc_feature: MA Experiment 20000113 PARAMETER Experiment Name: At_42deg_Heat_cDNA_P Parameter: Timepoint (hr) Value: 8
  misc_feature: MA Experiment 20000113 PARAMETER Experiment Name: At_42deg_Heat_cDNA_P Parameter: Tissue Value: Aerial
  misc_feature: MA Experiment ID: 20000117 Result: Up-regulated in Transcription
  misc_feature: MA Experiment 20000117 PARAMETER Experiment Name: At_100uM_ABA_Mutants_cDNA_P Parameter: Plant Line Value: Columbia
  misc_feature: MA Experiment 20000117 PARAMETER Experiment Name: At_100uM_ABA_Mutants_cDNA_P Parameter: Timepoint (hr) Value: 6
  misc_feature: MA Experiment 20000117 PARAMETER Experiment Name: At_100uM_ABA_Mutants_cDNA_P Parameter: Tissue Value: Aerial
  misc_feature: MA Experiment 20000117 PARAMETER Experiment Name: At_100uM_ABA_Mutants_cDNA_P Parameter: Treatment Value: 100uM ABA vs. No Treatment
  misc_feature: MA Experiment ID: 20000182 Result: Up-regulated in Transcription
  misc_feature: MA Experiment 20000182 PARAMETER Experiment Name: At_2mM_SA_P Parameter: Age (day) Value: 14
  misc_feature: MA Experiment 20000182 PARAMETER Experiment Name: At_2mM_SA_P Parameter: Organism Value: A. thaliana
  misc_feature: MA Experiment 20000182 PARAMETER Experiment Name: At_2mM_SA_P Parameter: Plant Line Value: WS
  misc_feature: MA Experiment 20000182 PARAMETER Experiment Name: At_2mM_SA_P Parameter: Timepoint (hr) Value: 6
  misc_feature: MA Experiment 20000182 PARAMETER Experiment Name: At_2mM_SA_P Parameter: Tissue Value: Aerial
  misc_feature: MA Experiment 20000182 PARAMETER Experiment Name: At_2mM_SA_P Parameter: Treatment Value: 2mM SA vs. No Treatment
  misc_feature: MA Experiment ID: 20000184 Result: Down-regulated in Transcription
  misc_feature: MA Experiment 20000184 PARAMETER Experiment Name: At_Shoots__P Parameter: Age (day) Value: 7
  misc_feature: MA Experiment 20000184 PARAMETER Experiment Name: At_Shoots__P Parameter: Tissue Value: Shoots vs. Whole Plant
  misc_feature: MA Experiment ID: 20000185 Result: Down-regulated in Transcription
  misc_feature: MA Experiment 20000185 PARAMETER Experiment Name: At_Roots__P Parameter: Age (day) Value: 7 vs. 21
  misc_feature: MA Experiment 20000185 PARAMETER Experiment Name: At_Roots__P Parameter: Organism Value: A. thaliana
  misc_feature: MA Experiment 20000185 PARAMETER Experiment Name: At_Roots__P Parameter: Tissue Value: Roots vs. Whole Plant
  misc_feature: MA Experiment ID: 20000224 Result: Up-regulated in Transcription
  misc_feature: MA Experiment ID: 20000264 Result: Down-regulated in Transcription
  misc_feature: MA Experiment 20000264 PARAMETER Experiment Name: At_Open_Flower_P Parameter: Age (day) Value: 21
  misc_feature: MA Experiment 20000264 PARAMETER Experiment Name: At_Open_Flower_P Parameter: Plant Line Value: WS
  misc_feature: MA Experiment 20000264 PARAMETER Experiment Name: At_Open_Flower_P Parameter: Tissue Value: Open Flower vs. Whole Plant
  misc_feature: MA Experiment ID: 20000265 Result: Down-regulated in Transcription
  misc_feature: MA Experiment 20000265 PARAMETER Experiment Name: At_Open_Flower_P Parameter: Age (day) Value: 21
  misc_feature: MA Experiment 20000265 PARAMETER Experiment Name: At_Open_Flower_P Parameter: Plant Line Value: WS
  misc_feature: MA Experiment 20000265 PARAMETER Experiment Name: At_Open_Flower_P Parameter: Tissue Value: Closed Flower vs. Whole Plant
  misc_feature: MA Experiment ID: 20000267 Result: Up-regulated in Transcription
  misc_feature: MA Experiment 20000267 PARAMETER Experiment Name: At_Drought_P Parameter: Age (day) Value: 7
  misc_feature: MA Experiment 20000267 PARAMETER Experiment Name: At_Drought_P Parameter: Organism Value: A. thaliana
  misc_feature: MA Experiment 20000267 PARAMETER Experiment Name: At_Drought_P Parameter: Plant Line Value: WS
  misc_feature: MA Experiment 20000267 PARAMETER Experiment Name: At_Drought_P Parameter: Timepoint (hr) Value: 6
  misc_feature: MA Experiment 20000267 PARAMETER Experiment Name: At_Drought_P Parameter: Tissue Value: Whole Plant
  misc_feature: MA Experiment 20000267 PARAMETER Experiment Name: At_Drought_P Parameter: Treatment Value: Drought vs. No Drought
  misc_feature: MA Experiment ID: 20000268 Result: Down-regulated in Transcription
  misc_feature: MA Experiment 20000268 PARAMETER Experiment Name: At_100mM_NaCl__P Parameter: Age (day) Value: 14
  misc_feature: MA Experiment 20000268 PARAMETER Experiment Name: At_100mM_NaCl__P Parameter: Organism Value: A. thaliana
  misc_feature: MA Experiment 20000268 PARAMETER Experiment Name: At_100mM_NaCl__P Parameter: Plant Line Value: WS
  misc_feature: MA Experiment 20000268 PARAMETER Experiment Name: At_100mM_NaCl__P Parameter: Timepoint (hr) Value: 6
  misc_feature: MA Experiment 20000268 PARAMETER Experiment Name: At_100mM_NaCl__P Parameter: Tissue Value: Whole Plant
  misc_feature: MA Experiment 20000268 PARAMETER Experiment Name: At_100mM_NaCl__P Parameter: Treatment Value: 100mM NaCl vs. No Treatment
  misc_feature: MA Experiment ID: 20000438 Result: Down-regulated in Transcription
  misc_feature: MA Experiment 20000438 PARAMETER Experiment Name: At_Shoots__P Parameter: Age (day) Value: 14
  misc_feature: MA Experiment 20000438 PARAMETER Experiment Name: At_Shoots__P Parameter: Tissue Value: Shoots vs. Whole Plant
  misc_feature: MA Experiment ID: 20000439 Result: Down-regulated in Transcription
  misc_feature: MA Experiment 20000439 PARAMETER Experiment Name: At_Roots__P Parameter: Age (day) Value: 14 vs. 21
  misc_feature: MA Experiment 20000439 PARAMETER Experiment Name: At_Roots__P Parameter: Organism Value: A. thaliana
  misc_feature: MA Experiment 20000439 PARAMETER Experiment Name: At_Roots__P Parameter: Tissue Value: Roots vs. Whole Plant
  misc_feature: MA Experiment ID: 20000441 Result: Up-regulated in Transcription
  misc_feature: MA Experiment 20000441 PARAMETER Experiment Name: At_1uM_BR-BRZ__P Parameter: Tissue Value: Shoot Apices
  misc_feature: MA Experiment 20000441 PARAMETER Experiment Name: At_1uM_BR-BRZ__P Parameter: Treatment Value: 1uM BR vs. No Treatment
  misc_feature: MA Experiment ID: 20000460 Result: Up-regulated in Transcription
  misc_feature: MA Experiment 20000460 PARAMETER Experiment Name: At_10percent_PEG_P Parameter: Age (day) Value: 12
  misc_feature: MA Experiment 20000460 PARAMETER Experiment Name: At_10percent_PEG_P Parameter: Organism Value: A. thaliana
  misc_feature: MA Experiment 20000460 PARAMETER Experiment Name: At_10percent_PEG_P Parameter: Plant Line Value: WS
  misc_feature: MA Experiment 20000460 PARAMETER Experiment Name: At_10percent_PEG_P Parameter: Timepoint (day) Value: 12
  misc_feature: MA Experiment 20000460 PARAMETER Experiment Name: At_10percent_PEG_P Parameter: Tissue Value: Whole Plant
  misc_feature: MA Experiment 20000460 PARAMETER Experiment Name: At_10percent_PEG_P Parameter: Treatment Value: 10percent PEG vs. No Treatment
  misc_feature: MA Experiment ID: 20000495 Result: Down-regulated in Transcription
  misc_feature: MA Experiment 20000495 PARAMETER Experiment Name: At_Guard_Cells_P Parameter: Harvest Date Value: 8/2/2002
  misc_feature: MA Experiment 20000495 PARAMETER Experiment Name: At_Guard_Cells_P Parameter: Organism Value: A. thaliana
  misc_feature: MA Experiment 20000495 PARAMETER Experiment Name: At_Guard_Cells_P Parameter: Tissue Value: Guard Cells vs. Leaves
  misc_feature: MA Experiment ID: 20000496 Result: Down-regulated in Transcription
  misc_feature: MA Experiment 20000496 PARAMETER Experiment Name: At_Guard_Cells_P Parameter: Harvest Date Value: 7/19/2002
  misc_feature: MA Experiment 20000496 PARAMETER Experiment Name: At_Guard_Cells_P Parameter: Organism Value: Canola
  misc_feature: MA Experiment 20000496 PARAMETER Experiment Name: At_Guard_Cells_P Parameter: Tissue Value: Guard Cells vs. Leaves
  misc_feature: MA Experiment ID: 20000527 Result: Up-regulated in Transcription
  misc_feature: MA Experiment 20000527 PARAMETER Experiment Name: At_10percent_PEG_P Parameter: Age (day) Value: 20
  misc_feature: MA Experiment 20000527 PARAMETER Experiment Name: At_10percent_PEG_P Parameter: Organism Value: A. thaliana
  misc_feature: MA Experiment 20000527 PARAMETER Experiment Name: At_10percent_PEG_P Parameter: Plant Line Value: WS
  misc_feature: MA Experiment 20000527 PARAMETER Experiment Name: At_10percent_PEG_P Parameter: Timepoint (day) Value: 20
  misc_feature: MA Experiment 20000527 PARAMETER Experiment Name: At_10percent_PEG_P Parameter: Tissue Value: Whole Plant
  misc_feature: MA Experiment 20000527 PARAMETER Experiment Name: At_10percent_PEG_P Parameter: Treatment Value: 10percent PEG vs. No Treatment
  misc_feature: MA Experiment ID: 20000606 Result: Up-regulated in Transcription
  misc_feature: MA Experiment 20000606 PARAMETER Experiment Name: At_CS8548_Mutant_P Parameter: Age (day) Value: 14
  misc_feature: MA Experiment 20000606 PARAMETER Experiment Name: At_CS8548_Mutant_P Parameter: Plant Line Value: CS8548 vs. wt
  misc_feature: MA Experiment 20000606 PARAMETER Experiment Name: At_CS8548_Mutant_P Parameter: Tissue Value: Whole Plant
  misc_feature: MA Experiment ID: 20001247 Result: Up-regulated in Transcription
  misc_feature: MA Experiment 20001247 PARAMETER Experiment Name: At_Far-red-induction_P Parameter: Age (day) Value: 7
  misc_feature: MA Experiment 20001247 PARAMETER Experiment Name: At_Far-red-induction_P Parameter: Light Value: Far-red vs. White
  misc_feature: MA Experiment 20001247 PARAMETER Experiment Name: At_Far-red-induction_P Parameter: Organism Value: A. thaliana
  misc_feature: MA Experiment 20001247 PARAMETER Experiment Name: At_Far-red-induction_P Parameter: Plant Line Value: Columbia
  misc_feature: MA Experiment 20001247 PARAMETER Experiment Name: At_Far-red-induction_P Parameter: Timepoint (hr) Value: 1
  misc_feature: MA Experiment 20001247 PARAMETER Experiment Name: At_Far-red-induction_P Parameter: Tissue Value: Whole Plant
  misc_feature: MA Experiment ID: 20001557 Result: Up-regulated in Transcription
  misc_feature: MA Experiment 20001557 PARAMETER Experiment Name: At_Drought_Soil_Dry_P Parameter: Age (day) Value: 27
  misc_feature: MA Experiment 20001557 PARAMETER Experiment Name: At_Drought_Soil_Dry_P Parameter: Organism Value: A. thaliana
  misc_feature: MA Experiment 20001557 PARAMETER Experiment Name: At_Drought_Soil_Dry_P Parameter: Plant Line Value: WS
  misc_feature: MA Experiment 20001557 PARAMETER Experiment Name: At_Drought_Soil_Dry_P Parameter: Post Timepoint (hr) Value: 3
  misc_feature: MA Experiment 20001557 PARAMETER Experiment Name: At_Drought_Soil_Dry_P Parameter: Post-Treatment Value: Re-Water vs. No Drought
  misc_feature: MA Experiment 20001557 PARAMETER Experiment Name: At_Drought_Soil_Dry_P Parameter: Timepoint (day) Value: 13
  misc_feature: MA Experiment 20001557 PARAMETER Experiment Name: At_Drought_Soil_Dry_P Parameter: Treatment Value: Drought vs. No Drought
  misc_feature: MA Experiment ID: 20001558 Result: Up-regulated in Transcription
  misc_feature: MA Experiment 20001558 PARAMETER Experiment Name: At_Drought_Soil_Dry_P Parameter: Age (day) Value: 27
  misc_feature: MA Experiment 20001558 PARAMETER Experiment Name: At_Drought_Soil_Dry_P Parameter: Organism Value: A. thaliana
  misc_feature: MA Experiment 20001558 PARAMETER Experiment Name: At_Drought_Soil_Dry_P Parameter: Plant Line Value: WS
  misc_feature: MA Experiment 20001558 PARAMETER Experiment Name: At_Drought_Soil_Dry_P Parameter: Post Timepoint (hr) Value: 6
  misc_feature: MA Experiment 20001558 PARAMETER Experiment Name: At_Drought_Soil_Dry_P Parameter: Post-Treatment Value: Re-Water vs. No Drought
  misc_feature: MA Experiment 20001558 PARAMETER Experiment Name: At_Drought_Soil_Dry_P Parameter: Timepoint (day) Value: 13
  misc_feature: MA Experiment 20001558 PARAMETER Experiment Name: At_Drought_Soil_Dry_P Parameter: Treatment Value: Drought vs. No Drought
  misc_feature: MA Experiment ID: 20001560 Result: Up-regulated in Transcription
  misc_feature: MA Experiment 20001560 PARAMETER Experiment Name: At_Drought_Soil_Dry_P Parameter: Age (day) Value: 28
  misc_feature: MA Experiment 20001560 PARAMETER Experiment Name: At_Drought_Soil_Dry_P Parameter: Organism Value: A. thaliana
  misc_feature: MA Experiment 20001560 PARAMETER Experiment Name: At_Drought_Soil_Dry_P Parameter: Plant Line Value: WS
  misc_feature: MA Experiment 20001560 PARAMETER Experiment Name: At_Drought_Soil_Dry_P Parameter: Post Timepoint (hr) Value: None
  misc_feature: MA Experiment 20001560 PARAMETER Experiment Name: At_Drought_Soil_Dry_P Parameter: Post-Treatment Value: None
  misc_feature: MA Experiment 20001560 PARAMETER Experiment Name: At_Drought_Soil_Dry_P Parameter: Timepoint (day) Value: 14
  misc_feature: MA Experiment 20001560 PARAMETER Experiment Name: At_Drought_Soil_Dry_P Parameter: Treatment Value: Drought vs. No Drought
  misc_feature: MA Experiment ID: 20001904 Result: Down-regulated in Transcription
  misc_feature: MA Experiment 20001904 PARAMETER Experiment Name: At_Drought_Reproduction_P Parameter: Age (day) Value: 37
  misc_feature: MA Experiment 20001904 PARAMETER Experiment Name: At_Drought_Reproduction_P Parameter: Organism Value: A. thaliana
  misc_feature: MA Experiment 20001904 PARAMETER Experiment Name: At_Drought_Reproduction_P Parameter: Plant Line Value: WS
  misc_feature: MA Experiment 20001904 PARAMETER Experiment Name: At_Drought_Reproduction_P Parameter: Timepoint (day) Value: 7
  misc_feature: MA Experiment 20001904 PARAMETER Experiment Name: At_Drought_Reproduction_P Parameter: Tissue Value: Rosettes
  misc_feature: MA Experiment 20001904 PARAMETER Experiment Name: At_Drought_Reproduction_P Parameter: Treatment Value: Drought vs. No Drought
attcagtcggaccaacttgtgaccgaagaaagcaaattgagactacgcaccaactagtcctttggtttgtatcttaagataaaggtttcttttatggacggttcttcgtttctcgacatctctctcgatctcaacaccaatcctttctccgcaaaacttccgaagaaggaggtctcagttttggcttctactcacttaaagaggaaatggttggagcaagacgagagcgcaagtgagttacgagaggagctaaacagagttaattcagagaacaagaagctaacagagatgttagctagagtctgtgagagctacaacgaactacataatcatttggagaagcttcagagtcgccagagccctgaaatcgagcagaccgatataccgataaagaaaagaaaacaagacccggatgagttcttaggctttcctattggactcagtagtggaaaaactgagaacagctccagcaacgaagatcatcatcatcatcatcagcaacatgagcagaaaaatcagcttctttcatgtaaaagaccagtcactgatagcttcaacaaagcaaaagtttcgactgtctacgtgcctactgaaacatcggacacaagcttgacagttaaagatggatttcaatggaggaaatacggacaaaaggttacaagagacaacccgtcacctagagcttactttagatgctcgtttgcaccgtcttgtccagtaaaaaagaaggtacaacgcagcgcagaggatccatctttacttgtagcgacatacgaagggacgcataaccacttgggtccaaatgcttctgaaggggatgctacaagccagggtgggtcaagcacagtgactttggatctggttaatggctgtcatagactagcgttggagaaaaacgaaagggataatacgatgcaagaggttctgattcaacaaatggcgtcatcgttaacaaaagattcgaaatttacagctgctcttgctgctgctatatctgggaggttaatggagcaatctagaacatgaacgtttttagtgaatgtattgtttttgtttgtttagaatgattcttcgttttcgaattgtgtctttcgattaggagataaaagatgtatataaatattataagtagatgaagaaatcgtataagtattcgag

SEQ ID NO: 76808 - protein, 310 aa, Arabidopsis thaliana
  peptide (1)..(310): Ceres Seq. ID no. 12326071
  misc_feature (175)..(235): Pfam Name: WRKY DNA -binding domain Pfam Description: WRKY DNA -binding domain
  misc_feature (1)..(310): Homolog of NCBI NO: 18417877 NR Description: WRKY family transcription factor; protein id: supported by cDNA: 40692., supported by cDNA: gi_13506730, by cDNA: gi_16226519 [Arabidopsis thaliana]
  misc_feature (1)..(310): Homolog of NCBI NO: 13506731 NR Description: WRKY DNA-binding protein 18 [Arabidopsis thaliana]
  misc_feature (24)..(303): Homolog of NCBI NO: 7486317 NR Description: hypothetical protein F28M20.10 - Arabidopsis >gi|3281848|emb|CAA19743.1| putative protein [Arabidopsis >gi|7270083|emb|CAB79898.1| putative protein [Arabidopsis
  misc_feature (149)..(310): Homolog of NCBI NO: 17980964 NR Description: WRKY transcription factor 60 [Arabidopsis
  misc_feature (12)..(128): Homolog of NCBI NO: 17980964 NR Description: WRKY transcription factor 60 [Arabidopsis
  misc_feature (149)..(310): Homolog of NCBI NO: 15224660 NR Description: WRKY family transcription factor; protein id: supported by cDNA: 30071., supported by cDNA: gi_17980963 thaliana] >gi|20978792|sp|Q9SK33|WR60_ARATH Probable WRKY
  misc_feature (12)..(128): Homolog of NCBI NO: 15224660 NR Description: WRKY family transcription factor; protein id: supported by cDNA: 30071., supported by cDNA: gi_17980963 thaliana] >gi|20978792|sp|Q9SK33|WR60_ARATH Probable WRKY
  misc_feature (149)..(310): Homolog of NCBI NO: 21592591 NR Description: putative WRKY-type DNA binding protein
  misc_feature (12)..(128): Homolog of NCBI NO: 21592591 NR Description: putative WRKY-type DNA binding protein
  misc_feature (120)..(310): Homolog of NCBI NO: 40060529 NR Description: putative WRKY4 transcription factor [Vitis
MDGSSFLDISLDLNTNPFSAKLPKKEVSVLASTHLKRKWLEQDESASELREELNRVNSENKKLTEMLARVCESYNELHNHLEKLQSRQSPEIEQTDIPIKKRKQDPDEFLGFPIGLSSGKTENSSSNEDHHHHHQQHEQKNQLLSCKRPVTDSFNKAKVSTVYVPTETSDTSLTVKDGFQWRKYGQKVTRDNPSPRAYFRCSFAPSCPVKKKVQRSAEDPSLLVATYEGTHNHLGPNASEGDATSQGGSSTVTLDLVNGCHRLALEKNERDNTMQEVLIQQMASSLTKDSKFTAALAAAISGRLMEQSRT

SEQ ID NO: 76809 - protein, 245 aa, Arabidopsis thaliana
  peptide (1)..(245): Ceres Seq. ID no. 12326072
  misc_feature (110)..(170): Pfam Name: WRKY DNA -binding domain Pfam Description: WRKY DNA -binding domain
  misc_feature (1)..(245): Homolog of NCBI NO: 18417877 NR Description: WRKY family transcription factor; protein id: supported by cDNA: 40692., supported by cDNA: gi_13506730, by cDNA: gi_16226519 [Arabidopsis thaliana]
  misc_feature (1)..(245): Homolog of NCBI NO: 13506731 NR Description: WRKY DNA-binding protein 18 [Arabidopsis thaliana]
  misc_feature (1)..(238): Homolog of NCBI NO: 7486317 NR Description: hypothetical protein F28M20.10 - Arabidopsis >gi|3281848|emb|CAA19743.1| putative protein [Arabidopsis >gi|7270083|emb|CAB79898.1| putative protein [Arabidopsis
  misc_feature (84)..(245): Homolog of NCBI NO: 17980964 NR Description: WRKY transcription factor 60 [Arabidopsis
  misc_feature (1)..(63): Homolog of NCBI NO: 17980964 NR Description: WRKY transcription factor 60 [Arabidopsis
  misc_feature (84)..(245): Homolog of NCBI NO: 15224660 NR Description: WRKY family transcription factor; protein id: supported by cDNA: 30071., supported by cDNA: gi_17980963 thaliana] >gi|20978792|sp|Q9SK33|WR60_ARATH Probable WRKY
  misc_feature (1)..(63): Homolog of NCBI NO: 15224660 NR Description: WRKY family transcription factor; protein id: supported by cDNA: 30071., supported by cDNA: gi_17980963 thaliana] >gi|20978792|sp|Q9SK33|WR60_ARATH Probable WRKY
  misc_feature (84)..(245): Homolog of NCBI NO: 21592591 NR Description: putative WRKY-type DNA binding protein
  misc_feature (1)..(63): Homolog of NCBI NO: 21592591 NR Description: putative WRKY-type DNA binding protein
  misc_feature (55)..(245): Homolog of NCBI NO: 40060529 NR Description: putative WRKY4 transcription factor [Vitis
MLARVCESYNELHNHLEKLQSRQSPEIEQTDIPIKKRKQDPDEFLGFPIGLSSGKTENSSSNEDHHHHHQQHEQKNQLLSCKRPVTDSFNKAKVSTVYVPTETSDTSLTVKDGFQWRKYGQKVTRDNPSPRAYFRCSFAPSCPVKKKVQRSAEDPSLLVATYEGTHNHLGPNASEGDATSQGGSSTVTLDLVNGCHRLALEKNERDNTMQEVLIQQMASSLTKDSKFTAALAAAISGRLMEQSRT

SEQ ID NO: 76810 - DNA, 1189 bp, Arabidopsis thaliana
  misc_feature (1)..(1189): Ceres Seq. ID no. 12326479
  misc_feature: MA Experiment ID: 108573 Result: Up-regulated in Transcription
  misc_feature: MA Experiment 108573 PARAMETER Experiment Name: At_Drought_cDNA_P Parameter: Timepoint (hr) Value: 6
  misc_feature: MA Experiment 108573 PARAMETER Experiment Name: At_Drought_cDNA_P Parameter: Tissue Value: Aerial
  misc_feature: MA Experiment 108573 PARAMETER Experiment Name: At_Drought_cDNA_P Parameter: Treatment Value: Drought vs. No Drought
  misc_feature: MA Experiment ID: 108595 Result: Down-regulated in Transcription
  misc_feature: MA Experiment 108595 PARAMETER Experiment Name: At_Ler-pi_Ovule_cDNA_P Parameter: Plant Line Value: null
  misc_feature: MA Experiment ID: 20000224 Result: Down-regulated in Transcription
ctctctcgtctctaagcagtagcagatctgagttttggagagttcaaaggaagaagataactccaataccagagtgaaagcattcaggaaacatgcctcctcagaagattgaaactggtcatagcgacactattcatgatgtggtcatggattactatggaaagcgagtagcaactgcctcgtctgactgcacgatcaagataaccggagtaagcaacagcggtggatctcagcatctagctaccttaaccggtcatcgaggtcctgtctggcaagtcgcttgggcgcacccaaagtttggttcacttctcgcttcatgttcctatgatgggcaaattatattatggaaagaaggtaaccaaaaccaatggacacaagctcatgtcttcacagaccacaaagtatctgtcaactctatcgcttgggctcctcatgaacttggactctccttagcttgcggagcatctgatggaaacatatcagttttctcggctcgagctgatggcggttgggacacgacaaagatagaccaagcacaccctgttggtgtcacttcagtgtcgtgggcaccggccacagaaccaggcgcactcgttagctctggtatgatcgatccggtctacaaactagcatccggcgggtgtgatagcacggtgaaagtgtggaagttctcgaacgggtcatggaaaatggattgtttcccggctctcaacaagcacacggattgggtccgtgatgtggcttgggcaccgaacttgggtctcccaaagtcaaccatagccagtggttcagaagatgggaaagtgatcatatggaccatagggaaagaaggtgagcaatgggaaggtactgttttgaaagatttcaaaacaccagtgtggcgggtctcgtggtcgttgaccggtaatttgttggctgtttccgatgggaacaataacgttacagtgtggaaagagtctgttgatggagagtgggaacaagtgactgttgttgagccatagattgttgtttgtttgtttggttatcttttgttttgtggtaatatcaaaatgtggtgtgttctgtatacaatttctagggacctgtttctctctatacgtttctcaggaaagtatattcttatgtattttaatcagacaacagagattgcaaaagaaatgtatttttcataaaactttttaattccgat

SEQ ID NO: 76811 - protein, 302 aa, Arabidopsis thaliana; identical to SEQ ID NO: 35570
  peptide (1)..(302): Ceres Seq. ID no. 12326480
  misc_feature (1)..(302): Homolog of NCBI NO: 15232095 NR Description: transport protein SEC13, putative; protein id: supported by cDNA: 37331., supported by cDNA: gi_13877998, by cDNA: gi_17104728 [Arabidopsis thaliana]
  misc_feature (1)..(302): Homolog of NCBI NO: 21593236 NR Description: transport protein SEC13, putative [Arabidopsis
  misc_feature (1)..(302): Homolog of NCBI NO: 15227692 NR Description: G-protein beta family; protein id: At2g30050.1, by cDNA: 36577., supported by cDNA: gi_15724343 [Arabidopsis
  misc_feature (1)..(302): Homolog of NCBI NO: 21593146 NR Description: putative protein transport protein SEC13
  misc_feature (1)..(301): Homolog of NCBI NO: 18147582 NR Description: Sec13p [Oryza sativa]
  misc_feature (1)..(302): Homolog of NCBI NO: 34393220 NR Description: putative Sec13p [Oryza sativa (japonica
  misc_feature (1)..(302): Homolog of NCBI NO: 34897242 NR Description: putative coat protein complex II (COPII)
  misc_feature (6)..(300): Homolog of NCBI NO: 32451650 NR Description: Unknown (protein for MGC:63980) [Danio rerio]
  misc_feature (6)..(300): Homolog of NCBI NO: 38174439 NR Description: Unknown (protein for MGC:76017) [Silurana
  misc_feature (6)..(300): Homolog of NCBI NO: 27696242 NR Description: Similar to RIKEN cDNA 1110003H02 gene [Xenopus

SEQ ID NO: 76812 - protein, 284 aa, Arabidopsis thaliana; identical to SEQ ID NO: 35571
  peptide (1)..(284): Ceres Seq. ID no. 12326481
  misc_feature (1)..(284): Homolog of NCBI NO: 15232095 NR Description: transport protein SEC13, putative; protein id: supported by cDNA: 37331., supported by cDNA: gi_13877998, by cDNA: gi_17104728 [Arabidopsis thaliana]
  misc_feature (1)..(284): Homolog of NCBI NO: 21593236 NR Description: transport protein SEC13, putative [Arabidopsis
  misc_feature (1)..(284): Homolog of NCBI NO: 15227692 NR Description: G-protein beta family; protein id: At2g30050.1, by cDNA: 36577., supported by cDNA: gi_15724343 [Arabidopsis
  misc_feature (1)..(284): Homolog of NCBI NO: 21593146 NR Description: putative protein transport protein SEC13
  misc_feature (1)..(283): Homolog of NCBI NO: 18147582 NR Description: Sec13p [Oryza sativa]
  misc_feature (1)..(284): Homolog of NCBI NO: 34393220 NR Description: putative Sec13p [Oryza sativa (japonica
  misc_feature (1)..(284): Homolog of NCBI NO: 34897242 NR Description: putative coat protein complex II (COPII)
  misc_feature (1)..(282): Homolog of NCBI NO: 32451650 NR Description: Unknown (protein for MGC:63980) [Danio rerio]
  misc_feature (1)..(282): Homolog of NCBI NO: 38174439 NR Description: Unknown (protein for MGC:76017) [Silurana
  misc_feature (1)..(282): Homolog of NCBI NO: 27696242 NR Description: Similar to RIKEN cDNA 1110003H02 gene [Xenopus

SEQ ID NO: 76813 - DNA, 1413 bp, Arabidopsis thaliana
  misc_feature (1)..(1413): Ceres Seq. ID no. 12330672
  misc_feature: MA Experiment ID: 108434 Result: Down-regulated in Transcription
  misc_feature: MA Experiment 108434 PARAMETER Experiment Name: At_Root_Tips_cDNA_P Parameter: Tissue Value: Root Tips
  misc_feature: MA Experiment ID: 108464 Result: Up-regulated in Transcription
  misc_feature: MA Experiment 108464 PARAMETER Experiment Name: At_Germinating_Seeds_cDNA_P Parameter: Age (day) Value: 4 vs. 0
  misc_feature: MA Experiment 108464 PARAMETER Experiment Name: At_Germinating_Seeds_cDNA_P Parameter: Tissue Value: Germinating Seeds
  misc_feature: MA Experiment ID: 108488 Result: Down-regulated in Transcription
  misc_feature: MA Experiment ID: 108569 Result: Up-regulated in Transcription
  misc_feature: MA Experiment 108569 PARAMETER Experiment Name: At_0.001%_MeJA__cDNA_P Parameter: Timepoint (hr) Value: 6
  misc_feature: MA Experiment 108569 PARAMETER Experiment Name: At_0.001%_MeJA__cDNA_P Parameter: Tissue Value: Aerial
  misc_feature: MA Experiment 108569 PARAMETER Experiment Name: At_0.001%_MeJA__cDNA_P Parameter: Treatment Value: 0.001% MeJA vs. No Treatment
  misc_feature: MA Experiment ID: 108573 Result: Up-regulated in Transcription
  misc_feature: MA Experiment 108573 PARAMETER Experiment Name: At_Drought_cDNA_P Parameter: Timepoint (hr) Value: 6
  misc_feature: MA Experiment 108573 PARAMETER Experiment Name: At_Drought_cDNA_P Parameter: Tissue Value: Aerial
  misc_feature: MA Experiment 108573 PARAMETER Experiment Name: At_Drought_cDNA_P Parameter: Treatment Value: Drought vs. No Drought
  misc_feature: MA Experiment ID: 108585 Result: Up-regulated in Transcription
  misc_feature: MA Experiment 108585 PARAMETER Experiment Name: At_5mM_NaNP_cDNA_P Parameter: Timepoint (hr) Value: 6
  misc_feature: MA Experiment 108585 PARAMETER Experiment Name: At_5mM_NaNP_cDNA_P Parameter: Tissue Value: Aerial
  misc_feature: MA Experiment 108585 PARAMETER Experiment Name: At_5mM_NaNP_cDNA_P Parameter: Treatment Value: null
  misc_feature: MA Experiment ID: 108595 Result: Down-regulated in Transcription
  misc_feature: MA Experiment 108595 PARAMETER Experiment Name: At_Ler-pi_Ovule_cDNA_P Parameter: Plant Line Value: null
  misc_feature: MA Experiment ID: 20000087 Result: Down-regulated in Transcription
  misc_feature: MA Experiment 20000087 PARAMETER Experiment Name: At_100uM_ABA_Mutants_cDNA_P Parameter: Plant Line Value: WS
  misc_feature: MA Experiment 20000087 PARAMETER Experiment Name: At_100uM_ABA_Mutants_cDNA_P Parameter: Timepoint (hr) Value: 6
  misc_feature: MA Experiment 20000087 PARAMETER Experiment Name: At_100uM_ABA_Mutants_cDNA_P Parameter: Tissue Value: Aerial
  misc_feature: MA Experiment 20000087 PARAMETER Experiment Name: At_100uM_ABA_Mutants_cDNA_P Parameter: Treatment Value: 100uM ABA vs. No Treatment
  misc_feature: MA Experiment ID: 20000111 Result: Up-regulated in Transcription
  misc_feature: MA Experiment 20000111 PARAMETER Experiment Name: At_42deg_Heat_cDNA_P Parameter: Temperature (deg C) Value: 42 vs. 22
  misc_feature: MA Experiment 20000111 PARAMETER Experiment Name: At_42deg_Heat_cDNA_P Parameter: Timepoint (hr) Value: 6
  misc_feature: MA Experiment 20000111 PARAMETER Experiment Name: At_42deg_Heat_cDNA_P Parameter: Tissue Value: Aerial
  misc_feature: MA Experiment ID: 20000112 Result: Up-regulated in Transcription
  misc_feature: MA Experiment 20000112 PARAMETER Experiment Name: At_42deg_Heat_cDNA_P Parameter: Temperature (deg C) Value: 42 vs. 22
  misc_feature: MA Experiment 20000112 PARAMETER Experiment Name: At_42deg_Heat_cDNA_P Parameter: Timepoint (hr) Value: 2
  misc_feature: MA Experiment 20000112 PARAMETER Experiment Name: At_42deg_Heat_cDNA_P Parameter: Tissue Value: Aerial
  misc_feature: MA Experiment ID: 20000173 Result: Up-regulated in Transcription
  misc_feature: MA Experiment 20000173 PARAMETER Experiment Name: At_42deg_Heat_P Parameter: Age (day) Value: 14
  misc_feature: MA Experiment 20000173 PARAMETER Experiment Name: At_42deg_Heat_P Parameter: Organism Value: A. thaliana
  misc_feature: MA Experiment 20000173 PARAMETER Experiment Name: At_42deg_Heat_P Parameter: Plant Line Value: WS
  misc_feature: MA Experiment 20000173 PARAMETER Experiment Name: At_42deg_Heat_P Parameter: Temperature (deg C) Value: 42 vs. 22
  misc_feature: MA Experiment 20000173 PARAMETER Experiment Name: At_42deg_Heat_P Parameter: Timepoint (hr) Value: 6
  misc_feature: MA Experiment 20000173 PARAMETER Experiment Name: At_42deg_Heat_P Parameter: Tissue Value: Aerial
  misc_feature: MA Experiment ID: 20000234 Result: Down-regulated in Transcription
  misc_feature: MA Experiment 20000234 PARAMETER Experiment Name: At_Siliques_P Parameter: Age (day) Value: 21
  misc_feature: MA Experiment 20000234 PARAMETER Experiment Name: At_Siliques_P Parameter: Organism Value: A. thaliana
  misc_feature: MA Experiment 20000234 PARAMETER Experiment Name: At_Siliques_P Parameter: Plant Line Value: WS
  misc_feature: MA Experiment 20000234 PARAMETER Experiment Name: At_Siliques_P Parameter: Tissue Value: Less Than 5mm Siliques vs. Whole Plant
  misc_feature: MA Experiment ID: 20000265 Result: Down-regulated in Transcription
  misc_feature: MA Experiment 20000265 PARAMETER Experiment Name: At_Open_Flower_P Parameter: Age (day) Value: 21
  misc_feature: MA Experiment 20000265 PARAMETER Experiment Name: At_Open_Flower_P Parameter: Plant Line Value: WS
  misc_feature: MA Experiment 20000265 PARAMETER Experiment Name: At_Open_Flower_P Parameter: Tissue Value: Closed Flower vs. Whole Plant
  misc_feature: MA Experiment ID: 20001560 Result: Down-regulated in Transcription
  misc_feature: MA Experiment 20001560 PARAMETER Experiment Name: At_Drought_Soil_Dry_P Parameter: Age (day) Value: 28
  misc_feature: MA Experiment 20001560 PARAMETER Experiment Name: At_Drought_Soil_Dry_P Parameter: Organism Value: A. thaliana
  misc_feature: MA Experiment 20001560 PARAMETER Experiment Name: At_Drought_Soil_Dry_P Parameter: Plant Line Value: WS
  misc_feature: MA Experiment 20001560 PARAMETER Experiment Name: At_Drought_Soil_Dry_P Parameter: Post Timepoint (hr) Value: None
  misc_feature: MA Experiment 20001560 PARAMETER Experiment Name: At_Drought_Soil_Dry_P Parameter: Post-Treatment Value: None
  misc_feature: MA Experiment 20001560 PARAMETER Experiment Name: At_Drought_Soil_Dry_P Parameter: Timepoint (day) Value: 14
  misc_feature: MA Experiment 20001560 PARAMETER Experiment Name: At_Drought_Soil_Dry_P Parameter: Treatment Value: Drought vs. No Drought
  misc_feature: MA Experiment ID: 20001905 Result: Up-regulated in Transcription
  misc_feature: MA Experiment 20001905 PARAMETER Experiment Name: At_Drought_Reproduction_P Parameter: Age (day) Value: 40
  misc_feature: MA Experiment 20001905 PARAMETER Experiment Name: At_Drought_Reproduction_P Parameter: Organism Value: A. thaliana
  misc_feature: MA Experiment 20001905 PARAMETER Experiment Name: At_Drought_Reproduction_P Parameter: Plant Line Value: WS
  misc_feature: MA Experiment 20001905 PARAMETER Experiment Name: At_Drought_Reproduction_P Parameter: Timepoint (day) Value: 10
  misc_feature: MA Experiment 20001905 PARAMETER Experiment Name: At_Drought_Reproduction_P Parameter: Tissue Value: Rosettes
  misc_feature: MA Experiment 20001905 PARAMETER Experiment Name: At_Drought_Reproduction_P Parameter: Treatment Value: Drought vs. No Drought
aacaaaggcagacagacaaaaggctaattcggagctctcctccacatcttcttccaaaacacaaacaaacccccaaatttccagaaaaatcagatcattctttcatcaatctcgtcttctttaatcttaggtgagaattcatcagctcaaaaacgcagcacccgatcgttttacgactcaaatcagagaagctgattcttttccaatcattccaatttccatttcttccttgggaggttttacaccaaattagccgtcgaaaggggtgcttctttgatctaatttcgatggcgggattagagaaaaacgctgatttctcagggaagacgacgaaatcggctacaacgacgtcgttcttcaacaggtcgcttacaattcacggaagaacagtggtggattcgggccccaaatcccacaatctcaatccttctctcaatcgtaccacctccattaccaaattctacacccccgtagaatcgatgggaacttctcttaaaggcaaagtcaaaaacctttgtagattattcgagacttccaaacccgttaaacctgccttagctgagattcctcagaagcagaaatccggtaaatcccttttacccgaatcgcggatatcgcctttttcgagcttaaacaactcggtcatccgtcttcccgggacagaggacaggattgtggtgtattttactagcttgagagggattagacggacgtatgaggattgctatgctgtcagaatgatatttagagggtttcgggtttggatcgatgagcgcgacgtctccatggatatcgcttataggaaagagttgcagattgcaatgggagagaagtctgtgtctttgcctcaagttttcattatgggcaagtatgttggtggtgctgatgtgatcaagagtttgtttgagattggtgagcttgctaagattcttaaagagtttccaatgagacaaccagggtttgtttgccattgctgtggggacattcgatttgttccgtgttccaattgtagtggcagcaagaaactgtttgatgaggatgaagatagggtcaagagatgtcctgaatgcaatgagaatggattgatacgttgtcctgattgctcttcttgagatatatcatcaatgaacctgaaaaaaccattaaaaaaaagaagaaaaaagaggtatttatttctcttttgatgtttccattgttgtgtagaacagtgaatgatgctgccacaagtatccgaaaatctcttttggatcagcagcatttcactttgggttttttaaggtttgcgatcaacggtaatgggaatgccggtgatcgtggatttagtttatgtatgtgtttgctactaagggctaaatgtaattgtgtaatcaaaatgtctgaaacgggtagtaagcattttgactcttgtgtgtc

SEQ ID NO: 76814 - protein, 274 aa, Arabidopsis thaliana; identical to SEQ ID NO: 40766
  peptide (1)..(274): Ceres Seq. ID no. 12330673
  misc_feature (128)..(215): Pfam Name: Glutaredoxin Pfam Description: Glutaredoxin
  misc_feature (1)..(274): Homolog of NCBI NO: 15240723 NR Description: putative protein; protein id: At5g13810.1, by cDNA: 124023., supported by cDNA: gi_14532459, supported by gi_16974532 [Arabidopsis thaliana] >gi|10177647|dbj|BAB11109.1|
  misc_feature (62)..(272): Homolog of NCBI NO: 15451042 NR Description: putative protein [Arabidopsis thaliana]
  misc_feature (62)..(272): Homolog of NCBI NO: 30694571 NR Description: expressed protein [Arabidopsis thaliana]
  misc_feature (126)..(272): Homolog of NCBI NO: 15227326 NR Description: unknown protein; protein id: At2g41330.1, by cDNA: gi_18491270 [Arabidopsis thaliana]
  misc_feature (129)..(274): Homolog of NCBI NO: 34899098 NR Description: hypothetical protein~similar to Arabidopsis
  misc_feature (120)..(272): Homolog of NCBI NO: 32490043 NR Description: OSJNBa0063C18.3 [Oryza sativa (japonica
  misc_feature (120)..(270): Homolog of NCBI NO: 10241626 NR Description: Contains similarity to F1N 19.7 [Oryza sativa
  misc_feature (15)..(273): Homolog of NCBI NO: 15237686 NR Description: putative protein; protein id: At5g58530.1 thaliana] >gi|10177031|dbj|BAB10269.1| to unknown protein [Arabidopsis thaliana]
  misc_feature (124)..(273): Homolog of NCBI NO: 15223291 NR Description: unknown protein; protein id: At1g32760.1 thaliana] >gi|6714276|gb|AAF25972.1|AC017118_9 F6N18.14
  misc_feature (123)..(273): Homolog of NCBI NO: 38346321 NR Description: OJ000126_13.3 [Oryza sativa (japonica

SEQ ID NO: 76815 - protein, 210 aa, Arabidopsis thaliana; identical to SEQ ID NO: 40767
  peptide (1)..(210): Ceres Seq. ID no. 12330674
  misc_feature (64)..(151): Pfam Name: Glutaredoxin Pfam Description: Glutaredoxin
  misc_feature (1)..(210): Homolog of NCBI NO: 15240723 NR Description: putative protein; protein id: At5g13810.1, by cDNA: 124023., supported by cDNA: gi_14532459, supported by gi_16974532 [Arabidopsis thaliana] >gi|10177647|dbj|BAB11109.1|
  misc_feature (1)..(208): Homolog of NCBI NO: 15451042 NR Description: putative protein [Arabidopsis thaliana]
  misc_feature (1)..(208): Homolog of NCBI NO: 30694571 NR Description: expressed protein [Arabidopsis thaliana]
  misc_feature (62)..(208): Homolog of NCBI NO: 15227326 NR Description: unknown protein; protein id: At2g41330.1, by cDNA: gi_18491270 [Arabidopsis thaliana]
  misc_feature (65)..(210): Homolog of NCBI NO: 34899098 NR Description: hypothetical protein~similar to Arabidopsis
  misc_feature (56)..(208): Homolog of NCBI NO: 32490043 NR Description: OSJNBa0063C18.3 [Oryza sativa (japonica
  misc_feature (56)..(206): Homolog of NCBI NO: 10241626 NR Description: Contains similarity to F1N 19.7 [Oryza sativa
  misc_feature (1)..(209): Homolog of NCBI NO: 15237686 NR Description: putative protein; protein id: At5g58530.1 thaliana] >gi|10177031|dbj|BAB10269.1| to unknown protein [Arabidopsis thaliana]
  misc_feature (60)..(209): Homolog of NCBI NO: 15223291 NR Description: unknown protein; protein id: At1g32760.1 thaliana] >gi|6714276|gb|AAF25972.1|AC017118_9 F6N18.14
  misc_feature (59)..(209): Homolog of NCBI NO: 38346321 NR Description: OJ000126_13.3 [Oryza sativa (japonica

SEQ ID NO: 76816 - DNA, 1538 bp, Arabidopsis thaliana
  misc_feature (1)..(1538): Ceres Seq. ID no. 12330954
  misc_feature: MA Experiment ID: 108434 Result: Up-regulated in Transcription
  misc_feature: MA Experiment 108434 PARAMETER Experiment Name: At_Root_Tips_cDNA_P Parameter: Tissue Value: Root Tips
  misc_feature: MA Experiment ID: 108577 Result: Down-regulated in Transcription
  misc_feature: MA Experiment 108577 PARAMETER Experiment Name: At_42deg_Heat_cDNA_P Parameter: Temperature (deg C) Value: 42 vs. 22
  misc_feature: MA Experiment 108577 PARAMETER Experiment Name: At_42deg_Heat_cDNA_P Parameter: Timepoint (hr) Value: 6
  misc_feature: MA Experiment 108577 PARAMETER Experiment Name: At_42deg_Heat_cDNA_P Parameter: Tissue Value: Aerial
  misc_feature: MA Experiment ID: 108585 Result: Up-regulated in Transcription
  misc_feature: MA Experiment 108585 PARAMETER Experiment Name: At_5mM_NaNP_cDNA_P Parameter: Timepoint (hr) Value: 6
  misc_feature: MA Experiment 108585 PARAMETER Experiment Name: At_5mM_NaNP_cDNA_P Parameter: Tissue Value: Aerial
  misc_feature: MA Experiment 108585 PARAMETER Experiment Name: At_5mM_NaNP_cDNA_P Parameter: Treatment Value: null
  misc_feature: MA Experiment ID: 108595 Result: Down-regulated in Transcription
  misc_feature: MA Experiment 108595 PARAMETER Experiment Name: At_Ler-pi_Ovule_cDNA_P Parameter: Plant Line Value: null
  misc_feature: MA Experiment ID: 20000113 Result: Down-regulated in Transcription
  misc_feature: MA Experiment 20000113 PARAMETER Experiment Name: At_42deg_Heat_cDNA_P Parameter: Temperature (deg C) Value: 42 vs. 22
  misc_feature: MA Experiment 20000113 PARAMETER Experiment Name: At_42deg_Heat_cDNA_P Parameter: Timepoint (hr) Value: 8
  misc_feature: MA Experiment 20000113 PARAMETER Experiment Name: At_42deg_Heat_cDNA_P Parameter: Tissue Value: Aerial
gcattttccgagtactcaagagaaaggcgatggggtcatcacagtcttcgcaattactcgatgaagaagaagaagaagaagatgaagcagagagcgaaggtgaagaagtagaagaagaagaagatgaagcagagagcgaattgaataacagaagaatcgagctggataatctcttggtcaagaaagttctcgagcaagagcctgagatgcttccttgtcacgcctctgcttctccactctctcctcagctctcttctcttggaactcctcgaatcggaccttccattaaagtctgggatccttacaacgtcctcgcgccacctcctccttcttctccgcctcttttctctcgtatctcctccgccgcggaacacgatcgctccgccgtgacggaagtctatttcatcagccacggcgagtgtgatctcaatctcaggcctgatctgattggaggtagatgccacgtggctactctcacacccaacgggaaacgtcaggcgagagctctagccgtatttttaaactctgaaggtgttcgattcacctccgtcttctcttcgcctctggatcgagctagatccatggctgtttctgtttgccaggaaatgaattttcctgaggagcatttgcaagtctcggatgctgtggttgagatgagtttaggggactgggaaagctgtcatcggtcagagatttacacacctgaaactctaagtttaatagaaagatgccaacctgatttctcagctccatctggtgaatcactcagacaagtagagtttcggatggttcagtttctgaatgggacagtctcaggactttcggagaagctcaggtcagaacttcttccatctacacagcacacaaattccagagggttctcgttagctacttctattcatcgcccaattcttacaaggaagaaatctgggaagagccggtttcaggtgatgaatgcaactggtgatcacgagggtagtgaagagatatttagtaatcacaatgatgaacaacacctaggtgatataaacatcaagagttcttcttctcaactctcaacctgcattggagttttcactcactctttacctataaagtgtcttcttaccggtatccttggatgcagcccggtaatgacacataagatctgtgtggaggattcctctgtgaccgtattacagcattcgtggaaaaccgggtggcaggtaaagcggttaaatgacaccgctcatcttagactgttgtagcctcatcatcatcaaattcttttactctctgaaagctcgaaaacacagcgagctggtaaattattgcaagaccttcacaagtcatttgagtctgcagaagaagatcaacaagcttgcagattacatgctcccgccacgagcctcttgtacgtttgttttgagaaagaaaagctaaagatttgttaatgctgatgtttcactaccttgttctgtttgattctttctatttgcaagcttcctcttatgtaattcttatgcttgaaatcacaaaaaaaaaaaaagctcattgcc

SEQ ID NO: 76817 - protein, 414 aa, Arabidopsis thaliana; identical to SEQ ID NO: 43666
  peptide (1)..(414): Ceres Seq. ID no. 12330955
  misc_feature (130)..(287): Pfam Name: Phosphoglycerate mutase family Pfam Description: Phosphoglycerate mutase family
  misc_feature (10)..(414): Homolog of NCBI NO: 25518294 NR Description: hypothetical protein F13K23.10 [imported] - thaliana >gi|8698732|gb|AAF78490.1|AC012187_10 Contains weak to LIP1 gene product gi|7297743 from Drosophila melanogaster
  misc_feature (10)..(414): Homolog of NCBI NO: 18391446 NR Description: expressed protein; protein id: At1g12850.1, by cDNA: 207684., supported by cDNA: gi_14517375 [Arabidopsis >gi|14517376|gb|AAK62579.1| At1g12850/F13K23_8 [Arabidopsis
  misc_feature (10)..(414): Homolog of NCBI NO: 21554168 NR Description: putative fructose-2,6-bisphosphatase [Arabidopsis
  misc_feature (10)..(414): Homolog of NCBI NO: 9279667 NR Description: gene_id:MDJ14.7~similar to unknown [Arabidopsis thaliana] >gi|26449922|dbj|BAC42082.1| unknown
  misc_feature (10)..(413): Homolog of NCBI NO: 15231617 NR Description: unknown protein; protein id: At3g26780.1
  misc_feature (10)..(329): Homolog of NCBI NO: 17902578 NR Description: putative fructose-2,6-bisphosphatase [Silene
  misc_feature (300)..(414): Homolog of NCBI NO: 17902578 NR Description: putative fructose-2,6-bisphosphatase [Silene
  misc_feature (10)..(321): Homolog of NCBI NO: 17902574 NR Description: putative Fructose-2,6-bisphosphatase [Silene
  misc_feature (300)..(414): Homolog of NCBI NO: 17902574 NR Description: putative Fructose-2,6-bisphosphatase [Silene
  misc_feature (10)..(329): Homolog of NCBI NO: 17902576 NR Description: putative fructose-2,6-bisphosphatase [Silene

SEQ ID NO: 76818 - protein, 405 aa, Arabidopsis thaliana; identical to SEQ ID NO: 43667
  peptide (1)..(405): Ceres Seq. ID no. 12330956
  misc_feature (121)..(278): Pfam Name: Phosphoglycerate mutase family Pfam Description: Phosphoglycerate mutase family
  misc_feature (1)..(405): Homolog of NCBI NO: 25518294 NR Description: hypothetical protein F13K23.10 [imported] - thaliana >gi|8698732|gb|AAF78490.1|AC012187_10 Contains weak to LIP1 gene product gi|7297743 from Drosophila melanogaster
  misc_feature (1)..(405): Homolog of NCBI NO: 18391446 NR Description: expressed protein; protein id: At1g12850.1, by cDNA: 207684., supported by cDNA: gi_14517375 [Arabidopsis >gi|14517376|gb|AAK62579.1| At1g12850/F13K23_8 [Arabidopsis
  misc_feature (1)..(405): Homolog of NCBI NO: 21554168 NR Description: putative fructose-2,6-bisphosphatase [Arabidopsis
  misc_feature (1)..(405): Homolog of NCBI NO: 9279667 NR Description: gene_id:MDJ14.7~similar to unknown [Arabidopsis thaliana] >gi|26449922|dbj|BAC42082.1| unknown
  misc_feature (1)..(404): Homolog of NCBI NO: 15231617 NR Description: unknown protein; protein id: At3g26780.1
  misc_feature (1)..(320): Homolog of NCBI NO: 17902578 NR Description: putative fructose-2,6-bisphosphatase [Silene
  misc_feature (291)..(405): Homolog of NCBI NO: 17902578 NR Description: putative fructose-2,6-bisphosphatase [Silene
  misc_feature (1)..(312): Homolog of NCBI NO: 17902574 NR Description: putative Fructose-2,6-bisphosphatase [Silene
  misc_feature (291)..(405): Homolog of NCBI NO: 17902574 NR Description: putative Fructose-2,6-bisphosphatase [Silene
  misc_feature (1)..(320): Homolog of NCBI NO: 17902576 NR Description: putative fructose-2,6-bisphosphatase [Silene

SEQ ID NO: 76819 - protein, 346 aa, Arabidopsis thaliana; identical to SEQ ID NO: 43668
  peptide (1)..(346): Ceres Seq. ID no. 12330957
  misc_feature (62)..(219): Pfam Name: Phosphoglycerate mutase family Pfam Description: Phosphoglycerate mutase family
  misc_feature (1)..(346): Homolog of NCBI NO: 25518294 NR Description: hypothetical protein F13K23.10 [imported] - thaliana >gi|8698732|gb|AAF78490.1|AC012187_10 Contains weak to LIP1 gene product gi|7297743 from Drosophila melanogaster
  misc_feature (1)..(346): Homolog of NCBI NO: 18391446 NR Description: expressed protein; protein id: At1g12850.1, by cDNA: 207684., supported by cDNA: gi_14517375 [Arabidopsis >gi|14517376|gb|AAK62579.1| At1g12850/F13K23_8 [Arabidopsis
  misc_feature (1)..(346): Homolog of NCBI NO: 21554168 NR Description: putative fructose-2,6-bisphosphatase [Arabidopsis
  misc_feature (1)..(346): Homolog of NCBI NO: 9279667 NR Description: gene_id:MDJ14.7~similar to unknown [Arabidopsis thaliana] >gi|26449922|dbj|BAC42082.1| unknown
  misc_feature (1)..(345): Homolog of NCBI NO: 15231617 NR Description: unknown protein; protein id: At3g26780.1
  misc_feature (1)..(261): Homolog of NCBI NO: 17902578 NR Description: putative fructose-2,6-bisphosphatase [Silene
  misc_feature (232)..(346): Homolog of NCBI NO: 17902578 NR Description: putative fructose-2,6-bisphosphatase [Silene
  misc_feature (1)..(253): Homolog of NCBI NO: 17902574 NR Description: putative Fructose-2,6-bisphosphatase [Silene
  misc_feature (232)..(346): Homolog of NCBI NO: 17902574 NR Description: putative Fructose-2,6-bisphosphatase [Silene
  misc_feature (1)..(261): Homolog of NCBI NO: 17902576 NR Description: putative fructose-2,6-bisphosphatase [Silene

SEQ ID NO: 76820 - DNA, 1687 bp, Arabidopsis thaliana
  misc_feature (1)..(1687): Ceres Seq. ID no. 12331544
  misc_feature: MA Experiment ID: 108573 Result: Up-regulated in Transcription
  misc_feature: MA Experiment 108573 PARAMETER Experiment Name: At_Drought_cDNA_P Parameter: Timepoint (hr) Value: 6
  misc_feature: MA Experiment 108573 PARAMETER Experiment Name: At_Drought_cDNA_P Parameter: Tissue Value: Aerial
  misc_feature: MA Experiment 108573 PARAMETER Experiment Name: At_Drought_cDNA_P Parameter: Treatment Value: Drought vs. No Drought
  misc_feature: MA Experiment ID: 108595 Result: Down-regulated in Transcription
  misc_feature: MA Experiment 108595 PARAMETER Experiment Name: At_Ler-pi_Ovule_cDNA_P Parameter: Plant Line Value: null
ataatccattccttcttctctcttctccatctccttcctccgatcttcgtctccaattcggaatcttcctatcacaatttcaaggctcctttaacccttgatcatcaccgattcaatcaattcggaatcacaatttcaaatcgagagaatttcaatttctcttgtaaaaccctaaattatgtacagcaatttcaaggaacaagcgatcgagtacgtgaagcaagcggttcatgaagacaatgctgggaattacaataaagctttccctctatacatgaacgcgcttgagtacttcaaaactcatctcaagtatgagaagaaccctaagatcagagaagctattacccagaaattcaccgagtatctccgtcgtgctgaggagatccgtgctgttctcgatgaaggtggatcgggtccaggatctaacggtgatgcagccgtcgcaacgaggcccaaaactaagcctaaagatggagaaggtggtggtaaagatggagaagatcctgaacaatcaaagcttcgagctgggttaaactctgcgattgttagagagaaacctaatatcaagtggtcagatgttgctgggcttgaaagtgctaaacaagctctgcaggaagctgtgattttgcctgtcaagtttccacagttcttcactggaaagagacggccttggagagcttttctgttgtatgggcctcctggaacaggaaaatcgtatttggctaaggctgttgccactgaagctgactctaccttttttagcgtgtcttcatcagaccttgtctcgaagtggatgggtgaaagtgagaagctagtatcaaaccttttcgagatggcccgtgaaagtgctccctcgattatttttgttgatgagatagattctttgtgtggtacacgtggagaaggaaacgagagtgaagcttcaagacgtatcaaaacagagcttctagtgcagatgcagggtgttggacacaatgatgagaaagtacttgtacttgcagcaaccaatacaccctatgctcttgatcaggctatccggcgacgttttgacaagcgtatctatattcctctcccagaggccaaggctcggcagcacatgttcaaagtccacttgggagatacacctcataatttaactgaacctgattttgaatatttaggccaaaagacagaagggttttctggttcagatgtgtctgtttgtgtaaaagatgttctgtttgaacctgttcgtaaaacacaagatgcaatgttctttttcaagtctcctgatggtacatggatgccatgtgggcctaggcaccctggtgccatccagactacaatgcaagatctagcaacaaaagggcttgccgaaaagattattccaccaccaatcaccagaacagatttcgagaaggtacttgcaagacaaaggccaacagtgagcaagtctgaccttgatgtccacgagagattcacacaggagtttggagaagaaggttgatagatttgacattcccatcaagcatctttcacaatcatattattattagtctcttcaccatctccttatgtatgtactgagaagcaaaacaaaatctcaaacccatgtttgatttcttcccaaaacattgaatttgctttatttctcgaattgtgtaaaaaaaaaatgttctgaacaatgttttctatttattatgtcacc

SEQ ID NO: 76821 - protein, 435 aa, Arabidopsis thaliana
  peptide (1)..(435): Ceres Seq. ID no. 12331545
  misc_feature (167)..(352): Pfam Name: ATPase family associated with various cellular Pfam Description: ATPase family associated with various cellular
  misc_feature (1)..(435): Homolog of NCBI NO: 15226199 NR Description: putative ATPase; protein id: At2g27600.1, by cDNA: 3818., supported by cDNA: gi_13605796, supported by
  misc_feature (1)..(435): Homolog of NCBI NO: 21593336 NR Description: putative ATPase [Arabidopsis thaliana]
  misc_feature (1)..(395): Homolog of NCBI NO: 22652796 NR Description: AAA-ATPase-like protein [Oryza sativa (japonica
  misc_feature (98)..(431): Homolog of NCBI NO: 34895696 NR Description: putative AAA-type ATPase [Oryza sativa (japonica
  misc_feature (1)..(93): Homolog of NCBI NO: 34895696 NR Description: putative AAA-type ATPase [Oryza sativa (japonica
  misc_feature (146)..(435): Homolog of NCBI NO: 16265863 NR Description: suppressor of K+ transport growth defect-like
  misc_feature (4)..(435): Homolog of NCBI NO: 27503354 NR Description: Similar to vacuolar protein sorting 4B (yeast)
  misc_feature (7)..(435): Homolog of NCBI NO: 17865802 NR Description: vacuolar protein sorting factor 4B; suppressor of transport defect 1 [Homo sapiens] vacuolar protein sorting factor 4B [Homo sapiens]
  misc_feature (7)..(435): Homolog of NCBI NO: 9087199 NR Description: SKD1 protein (Vacuolar sorting protein 4b)
  misc_feature (3)..(435): Homolog of NCBI NO: 40744456 NR Description: hypothetical protein AN3061.2 [Aspergillus
MYSNFKEQAIEYVKQAVHEDNAGNYNKAFPLYMNALEYFKTHLKYEKNPKIREAITQKFTEYLRRAEEIRAVLDEGGSGPGSNGDAAVATRPKTKPKDGEGGGKDGEDPEQSKLRAGLNSAIVREKPNIKWSDVAGLESAKQALQEAVILPVKFPQFFTGKRRPWRAFLLYGPPGTGKSYLAKAVATEADSTFFSVSSSDLVSKWMGESEKLVSNLFEMARESAPSIIFVDEIDSLCGTRGEGNESEASRRIKTELLVQMQGVGHNDEKVLVLAATNTPYALDQAIRRRFDKRIYIPLPEAKARQHMFKVHLGDTPHNLTEPDFEYLGQKTEGFSGSDVSVCVKDVLFEPVRKTQDAMFFFKSPDGTWMPCGPRHPGAIQTTMQDLATKGLAEKIIPPPITRTDFEKVLARQRPTVSKSDLDVHERFTQEFGEEG

SEQ ID NO: 76822 - protein, 403 aa, Arabidopsis thaliana
  peptide (1)..(403): Ceres Seq. ID no. 12331546
  misc_feature (135)..(320): Pfam Name: ATPase family associated with various cellular Pfam Description: ATPase family associated with various cellular
  misc_feature (1)..(403): Homolog of NCBI NO: 15226199 NR Description: putative ATPase; protein id: At2g27600.1, by cDNA: 3818., supported by cDNA: gi_13605796, supported by
  misc_feature (1)..(403): Homolog of NCBI NO: 21593336 NR Description: putative ATPase [Arabidopsis thaliana]
  misc_feature (1)..(363): Homolog of NCBI NO: 22652796 NR Description: AAA-ATPase-like protein [Oryza sativa (japonica
  misc_feature (66)..(399): Homolog of NCBI NO: 34895696 NR Description: putative AAA-type ATPase [Oryza sativa (japonica
  misc_feature (1)..(61): Homolog of NCBI NO: 34895696 NR Description: putative AAA-type ATPase [Oryza sativa (japonica
  misc_feature (114)..(403): Homolog of NCBI NO: 16265863 NR Description: suppressor of K+ transport growth defect-like
  misc_feature (1)..(403): Homolog of NCBI NO: 27503354 NR Description: Similar to vacuolar protein sorting 4B (yeast)
  misc_feature (1)..(403): Homolog of NCBI NO: 17865802 NR Description: vacuolar protein sorting factor 4B; suppressor of transport defect 1 [Homo sapiens] vacuolar protein sorting factor 4B [Homo sapiens]
  misc_feature (1)..(403): Homolog of NCBI NO: 9087199 NR Description: SKD1 protein (Vacuolar sorting protein 4b)
  misc_feature (1)..(403): Homolog of NCBI NO: 40744456 NR Description: hypothetical protein AN3061.2 [Aspergillus
MNALEYFKTHLKYEKNPKIREAITQKFTEYLRRAEEIRAVLDEGGSGPGSNGDAAVATRPKTKPKDGEGGGKDGEDPEQSKLRAGLNSAIVREKPNIKWSDVAGLESAKQALQEAVILPVKFPQFFTGKRRPWRAFLLYGPPGTGKSYLAKAVATEADSTFFSVSSSDLVSKWMGESEKLVSNLFEMARESAPSIIFVDEIDSLCGTRGEGNESEASRRIKTELLVQMQGVGHNDEKVLVLAATNTPYALDQAIRRRFDKRIYIPLPEAKARQHMFKVHLGDTPHNLTEPDFEYLGQKTEGFSGSDVSVCVKDVLFEPVRKTQDAMFFFKSPDGTWMPCGPRHPGAIQTTMQDLATKGLAEKIIPPPITRTDFEKVLARQRPTVSKSDLDVHERFTQEFGEEG

SEQ ID NO: 76823 - protein, 230 aa, Arabidopsis thaliana
  peptide (1)..(230): Ceres Seq. ID no. 12331547
  misc_feature (1)..(147): Pfam Name: ATPase family associated with various cellular Pfam Description: ATPase family associated with various cellular
  misc_feature (1)..(230): Homolog of NCBI NO: 15226199 NR Description: putative ATPase; protein id: At2g27600.1, by cDNA: 3818., supported by cDNA: gi_13605796, supported by
  misc_feature (1)..(230): Homolog of NCBI NO: 21593336 NR Description: putative ATPase [Arabidopsis thaliana]
  misc_feature (1)..(190): Homolog of NCBI NO: 22652796 NR Description: AAA-ATPase-like protein [Oryza sativa (japonica
  misc_feature (1)..(226): Homolog of NCBI NO: 34895696 NR Description: putative AAA-type ATPase [Oryza sativa (japonica
  misc_feature (1)..(230): Homolog of NCBI NO: 16265863 NR Description: suppressor of K+ transport growth defect-like
  misc_feature (1)..(230): Homolog of NCBI NO: 27503354 NR Description: Similar to vacuolar protein sorting 4B (yeast)
  misc_feature (1)..(230): Homolog of NCBI NO: 17865802 NR Description: vacuolar protein sorting factor 4B; suppressor of transport defect 1 [Homo sapiens] vacuolar protein sorting factor 4B [Homo sapiens]
  misc_feature (1)..(230): Homolog of NCBI NO: 9087199 NR Description: SKD1 protein (Vacuolar sorting protein 4b)
  misc_feature (1)..(230): Homolog of NCBI NO: 40744456 NR Description: hypothetical protein AN3061.2 [Aspergillus
  misc_feature (1)..(229): Homolog of NCBI NO: 38075589 NR Description: similar to SKD1 [Mus musculus]
MGESEKLVSNLFEMARESAPSIIFVDEIDSLCGTRGEGNESEASRRIKTELLVQMQGVGHNDEKVLVLAATNTPYALDQAIRRRFDKRIYIPLPEAKARQHMFKVHLGDTPHNLTEPDFEYLGQKTEGFSGSDVSVCVKDVLFEPVRKTQDAMFFFKSPDGTWMPCGPRHPGAIQTTMQDLATKGLAEKIIPPPITRTDFEKVLARQRPTVSKSDLDVHERFTQEFGEEG

SEQ ID NO: 76824 - DNA, 1006 bp, Arabidopsis thaliana
  misc_feature (1)..(1006): Ceres Seq. ID no. 12333661
  misc_feature: MA Experiment ID: 108434 Result: Up-regulated in Transcription
  misc_feature: MA Experiment 108434 PARAMETER Experiment Name: At_Root_Tips_cDNA_P Parameter: Tissue Value: Root Tips
  misc_feature: MA Experiment ID: 108461 Result: Down-regulated in Transcription
  misc_feature: MA Experiment 108461 PARAMETER Experiment Name: At_Germinating_Seeds_cDNA_P Parameter: Age (day) Value: 1 vs. 0
  misc_feature: MA Experiment 108461 PARAMETER Experiment Name: At_Germinating_Seeds_cDNA_P Parameter: Tissue Value: Germinating Seeds
  misc_feature: MA Experiment ID: 108462 Result: Down-regulated in Transcription
  misc_feature: MA Experiment 108462 PARAMETER Experiment Name: At_Germinating_Seeds_cDNA_P Parameter: Age (day) Value: 2 vs. 0
  misc_feature: MA Experiment 108462 PARAMETER Experiment Name: At_Germinating_Seeds_cDNA_P Parameter: Tissue Value: Germinating Seeds
  misc_feature: MA Experiment ID: 108463 Result: Down-regulated in Transcription
  misc_feature: MA Experiment 108463 PARAMETER Experiment Name: At_Germinating_Seeds_cDNA_P Parameter: Age (day) Value: 3 vs. 0
  misc_feature: MA Experiment 108463 PARAMETER Experiment Name: At_Germinating_Seeds_cDNA_P Parameter: Tissue Value: Germinating Seeds
  misc_feature: MA Experiment ID: 108464 Result: Down-regulated in Transcription
  misc_feature: MA Experiment 108464 PARAMETER Experiment Name: At_Germinating_Seeds_cDNA_P Parameter: Age (day) Value: 4 vs. 0
  misc_feature: MA Experiment 108464 PARAMETER Experiment Name: At_Germinating_Seeds_cDNA_P Parameter: Tissue Value: Germinating Seeds
  misc_feature: MA Experiment ID: 108585 Result: Up-regulated in Transcription
  misc_feature: MA Experiment 108585 PARAMETER Experiment Name: At_5mM_NaNP_cDNA_P Parameter: Timepoint (hr) Value: 6
  misc_feature: MA Experiment 108585 PARAMETER Experiment Name: At_5mM_NaNP_cDNA_P Parameter: Tissue Value: Aerial
  misc_feature: MA Experiment 108585 PARAMETER Experiment Name: At_5mM_NaNP_cDNA_P Parameter: Treatment Value: null
agagcaaaagcttctgtttattctccgattcgcagatcaattagctgggttttgattccgttgtgcgaaggactttaagaggttttgcagatcgaaatcggaagagaagaagaagatgtttctcactagaactgagtatgacagaggagtgaacactttttctccagaaggaaggctatttcaagtggaatatgccattgaagctatcaagcttggttctactgcaattggagtaaagacaaaagaaggagttgtgcttgctgtcgagaagcgtatcacgtcgccattgctggaaccgagcagtgtggagaagattatggaaattgatgaccatattggttgtgctatgagcggtttaattgctgacgcgcgcacacttgttgagcatgctagagttgaaactcaaaaccatagattctcgtatggtgagccgatgactgtagagtccacaacacaagcactgtgtgatctggctttacggtttggtgaaggagaggaagaatcaatgtctcggccgtttggagtatctcttctcattgctggccatgatgaaaatggaccaagcttgtactacactgatccttcaggaacattctggcagtgcaatgcaaaggcaattggttcaggttctgaaggagctgatagctctcttcaagagcaattcaacaaagatttgtctctacaagaagctgagactatcgctgtatctatcctaaagcaagttatggaagaaaaggtgactccaaataacgtggatattgccaaggtagcaccagcttatcatctctacactccacaagaagtcgaagcagtcatcgctcgtctttgattgaaaaaactcaatttgggtaatttacctatcagcttgtgtcacaaaacttgttacttttgtctgttagattgaggatcatgtcacattttagtcggttgtgtaagagaatcttttggctcccatgtcattcaataacctttcggatttgtgacttataaaatttcctttcctacc

SEQ ID NO: 76825 - protein, 237 aa, Arabidopsis thaliana; identical to SEQ ID NO: 34799
  peptide (1)..(237): Ceres Seq. ID no. 12333662
  misc_feature (31)..(218): Pfam Name: Proteasome A-type and B-type Pfam Description: Proteasome A-type and B-type
  misc_feature (1)..(237): Homolog of NCBI NO: 15220961 NR Description: 20S proteasome alpha subunit E1 (PAE1); protein At1g53850.1, supported by cDNA: 20801., supported by cDNA: supported by cDNA: gi_3421086 [Arabidopsis thaliana] (20S
  misc_feature (1)..(237): Homolog of NCBI NO: 15231824 NR Description: 20S proteasome alpha subunit E2 (PAE2); protein At3g14290.1, supported by cDNA: gi_13877964, supported by cDNA: supported by cDNA: gi_3421089 [Arabidopsis thaliana] (20S

SEQ ID NO: 76826 - protein, 170 aa, Arabidopsis thaliana; identical to SEQ ID NO: 34800
  peptide (1)..(170): Ceres Seq. ID no. 12333663
  misc_feature (1)..(151): Pfam Name: Proteasome A-type and B-type Pfam Description: Proteasome A-type and B-type
  misc_feature (1)..(170): Homolog of NCBI NO: 15220961 NR Description: 20S proteasome alpha subunit E1 (PAE1); protein At1g53850.1, supported by cDNA: 20801., supported by cDNA: supported by cDNA: gi_3421086 [Arabidopsis thaliana] (20S
  misc_feature (1)..(170): Homolog of NCBI NO: 15231824 NR Description: 20S proteasome alpha subunit E2 (PAE2); protein At3g14290.1, supported by cDNA: gi_13877964, supported by cDNA: supported by cDNA: gi_3421089 [Arabidopsis thaliana] (20S

SEQ ID NO: 76827 - protein, 160 aa, Arabidopsis thaliana; identical to SEQ ID NO: 34801
  peptide (1)..(160): Ceres Seq. ID no. 12333664
  misc_feature (1)..(141): Pfam Name: Proteasome A-type and B-type Pfam Description: Proteasome A-type and B-type
  misc_feature (1)..(160): Homolog of NCBI NO: 15220961 NR Description: 20S proteasome alpha subunit E1 (PAE1); protein At1g53850.1, supported by cDNA: 20801., supported by cDNA: supported by cDNA: gi_3421086 [Arabidopsis thaliana] (20S
  misc_feature (1)..(160): Homolog of NCBI NO: 15231824 NR Description: 20S proteasome alpha subunit E2 (PAE2); protein At3g14290.1, supported by cDNA: gi_13877964, supported by cDNA: supported by cDNA: gi_3421089 [Arabidopsis thaliana] (20S

SEQ ID NO: 76828 - DNA, 1690 bp, Arabidopsis thaliana
  misc_feature (1)..(1690): Ceres Seq. ID no. 12333741
  misc_feature: MA Experiment ID: 108461 Result: Down-regulated in Transcription
  misc_feature: MA Experiment 108461 PARAMETER Experiment Name: At_Germinating_Seeds_cDNA_P Parameter: Age (day) Value: 1 vs. 0
  misc_feature: MA Experiment 108461 PARAMETER Experiment Name: At_Germinating_Seeds_cDNA_P Parameter: Tissue Value: Germinating Seeds
  misc_feature: MA Experiment ID: 108569 Result: Up-regulated in Transcription
  misc_feature: MA Experiment 108569 PARAMETER Experiment Name: At_0.001%_MeJA__cDNA_P Parameter: Timepoint (hr) Value: 6
  misc_feature: MA Experiment 108569 PARAMETER Experiment Name: At_0.001%_MeJA__cDNA_P Parameter: Tissue Value: Aerial
  misc_feature: MA Experiment 108569 PARAMETER Experiment Name: At_0.001%_MeJA__cDNA_P Parameter: Treatment Value: 0.001% MeJA vs. No Treatment
  misc_feature: MA Experiment ID: 108573 Result: Up-regulated in Transcription
  misc_feature: MA Experiment 108573 PARAMETER Experiment Name: At_Drought_cDNA_P Parameter: Timepoint (hr) Value: 6
  misc_feature: MA Experiment 108573 PARAMETER Experiment Name: At_Drought_cDNA_P Parameter: Tissue Value: Aerial
  misc_feature: MA Experiment 108573 PARAMETER Experiment Name: At_Drought_cDNA_P Parameter: Treatment Value: Drought vs. No Drought
  misc_feature: MA Experiment ID: 108579 Result: Down-regulated in Transcription
  misc_feature: MA Experiment 108579 PARAMETER Experiment Name: At_4deg_Cold_cDNA_P Parameter: Temperature (deg C) Value: 4 vs. 22
  misc_feature: MA Experiment 108579 PARAMETER Experiment Name: At_4deg_Cold_cDNA_P Parameter: Timepoint (hr) Value: 6
  misc_feature: MA Experiment 108579 PARAMETER Experiment Name: At_4deg_Cold_cDNA_P Parameter: Tissue Value: Aerial
  misc_feature: MA Experiment ID: 108585 Result: Up-regulated in Transcription
  misc_feature: MA Experiment 108585 PARAMETER Experiment Name: At_5mM_NaNP_cDNA_P Parameter: Timepoint (hr) Value: 6
  misc_feature: MA Experiment 108585 PARAMETER Experiment Name: At_5mM_NaNP_cDNA_P Parameter: Tissue Value: Aerial
  misc_feature: MA Experiment 108585 PARAMETER Experiment Name: At_5mM_NaNP_cDNA_P Parameter: Treatment Value: null
  misc_feature: MA Experiment ID: 20000069 Result: Down-regulated in Transcription
  misc_feature: MA Experiment 20000069 PARAMETER Experiment Name: At_100uM_ABA_Mutants_cDNA_P Parameter: Plant Line Value: CS23
  misc_feature: MA Experiment 20000069 PARAMETER Experiment Name: At_100uM_ABA_Mutants_cDNA_P Parameter: Timepoint (hr) Value: 6
  misc_feature: MA Experiment 20000069 PARAMETER Experiment Name: At_100uM_ABA_Mutants_cDNA_P Parameter: Tissue Value: Aerial
  misc_feature: MA Experiment 20000069 PARAMETER Experiment Name: At_100uM_ABA_Mutants_cDNA_P Parameter: Treatment Value: 100uM ABA vs. No Treatment
  misc_feature: MA Experiment ID: 20000087 Result: Down-regulated in Transcription
  misc_feature: MA Experiment 20000087 PARAMETER Experiment Name: At_100uM_ABA_Mutants_cDNA_P Parameter: Plant Line Value: WS
  misc_feature: MA Experiment 20000087 PARAMETER Experiment Name: At_100uM_ABA_Mutants_cDNA_P Parameter: Timepoint (hr) Value: 6
  misc_feature: MA Experiment 20000087 PARAMETER Experiment Name: At_100uM_ABA_Mutants_cDNA_P Parameter: Tissue Value: Aerial
  misc_feature: MA Experiment 20000087 PARAMETER Experiment Name: At_100uM_ABA_Mutants_cDNA_P Parameter: Treatment Value: 100uM ABA vs. No Treatment
  misc_feature: MA Experiment ID: 20000089 Result: Down-regulated in Transcription
  misc_feature: MA Experiment ID: 20000090 Result: Down-regulated in Transcription
  misc_feature: MA Experiment ID: 20000117 Result: Down-regulated in Transcription
  misc_feature: MA Experiment 20000117 PARAMETER Experiment Name: At_100uM_ABA_Mutants_cDNA_P Parameter: Plant Line Value: Columbia
  misc_feature: MA Experiment 20000117 PARAMETER Experiment Name: At_100uM_ABA_Mutants_cDNA_P Parameter: Timepoint (hr) Value: 6
  misc_feature: MA Experiment 20000117 PARAMETER Experiment Name: At_100uM_ABA_Mutants_cDNA_P Parameter: Tissue Value: Aerial
  misc_feature: MA Experiment 20000117 PARAMETER Experiment Name: At_100uM_ABA_Mutants_cDNA_P Parameter: Treatment Value: 100uM ABA vs. No Treatment
  misc_feature: MA Experiment ID: 20000180 Result: Down-regulated in Transcription
  misc_feature: MA Experiment 20000180 PARAMETER Experiment Name: At_Germinating_Seeds_P Parameter: Age (hr) Value: 24 vs. 0
  misc_feature: MA Experiment 20000180 PARAMETER Experiment Name: At_Germinating_Seeds_P Parameter: Tissue Value: Germinating Seeds
  misc_feature: MA Experiment ID: 20000184 Result: Up-regulated in Transcription
  misc_feature: MA Experiment 20000184 PARAMETER Experiment Name: At_Shoots__P Parameter: Age (day) Value: 7
  misc_feature: MA Experiment 20000184 PARAMETER Experiment Name: At_Shoots__P Parameter: Tissue Value: Shoots vs. Whole Plant
  misc_feature: MA Experiment ID: 20000794 Result: Up-regulated in Transcription
  misc_feature: MA Experiment 20000794 PARAMETER Experiment Name: At_Petals_P Parameter: Age (day) Value: 23-25 days
  misc_feature: MA Experiment 20000794 PARAMETER Experiment Name: At_Petals_P Parameter: Plant Line Value: WS
  misc_feature: MA Experiment 20000794 PARAMETER Experiment Name: At_Petals_P Parameter: Tissue Value: Petals vs. Whole plant
  misc_feature: MA Experiment ID: 20001911 Result: Up-regulated in Transcription
  misc_feature: MA Experiment 20001911 PARAMETER Experiment Name: At_Drought_Reproduction_P Parameter: Age (day) Value: 40
  misc_feature: MA Experiment 20001911 PARAMETER Experiment Name: At_Drought_Reproduction_P Parameter: Organism Value: A. thaliana
  misc_feature: MA Experiment 20001911 PARAMETER Experiment Name: At_Drought_Reproduction_P Parameter: Plant Line Value: WS
  misc_feature: MA Experiment 20001911 PARAMETER Experiment Name: At_Drought_Reproduction_P Parameter: Timepoint (day) Value: 10
  misc_feature: MA Experiment 20001911 PARAMETER Experiment Name: At_Drought_Reproduction_P Parameter: Tissue Value: Flowers
  misc_feature: MA Experiment 20001911 PARAMETER Experiment Name: At_Drought_Reproduction_P Parameter: Treatment Value: Drought vs. No Drought
gtcctccgcttttccattttactcttcttgtatgtttctgtcttcttactcaacttttgcttcaggcttcgtctcttttgcaatttttgagttagccaagtgctcaagggagatacataatacctgaagatgtccaaggcaagtgatgccgtcagagaaccattggtggacaagaatatggctggatcaaaaccagaccagccgtggatggtttatctcagcacattcgttgcggtctgtggttcttttgcgttcggttcttgtgcgggatactcttcacctgctcaggctgcaattaggaatgacctttcattgactatagctgagttttcactctttggttctttactaacttttggcgcaatgatcggtgctataacaagcgggcctatagctgatttagttggaagaaagggggcgatgagagtttcctctgcattttgtgtagtcgggtggctagcaatcatctttgccaagggagtagtggctctggaccttggaagactggcaacgggatatggaatgggagcattttcctatgtggtgccaatctttatagcagaaattgcacctaaaactttcagaggggctctaaccacactgaaccagattctgatctgcactggagtgtcggtttccttcatcataggcacactagtgacgtggagagtcttggcattaataggaatcatcccatgcgctgcctccttccttggcctcttttttatccctgagtctccaagatggctggcaaaagtggggcgtgatacggagtttgaagctgcactgaggaagctccgtgggaagaaggctgatatttcggaggaggcagcagagatccaggattatatcgaaactctggaaaggctaccgaaagccaagatgctggatttgtttcagaggagatacatacgctctgttcttatagctttcgggttgatggtgtttcagcagtttggaggaatcaacggaatatgtttctacacaagctcgatatttgagcaagcaggttttcccacaagacttgggatgataatatatgctgttcttcaggtggtaatcactgcgcttaatgcaccgatagttgacagagccggaagaaaaccattgctactggtttctgcaacagggttagtgataggctgtttgatagcagcggtttctttctatctcaaggttcacgacatggcgcacgaagcagtcccagtcctggctgttgttggtataatggtgtacataggatcgttttcagcaggaatgggagcaatgccgtgggtggtcatgtctgagatatttcccataaacataaaaggagtagcaggaggcatggcgacgctggtgaactggtttggagcgtgggctgtttcttacactttcaacttcctcatgtcctggagctcttacggaactttcctcatttacgctgccatcaacgcgctggccattgtcttcgtcattgccatcgtgcctgagacaaaagggaagacattggagcagatccaagctatagtcaatccatagctcaaacacttcctagatgttcgtttctattagccagctgggacataaattgcaatcttggatctctttgcttttatgattctttactgagttcaattgttatcactctctctatttctaatctcttcttaatgaactttggacttcaatttgatgtttttccatagtt

SEQ ID NO: 76829 - protein, 463 aa, Arabidopsis thaliana; identical to SEQ ID NO: 40571
  peptide (1)..(463): Ceres Seq. ID no. 12333742
  misc_feature (30)..(461): Pfam Name: Sugar (and other) transporter Pfam Description: Sugar (and other) transporter
  misc_feature (1)..(463): Homolog of NCBI NO: 18407508 NR Description: putative sugar transporter; protein id: supported by cDNA: 114959. [Arabidopsis thaliana]
  misc_feature (1)..(463): Homolog of NCBI NO: 21536914 NR Description: putative sugar transporter [Arabidopsis thaliana]
  misc_feature (14)..(462): Homolog of NCBI NO: 23504385 NR Description: putative sugar transporter [Lycopersicon
  misc_feature (27)..(461): Homolog of NCBI NO: 18419741 NR Description: sugar transporter - like protein; protein id: supported by cDNA: 3250., supported by cDNA: gi_17381264 thaliana] >gi|17381265|gb|AAL36051.1| AT5g18840/F17K4_90
  misc_feature (1)..(461): Homolog of NCBI NO: 6729025 NR Description: putative sugar transporter [Arabidopsis thaliana]
  misc_feature (1)..(461): Homolog of NCBI NO: 30679397 NR Description: sugar transporter family [Arabidopsis thaliana]
  misc_feature (27)..(461): Homolog of NCBI NO: 21592787 NR Description: sugar transporter-like protein [Arabidopsis
  misc_feature (327)..(463): Homolog of NCBI NO: 25409087 NR Description: probable sugar transporter [imported] -
  misc_feature (1)..(98): Homolog of NCBI NO: 25409087 NR Description: probable sugar transporter [imported] -
  misc_feature (117)..(160): Homolog of NCBI NO: 25409087 NR Description: probable sugar transporter [imported] -

SEQ ID NO: 76830 - protein, 447 aa, Arabidopsis thaliana; identical to SEQ ID NO: 40572
  peptide (1)..(447): Ceres Seq. ID no. 12333743
  misc_feature (14)..(445): Pfam Name: Sugar (and other) transporter Pfam Description: Sugar (and other) transporter
  misc_feature (1)..(447): Homolog of NCBI NO: 18407508 NR Description: putative sugar transporter; protein id: supported by cDNA: 114959. [Arabidopsis thaliana]
  misc_feature (1)..(447): Homolog of NCBI NO: 21536914 NR Description: putative sugar transporter [Arabidopsis thaliana]
  misc_feature (1)..(446): Homolog of NCBI NO: 23504385 NR Description: putative sugar transporter [Lycopersicon
  misc_feature (11)..(445): Homolog of NCBI NO: 18419741 NR Description: sugar transporter - like protein; protein id: supported by cDNA: 3250., supported by cDNA: gi_17381264 thaliana] >gi|17381265|gb|AAL36051.1| AT5g18840/F17K4_90
  misc_feature (1)..(445): Homolog of NCBI NO: 6729025 NR Description: putative sugar transporter [Arabidopsis thaliana]
  misc_feature (1)..(445): Homolog of NCBI NO: 30679397 NR Description: sugar transporter family [Arabidopsis thaliana]
  misc_feature (11)..(445): Homolog of NCBI NO: 21592787 NR Description: sugar transporter-like protein [Arabidopsis
  misc_feature (311)..(447): Homolog of NCBI NO: 25409087 NR Description: probable sugar transporter [imported] -
  misc_feature (1)..(82): Homolog of NCBI NO: 25409087 NR Description: probable sugar transporter [imported] -
  misc_feature (101)..(144): Homolog of NCBI NO: 25409087 NR Description: probable sugar transporter [imported] -

SEQ ID NO: 76831 - protein, 437 aa, Arabidopsis thaliana; identical to SEQ ID NO: 40573
  peptide (1)..(437): Ceres Seq. ID no. 12333744
  misc_feature (4)..(435): Pfam Name: Sugar (and other) transporter Pfam Description: Sugar (and other) transporter
  misc_feature (1)..(437): Homolog of NCBI NO: 18407508 NR Description: putative sugar transporter; protein id: supported by cDNA: 114959. [Arabidopsis thaliana]
  misc_feature (1)..(437): Homolog of NCBI NO: 21536914 NR Description: putative sugar transporter [Arabidopsis thaliana]
  misc_feature (1)..(436): Homolog of NCBI NO: 23504385 NR Description: putative sugar transporter [Lycopersicon
  misc_feature (1)..(435): Homolog of NCBI NO: 18419741 NR Description: sugar transporter - like protein; protein id: supported by cDNA: 3250., supported by cDNA: gi_17381264 thaliana] >gi|17381265|gb|AAL36051.1| AT5g18840/F17K4_90
  misc_feature (1)..(435): Homolog of NCBI NO: 6729025 NR Description: putative sugar transporter [Arabidopsis thaliana]
  misc_feature (1)..(435): Homolog of NCBI NO: 30679397 NR Description: sugar transporter family [Arabidopsis thaliana]
  misc_feature (1)..(435): Homolog of NCBI NO: 21592787 NR Description: sugar transporter-like protein [Arabidopsis
  misc_feature (301)..(437): Homolog of NCBI NO: 25409087 NR Description: probable sugar transporter [imported] -
  misc_feature (1)..(72): Homolog of NCBI NO: 25409087 NR Description: probable sugar transporter [imported] -
  misc_feature (91)..(134): Homolog of NCBI NO: 25409087 NR Description: probable sugar transporter [imported] -

SEQ ID NO: 76832 - DNA, 1592 bp, Arabidopsis thaliana
  misc_feature (1)..(1592): Ceres Seq. ID no. 12335338
  misc_feature: MA Experiment ID: 108434 Result: Up-regulated in Transcription
  misc_feature: MA Experiment 108434 PARAMETER Experiment Name: At_Root_Tips_cDNA_P Parameter: Tissue Value: Root Tips
  misc_feature: MA Experiment ID: 108462 Result: Down-regulated in Transcription
  misc_feature: MA Experiment 108462 PARAMETER Experiment Name: At_Germinating_Seeds_cDNA_P Parameter: Age (day) Value: 2 vs. 0
  misc_feature: MA Experiment 108462 PARAMETER Experiment Name: At_Germinating_Seeds_cDNA_P Parameter: Tissue Value: Germinating Seeds
  misc_feature: MA Experiment ID: 108463 Result: Down-regulated in Transcription
  misc_feature: MA Experiment 108463 PARAMETER Experiment Name: At_Germinating_Seeds_cDNA_P Parameter: Age (day) Value: 3 vs. 0
  misc_feature: MA Experiment 108463 PARAMETER Experiment Name: At_Germinating_Seeds_cDNA_P Parameter: Tissue Value: Germinating Seeds
  misc_feature: MA Experiment ID: 108464 Result: Down-regulated in Transcription
  misc_feature: MA Experiment 108464 PARAMETER Experiment Name: At_Germinating_Seeds_cDNA_P Parameter: Age (day) Value: 4 vs. 0
  misc_feature: MA Experiment 108464 PARAMETER Experiment Name: At_Germinating_Seeds_cDNA_P Parameter: Tissue Value: Germinating Seeds
  misc_feature: MA Experiment ID: 108595 Result: Down-regulated in Transcription
  misc_feature: MA Experiment 108595 PARAMETER Experiment Name: At_Ler-pi_Ovule_cDNA_P Parameter: Plant Line Value: null
  misc_feature: MA Experiment ID: 20000087 Result: Down-regulated in Transcription
  misc_feature: MA Experiment 20000087 PARAMETER Experiment Name: At_100uM_ABA_Mutants_cDNA_P Parameter: Plant Line Value: WS
  misc_feature: MA Experiment 20000087 PARAMETER Experiment Name: At_100uM_ABA_Mutants_cDNA_P Parameter: Timepoint (hr) Value: 6
  misc_feature: MA Experiment 20000087 PARAMETER Experiment Name: At_100uM_ABA_Mutants_cDNA_P Parameter: Tissue Value: Aerial
  misc_feature: MA Experiment 20000087 PARAMETER Experiment Name: At_100uM_ABA_Mutants_cDNA_P Parameter: Treatment Value: 100uM ABA vs. No Treatment
  misc_feature: MA Experiment ID: 20000227 Result: Up-regulated in Transcription
  misc_feature: MA Experiment 20000227 PARAMETER Experiment Name: At_Root-Tips-vs-Tops_P Parameter: Tissue Value: Root Tips vs. Root Tops
  misc_feature: MA Experiment ID: 20000234 Result: Up-regulated in Transcription
  misc_feature: MA Experiment 20000234 PARAMETER Experiment Name: At_Siliques_P Parameter: Age (day) Value: 21
  misc_feature: MA Experiment 20000234 PARAMETER Experiment Name: At_Siliques_P Parameter: Organism Value: A. thaliana
  misc_feature: MA Experiment 20000234 PARAMETER Experiment Name: At_Siliques_P Parameter: Plant Line Value: WS
  misc_feature: MA Experiment 20000234 PARAMETER Experiment Name: At_Siliques_P Parameter: Tissue Value: Less Than 5mm Siliques vs. Whole Plant
  misc_feature: MA Experiment ID: 20000437 Result: Down-regulated in Transcription
  misc_feature: MA Experiment 20000437 PARAMETER Experiment Name: At_Drought_P Parameter: Age (day) Value: 8
  misc_feature: MA Experiment 20000437 PARAMETER Experiment Name: At_Drought_P Parameter: Organism Value: A. thaliana
  misc_feature: MA Experiment 20000437 PARAMETER Experiment Name: At_Drought_P Parameter: Plant Line Value: WS
  misc_feature: MA Experiment 20000437 PARAMETER Experiment Name: At_Drought_P Parameter: Timepoint (hr) Value: 24
  misc_feature: MA Experiment 20000437 PARAMETER Experiment Name: At_Drought_P Parameter: Tissue Value: Whole Plant
  misc_feature: MA Experiment 20000437 PARAMETER Experiment Name: At_Drought_P Parameter: Treatment Value: Drought vs. No Drought
ggttcatttgctctgcaaatttgtctgaaaaaatctttgtgcgaagcaggaaaaatgtcgtcgacccatcagttagtttcttcgatgatctcttcttcctcatccactttcttagccccttcaaattttaatctcagaactcgaaatgcttgcttacccatggcaaaacgggtcaatacttgcaaatgtgttgctacgccgcaagagaagatcgagtataagaccaaagtgtcacggaattcaaacatgtccaaacttcaggctggatacctattcccggagattgcaagaagaaggtctgcacacttgttgaaatatccagatgcacaagttataagtcttggaataggcgacacaactgagccaattcctgaagtgatcacttctgctatggcaaagaaagctcatgagttgtcaacaatagagggatatagtggttatggtgctgaacaaggtgcaaagccactgagagctgctattgcgaaaacattctacggtggccttggcataggggatgatgacgtttttgtttctgatggagctaaatgtgatatctcacgtctccaggttatgtttggttccaatgttacaattgctgttcaggatccttcatatccggcttatgtggactccagtgttattatgggtcagactgggcaatttaacactgatgtgcaaaagtatggaaacatcgagtacatgagatgcactccagagaatggcttctttcccgacttgtccaccgttggcaggacagatataattttcttctgttccccaaataaccctacgggtgctgctgccacgagagagcaactaacgcagttagttgagtttgcaaagaagaacggttctataatagtgtatgattccgcctatgcaatgtacatgtctgatgataacccacgatccatcttcgaaatccctggagcagaggaggtcgctatggagacagcttcgttcagcaaatatgctggtttcactggagttcgacttggttggactgtcatcccgaaaaagctactctattcagacggtttccctgttgccaaagacttcaatcggattatctgcacttgtttcaatggtgcatctaatatctctcaagctggtgctcttgcttgccttacacccgaaggacttgaggcaatgcataaggtgattggattctataaagaaaacacaaacataatcattgacacattcacatctctcgggtatgatgtatatggaggaaagaatgcgccttacgtatgggttcacttcccgaaccaaagctcatgggatgtgtttgctgagattctggagaagactcatgtggttacaactccaggaagtgggtttggaccagggggtgaagggttcgttcgtgtcagtgcctttggtcacagagagaacatcttagaggcatgtcgaagattcaagcagctttacaaatgaagaaccttgtttgtaatcgttcctcatcatcatcaccctctttaatgacatgatttgagttaaaataatgtcgtttccattgttttctggaatttgtagaagacacttttgacaccagtgtttcaagcaatttggcaaagtattttaacaac

SEQ ID NO: 76833 - protein, 479 aa, Arabidopsis thaliana
  peptide (1)..(479): Ceres Seq. ID no. 12335339
  misc_feature (166)..(478): Pfam Name: Aminotransferase class I and II Pfam Description: Aminotransferase class I and II
  misc_feature (19)..(479): Homolog of NCBI NO: 18418270 NR Description: putative protein; protein id: At4g33680.1, by cDNA: gi_15912290, supported by cDNA: gi_17529043 [Arabidopsis >gi|15912291|gb|AAL08279.1| AT4g33680/T16L1_170 [Arabidopsis
  misc_feature (54)..(479): Homolog of NCBI NO: 7447845 NR Description: probable transaminase (EC 2.6.1.-) T16L1.170 - Arabidopsis thaliana >gi|3549670|emb|CAA20581.1| putative [Arabidopsis thaliana] >gi|7270317|emb|CAB80085.1| putative
  misc_feature (31)..(479): Homolog of NCBI NO: 37703720 NR Description: putative aminotransferase AGD2 [Oryza sativa
  misc_feature (74)..(475): Homolog of NCBI NO: 37703722 NR Description: putative aminotransferase ALD1 [Oryza sativa
  misc_feature (74)..(475): Homolog of NCBI NO: 24414269 NR Description: Putative transaminase [Oryza sativa (japonica
  misc_feature (69)..(479): Homolog of NCBI NO: 18397344 NR Description: putative aspartate aminotransferase; protein id: supported by cDNA: gi_15982837 [Arabidopsis thaliana] At2g13810/F13J11.16 [Arabidopsis thaliana]
  misc_feature (75)..(479): Homolog of NCBI NO: 25315768 NR Description: probable aspartate aminotransferase [imported] -
  misc_feature (80)..(477): Homolog of NCBI NO: 24213476 NR Description: aminotransferase [Leptospira interrogans serovar str. 56601] >gi|24194250|gb|AAN47975.1|AE011264_3
  misc_feature (80)..(479): Homolog of NCBI NO: 23124300 NR Description: hypothetical protein [Nostoc punctiforme]
  misc_feature (80)..(479): Homolog of NCBI NO: 17232595 NR Description: aminotransferase [Nostoc sp. PCC 7120]
GSFALQICLKKSLCEAGKMSSTHQLVSSMISSSSSTFLAPSNFNLRTRNACLPMAKRVNTCKCVATPQEKIEYKTKVSRNSNMSKLQAGYLFPEIARRRSAHLLKYPDAQVISLGIGDTTEPIPEVITSAMAKKAHELSTIEGYSGYGAEQGAKPLRAAIAKTFYGGLGIGDDDVFVSDGAKCDISRLQVMFGSNVTIAVQDPSYPAYVDSSVIMGQTGQFNTDVQKYGNIEYMRCTPENGFFPDLSTVGRTDIIFFCSPNNPTGAAATREQLTQLVEFAKKNGSIIVYDSAYAMYMSDDNPRSIFEIPGAEEVAMETASFSKYAGFTGVRLGWTVIPKKLLYSDGFPVAKDFNRIICTCFNGASNISQAGALACLTPEGLEAMHKVIGFYKENTNIIIDTFTSLGYDVYGGKNAPYVWVHFPNQSSWDVFAEILEKTHVVTTPGSGFGPGGEGFVRVSAFGHRENILEACRRFKQLYK

SEQ ID NO: 76834 - protein, 461 aa, Arabidopsis thaliana [sequence omitted]

SEQ ID NO: 76835 - protein, 451 aa, Arabidopsis thaliana
  peptide (1)..(451): Ceres Seq. ID no. 12335341
  misc_feature (138)..(450): Pfam Name: Aminotransferase class I and II Pfam Description: Aminotransferase class I and II
  misc_feature (1)..(451): Homolog of NCBI NO: 18418270 NR Description: putative protein; protein id: At4g33680.1, by cDNA: gi_15912290, supported by cDNA: gi_17529043 [Arabidopsis >gi|15912291|gb|AAL08279.1| AT4g33680/T16L1_170 [Arabidopsis
  misc_feature (26)..(451): Homolog of NCBI NO: 7447845 NR Description: probable transaminase (EC 2.6.1.-) T16L1.170 - Arabidopsis thaliana >gi|3549670|emb|CAA20581.1| putative [Arabidopsis thaliana] >gi|7270317|emb|CAB80085.1| putative
  misc_feature (3)..(451): Homolog of NCBI NO: 37703720 NR Description: putative aminotransferase AGD2 [Oryza sativa
  misc_feature (46)..(447): Homolog of NCBI NO: 37703722 NR Description: putative aminotransferase ALD1 [Oryza sativa
  misc_feature (46)..(447): Homolog of NCBI NO: 24414269 NR Description: Putative transaminase [Oryza sativa (japonica
  misc_feature (41)..(451): Homolog of NCBI NO: 18397344 NR Description: putative aspartate aminotransferase; protein id: supported by cDNA: gi_15982837 [Arabidopsis thaliana] At2g13810/F13J11.16 [Arabidopsis thaliana]
  misc_feature (47)..(451): Homolog of NCBI NO: 25315768 NR Description: probable aspartate aminotransferase [imported] -
  misc_feature (52)..(449): Homolog of NCBI NO: 24213476 NR Description: aminotransferase [Leptospira interrogans serovar str. 56601] >gi|24194250|gb|AAN47975.1|AE011264_3
  misc_feature (52)..(451): Homolog of NCBI NO: 23124300 NR Description: hypothetical protein [Nostoc punctiforme]
  misc_feature (52)..(451): Homolog of NCBI NO: 17232595 NR Description: aminotransferase [Nostoc sp. PCC 7120]
MISSSSSTFLAPSNFNLRTRNACLPMAKRVNTCKCVATPQEKIEYKTKVSRNSNMSKLQAGYLFPEIARRRSAHLLKYPDAQVISLGIGDTTEPIPEVITSAMAKKAHELSTIEGYSGYGAEQGAKPLRAAIAKTFYGGLGIGDDDVFVSDGAKCDISRLQVMFGSNVTIAVQDPSYPAYVDSSVIMGQTGQFNTDVQKYGNIEYMRCTPENGFFPDLSTVGRTDIIFFCSPNNPTGAAATREQLTQLVEFAKKNGSIIVYDSAYAMYMSDDNPRSIFEIPGAEEVAMETASFSKYAGFTGVRLGWTVIPKKLLYSDGFPVAKDFNRIICTCFNGASNISQAGALACLTPEGLEAMHKVIGFYKENTNIIIDTFTSLGYDVYGGKNAPYVWVHFPNQSSWDVFAEILEKTHVVTTPGSGFGPGGEGFVRVSAFGHRENILEACRRFKQLYK

SEQ ID NO: 76836 - DNA, 1303 bp, Arabidopsis thaliana
  misc_feature (1)..(1303): Ceres Seq. ID no. 12335593
  misc_feature: MA Experiment ID: 108434 Result: Up-regulated in Transcription
  misc_feature: MA Experiment 108434 PARAMETER Experiment Name: At_Root_Tips_cDNA_P Parameter: Tissue Value: Root Tips
  misc_feature: MA Experiment ID: 108462 Result: Down-regulated in Transcription
  misc_feature: MA Experiment 108462 PARAMETER Experiment Name: At_Germinating_Seeds_cDNA_P Parameter: Age (day) Value: 2 vs. 0
  misc_feature: MA Experiment 108462 PARAMETER Experiment Name: At_Germinating_Seeds_cDNA_P Parameter: Tissue Value: Germinating Seeds
  misc_feature: MA Experiment ID: 108464 Result: Down-regulated in Transcription
  misc_feature: MA Experiment 108464 PARAMETER Experiment Name: At_Germinating_Seeds_cDNA_P Parameter: Age (day) Value: 4 vs. 0
  misc_feature: MA Experiment 108464 PARAMETER Experiment Name: At_Germinating_Seeds_cDNA_P Parameter: Tissue Value: Germinating Seeds
  misc_feature: MA Experiment ID: 108569 Result: Down-regulated in Transcription
  misc_feature: MA Experiment 108569 PARAMETER Experiment Name: At_0.001%_MeJA__cDNA_P Parameter: Timepoint (hr) Value: 6
  misc_feature: MA Experiment 108569 PARAMETER Experiment Name: At_0.001%_MeJA__cDNA_P Parameter: Tissue Value: Aerial
  misc_feature: MA Experiment 108569 PARAMETER Experiment Name: At_0.001%_MeJA__cDNA_P Parameter: Treatment Value: 0.001% MeJA vs. No Treatment
  misc_feature: MA Experiment ID: 108576 Result: Up-regulated in Transcription
  misc_feature: MA Experiment 108576 PARAMETER Experiment Name: At_42deg_Heat_cDNA_P Parameter: Temperature (deg C) Value: 42 vs. 22
  misc_feature: MA Experiment 108576 PARAMETER Experiment Name: At_42deg_Heat_cDNA_P Parameter: Timepoint (hr) Value: 1
  misc_feature: MA Experiment 108576 PARAMETER Experiment Name: At_42deg_Heat_cDNA_P Parameter: Tissue Value: Aerial
  misc_feature: MA Experiment ID: 108577 Result: Up-regulated in Transcription
  misc_feature: MA Experiment 108577 PARAMETER Experiment Name: At_42deg_Heat_cDNA_P Parameter: Temperature (deg C) Value: 42 vs. 22
  misc_feature: MA Experiment 108577 PARAMETER Experiment Name: At_42deg_Heat_cDNA_P Parameter: Timepoint (hr) Value: 6
  misc_feature: MA Experiment 108577 PARAMETER Experiment Name: At_42deg_Heat_cDNA_P Parameter: Tissue Value: Aerial
  misc_feature: MA Experiment ID: 108579 Result: Down-regulated in Transcription
  misc_feature: MA Experiment 108579 PARAMETER Experiment Name: At_4deg_Cold_cDNA_P Parameter: Temperature (deg C) Value: 4 vs. 22
  misc_feature: MA Experiment 108579 PARAMETER Experiment Name: At_4deg_Cold_cDNA_P Parameter: Timepoint (hr) Value: 6
  misc_feature: MA Experiment 108579 PARAMETER Experiment Name: At_4deg_Cold_cDNA_P Parameter: Tissue Value: Aerial
  misc_feature: MA Experiment ID: 20000111 Result: Up-regulated in Transcription
  misc_feature: MA Experiment 20000111 PARAMETER Experiment Name: At_42deg_Heat_cDNA_P Parameter: Temperature (deg C) Value: 42 vs. 22
  misc_feature: MA Experiment 20000111 PARAMETER Experiment Name: At_42deg_Heat_cDNA_P Parameter: Timepoint (hr) Value: 6
  misc_feature: MA Experiment 20000111 PARAMETER Experiment Name: At_42deg_Heat_cDNA_P Parameter: Tissue Value: Aerial
  misc_feature: MA Experiment ID: 20000112 Result: Up-regulated in Transcription
  misc_feature: MA Experiment 20000112 PARAMETER Experiment Name: At_42deg_Heat_cDNA_P Parameter: Temperature (deg C) Value: 42 vs. 22
  misc_feature: MA Experiment 20000112 PARAMETER Experiment Name: At_42deg_Heat_cDNA_P Parameter: Timepoint (hr) Value: 2
  misc_feature: MA Experiment 20000112 PARAMETER Experiment Name: At_42deg_Heat_cDNA_P Parameter: Tissue Value: Aerial
  misc_feature: MA Experiment ID: 20000113 Result: Up-regulated in Transcription
  misc_feature: MA Experiment 20000113 PARAMETER Experiment Name: At_42deg_Heat_cDNA_P Parameter: Temperature (deg C) Value: 42 vs. 22
  misc_feature: MA Experiment 20000113 PARAMETER Experiment Name: At_42deg_Heat_cDNA_P Parameter: Timepoint (hr) Value: 8
  misc_feature: MA Experiment 20000113 PARAMETER Experiment Name: At_42deg_Heat_cDNA_P Parameter: Tissue Value: Aerial
  misc_feature: MA Experiment ID: 20000144 Result: Up-regulated in Transcription
  misc_feature: MA Experiment 20000144 PARAMETER Experiment Name: At_42deg_Heat_cDNA_P Parameter: Temperature (deg C) Value: 42 vs. 22
  misc_feature: MA Experiment 20000144 PARAMETER Experiment Name: At_42deg_Heat_cDNA_P Parameter: Timepoint (hr) Value: 1
  misc_feature: MA Experiment 20000144 PARAMETER Experiment Name: At_42deg_Heat_cDNA_P Parameter: Tissue Value: Aerial
  misc_feature: MA Experiment ID: 20000171 Result: Up-regulated in Transcription
  misc_feature: MA Experiment 20000171 PARAMETER Experiment Name: At_42deg_Heat_P Parameter: Age (day) Value: 14
  misc_feature: MA Experiment 20000171 PARAMETER Experiment Name: At_42deg_Heat_P Parameter: Organism Value: A. thaliana
  misc_feature: MA Experiment 20000171 PARAMETER Experiment Name: At_42deg_Heat_P Parameter: Plant Line Value: WS
  misc_feature: MA Experiment 20000171 PARAMETER Experiment Name: At_42deg_Heat_P Parameter: Temperature (deg C) Value: 42 vs. 22
  misc_feature: MA Experiment 20000171 PARAMETER Experiment Name: At_42deg_Heat_P Parameter: Timepoint (hr) Value: 1
  misc_feature: MA Experiment 20000171 PARAMETER Experiment Name: At_42deg_Heat_P Parameter: Tissue Value: Aerial
  misc_feature: MA Experiment ID: 20000173 Result: Up-regulated in Transcription
  misc_feature: MA Experiment 20000173 PARAMETER Experiment Name: At_42deg_Heat_P Parameter: Age (day) Value: 14
  misc_feature: MA Experiment 20000173 PARAMETER Experiment Name: At_42deg_Heat_P Parameter: Organism Value: A. thaliana
  misc_feature: MA Experiment 20000173 PARAMETER Experiment Name: At_42deg_Heat_P Parameter: Plant Line Value: WS
  misc_feature: MA Experiment 20000173 PARAMETER Experiment Name: At_42deg_Heat_P Parameter: Temperature (deg C) Value: 42 vs. 22
  misc_feature: MA Experiment 20000173 PARAMETER Experiment Name: At_42deg_Heat_P Parameter: Timepoint (hr) Value: 6
  misc_feature: MA Experiment 20000173 PARAMETER Experiment Name: At_42deg_Heat_P Parameter: Tissue Value: Aerial
  misc_feature: MA Experiment ID: 20000184 Result: Down-regulated in Transcription
  misc_feature: MA Experiment 20000184 PARAMETER Experiment Name: At_Shoots__P Parameter: Age (day) Value: 7
  misc_feature: MA Experiment 20000184 PARAMETER Experiment Name: At_Shoots__P Parameter: Tissue Value: Shoots vs. Whole Plant
  misc_feature: MA Experiment ID: 20000437 Result: Up-regulated in Transcription
  misc_feature: MA Experiment 20000437 PARAMETER Experiment Name: At_Drought_P Parameter: Age (day) Value: 8
  misc_feature: MA Experiment 20000437 PARAMETER Experiment Name: At_Drought_P Parameter: Organism Value: A. thaliana
  misc_feature: MA Experiment 20000437 PARAMETER Experiment Name: At_Drought_P Parameter: Plant Line Value: WS
  misc_feature: MA Experiment 20000437 PARAMETER Experiment Name: At_Drought_P Parameter: Timepoint (hr) Value: 24
  misc_feature: MA Experiment 20000437 PARAMETER Experiment Name: At_Drought_P Parameter: Tissue Value: Whole Plant
  misc_feature: MA Experiment 20000437 PARAMETER Experiment Name: At_Drought_P Parameter: Treatment Value: Drought vs. No Drought
  misc_feature: MA Experiment ID: 20001248 Result: Up-regulated in Transcription
  misc_feature: MA Experiment 20001248 PARAMETER Experiment Name: At_Far-red-induction_P Parameter: Age (day) Value: 7
  misc_feature: MA Experiment 20001248 PARAMETER Experiment Name: At_Far-red-induction_P Parameter: Light Value: Far-red vs. White
  misc_feature: MA Experiment 20001248 PARAMETER Experiment Name: At_Far-red-induction_P Parameter: Organism Value: A. thaliana
  misc_feature: MA Experiment 20001248 PARAMETER Experiment Name: At_Far-red-induction_P Parameter: Plant Line Value: Columbia
  misc_feature: MA Experiment 20001248 PARAMETER Experiment Name: At_Far-red-induction_P Parameter: Timepoint (hr) Value: 4
  misc_feature: MA Experiment 20001248 PARAMETER Experiment Name: At_Far-red-induction_P Parameter: Tissue Value: Whole Plant
  misc_feature: MA Experiment ID: 20001450 Result: Up-regulated in Transcription
  misc_feature: MA Experiment 20001450 PARAMETER Experiment Name: At_Far-red-induction_P Parameter: Age (day) Value: 7
  misc_feature: MA Experiment 20001450 PARAMETER Experiment Name: At_Far-red-induction_P Parameter: Light Value: Far-red vs. White
  misc_feature: MA Experiment 20001450 PARAMETER Experiment Name: At_Far-red-induction_P Parameter: Organism Value: A. thaliana
  misc_feature: MA Experiment 20001450 PARAMETER Experiment Name: At_Far-red-induction_P Parameter: Plant Line Value: Columbia
  misc_feature: MA Experiment 20001450 PARAMETER Experiment Name: At_Far-red-induction_P Parameter: Timepoint (hr) Value: 8
  misc_feature: MA Experiment 20001450 PARAMETER Experiment Name: At_Far-red-induction_P Parameter: Tissue Value: Whole Plant
  misc_feature: MA Experiment ID: 20001451 Result: Up-regulated in Transcription
  misc_feature: MA Experiment 20001451 PARAMETER Experiment Name: At_Far-red-induction_P Parameter: Age (day) Value: 7
  misc_feature: MA Experiment 20001451 PARAMETER Experiment Name: At_Far-red-induction_P Parameter: Light Value: Far-red vs. White
  misc_feature: MA Experiment 20001451 PARAMETER Experiment Name: At_Far-red-induction_P Parameter: Organism Value: A. thaliana
  misc_feature: MA Experiment 20001451 PARAMETER Experiment Name: At_Far-red-induction_P Parameter: Plant Line Value: Columbia
  misc_feature: MA Experiment 20001451 PARAMETER Experiment Name: At_Far-red-induction_P Parameter: Timepoint (hr) Value: 24
  misc_feature: MA Experiment 20001451 PARAMETER Experiment Name: At_Far-red-induction_P Parameter: Tissue Value: Whole Plant
aaagaacccaaagctcttggaggaggtgatcttctcttctcagatcatcttctactcttgagtatacccttcctttgaagataattcctagtttgggacttatccttacttctccgggatttcactttaatccaccgaagagttttgacatctgaattgtattgttttgggtgtgatcccgatagaattcgagggtaggaatcggaaagtagggtgatttggtttagaagaagaaagaaatggagggttttgtcgatcactacattgttctaggtttagcttctggagaggaagctctgaagcttaccgagaaggagattgcaaaagcatacaagttgaaagctttggacttgcatcctgataaacgccctgatgatcctgatgcccatgagaaatttcagaggcttaagacatcttacgaggttctcaaagacgagaaagcccggaagctgtttgatgatcttcttagaatccagcgtgagaaacaacataagaaatcgcaagtagattccaagaggcgtaagatgatgtcagatctggaggaaagggagcgttctgctttttctcctaatccttccgctagagcttatgatgaagaagagagaatcgctaggaagcttaaggaggagatagataggatacgtgcaagacatgcgaagaagaaaagtggtttccaaactccagagagtaatgtagatgaaaagagaaaagaagaaagaagtggtgctggagctagtgttcaactcgataaagagagaatgttgaaggtttcttgggaaaaaagtggtgaagggtatacagctggaaggctaagagaagtgttttctgagtttggtgaggttgaagatgttgttattaggagtaccaagaagaaatgttctgctcttattgtaatggctacaaaggatggagctgttgcagcgacgaggacattgtgtggcaatctttctaatccattgttggttgtacctcttcagaaagcagcccaaactgattttctgacggctaagaaatctgcagaagcagaaccgcagagtaacatagtaggtgccggtcttcaagcttatgaagatgccgtcatgcaaagactgctacaggcggctatggaccagaaaaagcgaggggtttaagccacatgatcaagaacaaagctccttcaagaccaaagtgataaagaataaagctctgcttcatgattaagaattaagctccttatacattgtttgtgtacatccaatctcatatcagttgttgttgtagaatttaaaattctaactcttctcgaaaaaaaaaatgcttcgta

SEQ ID NO: 76837 - protein, 296 aa, Arabidopsis thaliana
  peptide (1)..(296): Ceres Seq. ID no. 12335594
  misc_feature (6)..(76): Pfam Name: DnaJ domain Pfam Description: DnaJ domain
  misc_feature (1)..(286): Homolog of NCBI NO: 8809700 NR Description: dbj|BAA91724.1~gene_id:MQM1.14~similar to unknown
  misc_feature (1)..(296): Homolog of NCBI NO: 30689058 NR Description: DnaJ protein family [Arabidopsis thaliana] putative protein [Arabidopsis thaliana]
  misc_feature (5)..(294): Homolog of NCBI NO: 29126919 NR Description: Similar to hypothetical protein FLJ10634 [Danio
  misc_feature (5)..(292): Homolog of NCBI NO: 8922563 NR Description: hypothetical protein FLJ10634 [Homo sapiens] unnamed protein product [Homo sapiens]
  misc_feature (5)..(292): Homolog of NCBI NO: 34856699 NR Description: similar to RIKEN cDNA 1700025B16 [Rattus
  misc_feature (5)..(292): Homolog of NCBI NO: 20982831 NR Description: RIKEN cDNA 1700025B16 [Mus musculus]
  misc_feature (5)..(294): Homolog of NCBI NO: 24645889 NR Description: CG17187-PA [Drosophila melanogaster]
  misc_feature (5)..(292): Homolog of NCBI NO: 26346254 NR Description: unnamed protein product [Mus musculus]
  misc_feature (17)..(294): Homolog of NCBI NO: 31202877 NR Description: ENSANGP00000018929 [Anopheles gambiae]
  misc_feature (23)..(292): Homolog of NCBI NO: 37589384 NR Description: Unknown (protein for MGC:69064) [Xenopus laevis]
MEGFVDHYIVLGLASGEEALKLTEKEIAKAYKLKALDLHPDKRPDDPDAHEKFQRLKTSYEVLKDEKARKLFDDLLRIQREKQHKKSQVDSKRRKMMSDLEERERSAFSPNPSARAYDEEERIARKLKEEIDRIRARHAKKKSGFQTPESNVDEKRKEERSGAGASVQLDKERMLKVSWEKSGEGYTAGRLREVFSEFGEVEDVVIRSTKKKCSALIVMATKDGAVAATRTLCGNLSNPLLVVPLQKAAQTDFLTAKKSAEAEPQSNIVGAGLQAYEDAVMQRLLQAAMDQKKRGV

SEQ ID NO: 76838 - protein, 201 aa, Arabidopsis thaliana
  peptide (1)..(201): Ceres Seq. ID no. 12335595
  misc_feature (1)..(88): Pfam Name: Caldesmon Pfam Description: Caldesmon
  misc_feature (1)..(191): Homolog of NCBI NO: 8809700 NR Description: dbj|BAA91724.1~gene_id:MQM1.14~similar to unknown
  misc_feature (1)..(201): Homolog of NCBI NO: 30689058 NR Description: DnaJ protein family [Arabidopsis thaliana] putative protein [Arabidopsis thaliana]
  misc_feature (1)..(199): Homolog of NCBI NO: 29126919 NR Description: Similar to hypothetical protein FLJ10634 [Danio
  misc_feature (1)..(197): Homolog of NCBI NO: 8922563 NR Description: hypothetical protein FLJ10634 [Homo sapiens] unnamed protein product [Homo sapiens]
  misc_feature (1)..(197): Homolog of NCBI NO: 34856699 NR Description: similar to RIKEN cDNA 1700025B16 [Rattus
  misc_feature (1)..(197): Homolog of NCBI NO: 20982831 NR Description: RIKEN cDNA 1700025B16 [Mus musculus]
  misc_feature (1)..(199): Homolog of NCBI NO: 24645889 NR Description: CG17187-PA [Drosophila melanogaster]
  misc_feature (1)..(197): Homolog of NCBI NO: 26346254 NR Description: unnamed protein product [Mus musculus]
  misc_feature (1)..(199): Homolog of NCBI NO: 31202877 NR Description: ENSANGP00000018929 [Anopheles gambiae]
  misc_feature (1)..(197): Homolog of NCBI NO: 37589384 NR Description: Unknown (protein for MGC:69064) [Xenopus laevis]
MMSDLEERERSAFSPNPSARAYDEEERIARKLKEEIDRIRARHAKKKSGFQTPESNVDEKRKEERSGAGASVQLDKERMLKVSWEKSGEGYTAGRLREVFSEFGEVEDVVIRSTKKKCSALIVMATKDGAVAATRTLCGNLSNPLLVVPLQKAAQTDFLTAKKSAEAEPQSNIVGAGLQAYEDAVMQRLLQAAMDQKKRGV

SEQ ID NO: 76839 - protein, 200 aa, Arabidopsis thaliana
  peptide (1)..(200): Ceres Seq. ID no. 12335596
  misc_feature (1)..(87): Pfam Name: Caldesmon Pfam Description: Caldesmon
  misc_feature (1)..(190): Homolog of NCBI NO: 8809700 NR Description: dbj|BAA91724.1~gene_id:MQM1.14~similar to unknown
  misc_feature (1)..(200): Homolog of NCBI NO: 30689058 NR Description: DnaJ protein family [Arabidopsis thaliana] putative protein [Arabidopsis thaliana]
  misc_feature (1)..(198): Homolog of NCBI NO: 29126919 NR Description: Similar to hypothetical protein FLJ10634 [Danio
  misc_feature (1)..(196): Homolog of NCBI NO: 8922563 NR Description: hypothetical protein FLJ10634 [Homo sapiens] unnamed protein product [Homo sapiens]
  misc_feature (1)..(196): Homolog of NCBI NO: 34856699 NR Description: similar to RIKEN cDNA 1700025B16 [Rattus
  misc_feature (1)..(196): Homolog of NCBI NO: 20982831 NR Description: RIKEN cDNA 1700025B16 [Mus musculus]
  misc_feature (1)..(198): Homolog of NCBI NO: 24645889 NR Description: CG17187-PA [Drosophila melanogaster]
  misc_feature (1)..(196): Homolog of NCBI NO: 26346254 NR Description: unnamed protein product [Mus musculus]
  misc_feature (1)..(198): Homolog of NCBI NO: 31202877 NR Description: ENSANGP00000018929 [Anopheles gambiae]
  misc_feature (1)..(196): Homolog of NCBI NO: 37589384 NR Description: Unknown (protein for MGC:69064) [Xenopus laevis]
MSDLEERERSAFSPNPSARAYDEEERIARKLKEEIDRIRARHAKKKSGFQTPESNVDEKRKEERSGAGASVQLDKERMLKVSWEKSGEGYTAGRLREVFSEFGEVEDVVIRSTKKKCSALIVMATKDGAVAATRTLCGNLSNPLLVVPLQKAAQTDFLTAKKSAEAEPQSNIVGAGLQAYEDAVMQRLLQAAMDQKKRGV

SEQ ID NO: 76840 - DNA, 898 bp, Arabidopsis thaliana
  misc_feature (1)..(898): Ceres Seq. ID no. 12335660
  misc_feature: MA Experiment ID: 108434 Result: Up-regulated in Transcription
  misc_feature: MA Experiment 108434 PARAMETER Experiment Name: At_Root_Tips_cDNA_P Parameter: Tissue Value: Root Tips
  misc_feature: MA Experiment ID: 108462 Result: Down-regulated in Transcription
  misc_feature: MA Experiment 108462 PARAMETER Experiment Name: At_Germinating_Seeds_cDNA_P Parameter: Age (day) Value: 2 vs. 0
  misc_feature: MA Experiment 108462 PARAMETER Experiment Name: At_Germinating_Seeds_cDNA_P Parameter: Tissue Value: Germinating Seeds
  misc_feature: MA Experiment ID: 108463 Result: Down-regulated in Transcription
  misc_feature: MA Experiment 108463 PARAMETER Experiment Name: At_Germinating_Seeds_cDNA_P Parameter: Age (day) Value: 3 vs. 0
  misc_feature: MA Experiment 108463 PARAMETER Experiment Name: At_Germinating_Seeds_cDNA_P Parameter: Tissue Value: Germinating Seeds
  misc_feature: MA Experiment ID: 108464 Result: Down-regulated in Transcription
  misc_feature: MA Experiment 108464 PARAMETER Experiment Name: At_Germinating_Seeds_cDNA_P Parameter: Age (day) Value: 4 vs. 0
  misc_feature: MA Experiment 108464 PARAMETER Experiment Name: At_Germinating_Seeds_cDNA_P Parameter: Tissue Value: Germinating Seeds
  misc_feature: MA Experiment ID: 20000180 Result: Down-regulated in Transcription
  misc_feature: MA Experiment 20000180 PARAMETER Experiment Name: At_Germinating_Seeds_P Parameter: Age (hr) Value: 24 vs. 0
  misc_feature: MA Experiment 20000180 PARAMETER Experiment Name: At_Germinating_Seeds_P Parameter: Tissue Value: Germinating Seeds
  misc_feature: MA Experiment ID: 20000184 Result: Down-regulated in Transcription
  misc_feature: MA Experiment 20000184 PARAMETER Experiment Name: At_Shoots__P Parameter: Age (day) Value: 7
  misc_feature: MA Experiment 20000184 PARAMETER Experiment Name: At_Shoots__P Parameter: Tissue Value: Shoots vs. Whole Plant
  misc_feature: MA Experiment ID: 20000227 Result: Down-regulated in Transcription
  misc_feature: MA Experiment 20000227 PARAMETER Experiment Name: At_Root-Tips-vs-Tops_P Parameter: Tissue Value: Root Tips vs. Root Tops
  misc_feature: MA Experiment ID: 20001557 Result: Up-regulated in Transcription
  misc_feature: MA Experiment 20001557 PARAMETER Experiment Name: At_Drought_Soil_Dry_P Parameter: Age (day) Value: 27
  misc_feature: MA Experiment 20001557 PARAMETER Experiment Name: At_Drought_Soil_Dry_P Parameter: Organism Value: A. thaliana
  misc_feature: MA Experiment 20001557 PARAMETER Experiment Name: At_Drought_Soil_Dry_P Parameter: Plant Line Value: WS
  misc_feature: MA Experiment 20001557 PARAMETER Experiment Name: At_Drought_Soil_Dry_P Parameter: Post Timepoint (hr) Value: 3
  misc_feature: MA Experiment 20001557 PARAMETER Experiment Name: At_Drought_Soil_Dry_P Parameter: Post-Treatment Value: Re-Water vs. No Drought
  misc_feature: MA Experiment 20001557 PARAMETER Experiment Name: At_Drought_Soil_Dry_P Parameter: Timepoint (day) Value: 13
  misc_feature: MA Experiment 20001557 PARAMETER Experiment Name: At_Drought_Soil_Dry_P Parameter: Treatment Value: Drought vs. No Drought
  misc_feature: MA Experiment ID: 20001558 Result: Up-regulated in Transcription
  misc_feature: MA Experiment 20001558 PARAMETER Experiment Name: At_Drought_Soil_Dry_P Parameter: Age (day) Value: 27
  misc_feature: MA Experiment 20001558 PARAMETER Experiment Name: At_Drought_Soil_Dry_P Parameter: Organism Value: A. thaliana
  misc_feature: MA Experiment 20001558 PARAMETER Experiment Name: At_Drought_Soil_Dry_P Parameter: Plant Line Value: WS
  misc_feature: MA Experiment 20001558 PARAMETER Experiment Name: At_Drought_Soil_Dry_P Parameter: Post Timepoint (hr) Value: 6
  misc_feature: MA Experiment 20001558 PARAMETER Experiment Name: At_Drought_Soil_Dry_P Parameter: Post-Treatment Value: Re-Water vs. No Drought
  misc_feature: MA Experiment 20001558 PARAMETER Experiment Name: At_Drought_Soil_Dry_P Parameter: Timepoint (day) Value: 13
  misc_feature: MA Experiment 20001558 PARAMETER Experiment Name: At_Drought_Soil_Dry_P Parameter: Treatment Value: Drought vs. No Drought
  misc_feature: MA Experiment ID: 20001757 Result: Up-regulated in Transcription
  misc_feature: MA Experiment 20001757 PARAMETER Experiment Name: At_50mM_NH4NO3_L-to-H_P Parameter: Timepoint (hr) Value: 6
  misc_feature: MA Experiment 20001757 PARAMETER Experiment Name: At_50mM_NH4NO3_L-to-H_P Parameter: Tissue Value: Leaf
  misc_feature: MA Experiment 20001757 PARAMETER Experiment Name: At_50mM_NH4NO3_L-to-H_P Parameter: Treatment Value: 50mM NH4NO3 vs 100mM Mannitol
aaaaggagaaagcttgaaacgccgcttcttcttcttcttcttccactgtcgttctctctgtaaatcgcttcttcaatcatctctgtggatttgtctctattcataacttggtgaagaagatgttgacggaagaggagctcaaaagattgtacagaatccagaagacgttgatgcagatgttaagggatcgtggatattttatcgcggattctgaacttacgatgactaaacaacagtttattaggaaacatggtgataacatgaaaagagaggatcttgttactcttaaggctaagcgaaatgataatagtgatcagctctatatattcttccctgatgaggcgaaagttggtgtgaagacgatgaaaatgtacacgaacaggatgaaatcagagaatgtgttcagagctattttggttgtgcaacagaacttgaccccgtttgctcgaacttgcattagtgagatctcttctaagtttcatctggaagttttccagggaggcggaaatgctagtgaacattaaagaacatgttcttgttcctgagcatcaagttcttaccactgaagagaagaaaactttactggagagatacacagtgaaggagacacagcttccaaggatccaagtgactgatccaatcgcaagatactttggactaaaacgtgggcaagtcgtgaagatcattcgtccgagtgaaacggctggtcgttatgttacctatcgttatgttgtataagccaaagcaaaaggcttttgtggattgtaatgcgaattgaacgctgagagttgtgaaacataagagtaatgcttttgtactaaaccaaactgatgactgtgttttatttttgtttgtccgataggagaaattaaagcttgaaacaacttatttgtattac

SEQ ID NO: 76841 - protein, 134 aa, Arabidopsis thaliana
  peptide (1)..(134): Ceres Seq. ID no. 12335661
  misc_feature (1)..(90): Pfam Name: RNA polymerase Rpb5, N-terminal domain Pfam Description: RNA polymerase Rpb5, N-terminal domain
  misc_feature (1)..(134): Homolog of NCBI NO: 15228724 NR Description: RNA polymerase I, II and III 24.3 kDa subunit; id: At3g22320.1, supported by cDNA: 21828., supported by cDNA: supported by cDNA: gi_15724321, supported by cDNA: gi_3372232
  misc_feature (1)..(126): Homolog of NCBI NO: 38344231 NR Description: OJ991113_30.8 [Oryza sativa (japonica
  misc_feature (4)..(125): Homolog of NCBI NO: 1173134 NR Description: DNA-directed RNA polymerase II 23 kDa polypeptide
  misc_feature (4)..(125): Homolog of NCBI NO: 2135016 NR Description: DNA-directed RNA polymerase (EC 2.7.7.6) II 23K
  misc_feature (4)..(125): Homolog of NCBI NO: 2896797 NR Description: RPB5_Human [Homo sapiens]
  misc_feature (4)..(125): Homolog of NCBI NO: 28497750 NR Description: polymerase (RNA) II (DNA directed) polypeptide E musculus] >gi|28374319|gb|AAH45521.1| similar to DNA directed RNA
  misc_feature (4)..(125): Homolog of NCBI NO: 14589951 NR Description: DNA directed RNA polymerase II polypeptide E; (RNA) II (DNA directed) polypeptide E (25kD); DNA directed RNA II 23 kda polypeptide [Homo sapiens] >gi|678549|gb|AAA62401.1|
  misc_feature (2)..(125): Homolog of NCBI NO: 17507947 NR Description: RNA polymerase Rpb5, N-terminal domain and RNA
  misc_feature (2)..(125): Homolog of NCBI NO: 39595790 NR Description: Hypothetical protein CBG12745 [Caenorhabditis
  misc_feature (4)..(125): Homolog of NCBI NO: 19922004 NR Description: CG11979-PA [Drosophila melanogaster]
MLTEEELKRLYRIQKTLMQMLRDRGYFIADSELTMTKQQFIRKHGDNMKREDLVTLKAKRNDNSDQLYIFFPDEAKVGVKTMKMYTNRMKSENVFRAILVVQQNLTPFARTCISEISSKFHLEVFQGGGNASEH

SEQ ID NO: 76842 - protein, 117 aa, Arabidopsis thaliana
  peptide (1)..(117): Ceres Seq. ID no. 12335662
  misc_feature (1)..(73): Pfam Name: RNA polymerase Rpb5, N-terminal domain Pfam Description: RNA polymerase Rpb5, N-terminal domain
  misc_feature (1)..(117): Homolog of NCBI NO: 15228724 NR Description: RNA polymerase I, II and III 24.3 kDa subunit; id: At3g22320.1, supported by cDNA: 21828., supported by cDNA: supported by cDNA: gi_15724321, supported by cDNA: gi_3372232
  misc_feature (1)..(109): Homolog of NCBI NO: 38344231 NR Description: OJ991113_30.8 [Oryza sativa (japonica
  misc_feature (1)..(108): Homolog of NCBI NO: 1173134 NR Description: DNA-directed RNA polymerase II 23 kDa polypeptide
  misc_feature (1)..(108): Homolog of NCBI NO: 2135016 NR Description: DNA-directed RNA polymerase (EC 2.7.7.6) II 23K
  misc_feature (1)..(108): Homolog of NCBI NO: 2896797 NR Description: RPB5_Human [Homo sapiens]
  misc_feature (1)..(108): Homolog of NCBI NO: 14589951 NR Description: DNA directed RNA polymerase II polypeptide E; (RNA) II (DNA directed) polypeptide E (25kD); DNA directed RNA II 23 kda polypeptide [Homo sapiens] >gi|678549|gb|AAA62401.1|
  misc_feature (1)..(108): Homolog of NCBI NO: 28497750 NR Description: polymerase (RNA) II (DNA directed) polypeptide E musculus] >gi|28374319|gb|AAH45521.1| similar to DNA directed RNA
  misc_feature (1)..(108): Homolog of NCBI NO: 17507947 NR Description: RNA polymerase Rpb5, N-terminal domain and RNA
  misc_feature (1)..(108): Homolog of NCBI NO: 39595790 NR Description: Hypothetical protein CBG12745 [Caenorhabditis
  misc_feature (1)..(108): Homolog of NCBI NO: 19922004 NR Description: CG11979-PA [Drosophila melanogaster]
MQMLRDRGYFIADSELTMTKQQFIRKHGDNMKREDLVTLKAKRNDNSDQLYIFFPDEAKVGVKTMKMYTNRMKSENVFRAILVVQQNLTPFARTCISEISSKFHLEVFQGGGNASEH

SEQ ID NO: 76843 - protein, 115 aa, Arabidopsis thaliana
  peptide (1)..(115): Ceres Seq. ID no. 12335663
  misc_feature (1)..(71): Pfam Name: RNA polymerase Rpb5, N-terminal domain Pfam Description: RNA polymerase Rpb5, N-terminal domain
  misc_feature (1)..(115): Homolog of NCBI NO: 15228724 NR Description: RNA polymerase I, II and III 24.3 kDa subunit; id: At3g22320.1, supported by cDNA: 21828., supported by cDNA: supported by cDNA: gi_15724321, supported by cDNA: gi_3372232
  misc_feature (1)..(107): Homolog of NCBI NO: 38344231 NR Description: OJ991113_30.8 [Oryza sativa (japonica
  misc_feature (1)..(106): Homolog of NCBI NO: 1173134 NR Description: DNA-directed RNA polymerase II 23 kDa polypeptide
  misc_feature (1)..(106): Homolog of NCBI NO: 2135016 NR Description: DNA-directed RNA polymerase (EC 2.7.7.6) II 23K
  misc_feature (1)..(106): Homolog of NCBI NO: 2896797 NR Description: RPB5_Human [Homo sapiens]
  misc_feature (1)..(106): Homolog of NCBI NO: 14589951 NR Description: DNA directed RNA polymerase II polypeptide E; (RNA) II (DNA directed) polypeptide E (25kD); DNA directed RNA II 23 kda polypeptide [Homo sapiens] >gi|678549|gb|AAA62401.1|
  misc_feature (1)..(106): Homolog of NCBI NO: 28497750 NR Description: polymerase (RNA) II (DNA directed) polypeptide E musculus] >gi|28374319|gb|AAH45521.1| similar to DNA directed RNA
  misc_feature (1)..(106): Homolog of NCBI NO: 17507947 NR Description: RNA polymerase Rpb5, N-terminal domain and RNA
  misc_feature (1)..(106): Homolog of NCBI NO: 39595790 NR Description: Hypothetical protein CBG12745 [Caenorhabditis
  misc_feature (1)..(106): Homolog of NCBI NO: 19922004 NR Description: CG11979-PA [Drosophila melanogaster]
MLRDRGYFIADSELTMTKQQFIRKHGDNMKREDLVTLKAKRNDNSDQLYIFFPDEAKVGVKTMKMYTNRMKSENVFRAILVVQQNLTPFARTCISEISSKFHLEVFQGGGNASEH

SEQ ID NO: 76844 - DNA, 775 bp, Arabidopsis thaliana
  misc_feature (1)..(775): Ceres Seq. ID no. 12335918
  misc_feature: MA Experiment ID: 108595 Result: Down-regulated in Transcription
  misc_feature: MA Experiment 108595 PARAMETER Experiment Name: At_Ler-pi_Ovule_cDNA_P Parameter: Plant Line Value: null
  misc_feature: MA Experiment ID: 20000224 Result: Down-regulated in Transcription
  misc_feature: MA Experiment ID: 20000227 Result: Down-regulated in Transcription
  misc_feature: MA Experiment 20000227 PARAMETER Experiment Name: At_Root-Tips-vs-Tops_P Parameter: Tissue Value: Root Tips vs. Root Tops
gaagcgaatcaacaacaacagtcgggttcgtgaaaaaaaaagatttgatcggctaaacttggtcgctttcaggtttatcgtggaaggacttgtcaatggcagacgtacctggatacctgcgcacttgtttggatatggggaagatagctttcttagcaatccttgtatctacagggattgtgttgcagattctggcttgtgctctgttcaataactggtggccaatgctaagtgttataatgtatgtgctcctcccaatgcctttgctcttctttggtggatcagacagtacatctctattcaacgagtcagataatagttggatcaatgcagccaagttcttgactggtgcatcagcagttggaagcgtcgcgataccatcgattctaaaacacgccggactcatcggttggggcgcattagcccttgatctctcatcctacgttgtcttcctcgtggctattttgggttacatttgcataggagatgccagtgacaactattacagctacatttaaaaagacacacacaaattcatcatcatttgtttaaacctcaacaaagtctcagccttttatcacttccccgttcgattgatgcttcgaaacgaaaacatcttgtttctatggaatgactcactgattggattttcacaagtttaagagtttgtgtgtcaagtgtatgtatgaatgattttttttttgggtggttttgttacgttttgatgtatagaacatatttattatttggtggaatatatataaattttctttac

SEQ ID NO: 76845 - protein, 140 aa, Arabidopsis thaliana; identical to SEQ ID NO: 27802
  peptide (1)..(140): Ceres Seq. ID no. 12335919
  misc_feature (1)..(140): Homolog of NCBI NO: 18398420 NR Description: Expressed protein; protein id: At1g32410.1, by cDNA: 252174., supported by cDNA: gi_13605733, supported by gi_17978900 [Arabidopsis thaliana]
  misc_feature (1)..(140): Homolog of NCBI NO: 21554354 NR Description: unknown [Arabidopsis thaliana]
  misc_feature (1)..(139): Homolog of NCBI NO: 25518386 NR Description: hypothetical protein F5D14.18 - Arabidopsis >gi|8920616|gb|AAF81338.1|AC007767_18 Contains similarity to a protein F19I3.26 gi|7485810 from Arabidopsis thaliana ESTs
  misc_feature (17)..(124): Homolog of NCBI NO: 12322900 NR Description: unknown protein; 72859-71336 [Arabidopsis
  misc_feature (17)..(124): Homolog of NCBI NO: 16648828 NR Description: AT3g11530/F24K9_21 [Arabidopsis thaliana] AT3g11530/F24K9_21 [Arabidopsis thaliana]
  misc_feature (23)..(124): Homolog of NCBI NO: 18399269 NR Description: expressed protein; protein id: At3g11530.1,
  misc_feature (55)..(124): Homolog of NCBI NO: 34905898 NR Description: P0458E05.25 [Oryza sativa (japonica
  misc_feature (16)..(105): Homolog of NCBI NO: 6322504 NR Description: Vacuolar Protein Sorting; Vps55p [Saccharomyces
  misc_feature (13)..(124): Homolog of NCBI NO: 19113819 NR Description: Protein with similarity to Drosophila yakuba NADH
  misc_feature (27)..(136): Homolog of NCBI NO: 13386094 NR Description: RIKEN cDNA 1520402O14 [Mus musculus] unnamed protein product [Mus musculus] unnamed protein product [Mus musculus]

SEQ ID NO: 76846 - protein, 127 aa, Arabidopsis thaliana; identical to SEQ ID NO: 27803
  peptide (1)..(127): Ceres Seq. ID no. 12335920
  misc_feature (1)..(127): Homolog of NCBI NO: 18398420 NR Description: Expressed protein; protein id: At1g32410.1, by cDNA: 252174., supported by cDNA: gi_13605733, supported by gi_17978900 [Arabidopsis thaliana]
  misc_feature (1)..(127): Homolog of NCBI NO: 21554354 NR Description: unknown [Arabidopsis thaliana]
  misc_feature (1)..(126): Homolog of NCBI NO: 25518386 NR Description: hypothetical protein F5D14.18 - Arabidopsis >gi|8920616|gb|AAF81338.1|AC007767_18 Contains similarity to a protein F19I3.26 gi|7485810 from Arabidopsis thaliana ESTs
  misc_feature (4)..(111): Homolog of NCBI NO: 12322900 NR Description: unknown protein; 72859-71336 [Arabidopsis
  misc_feature (4)..(111): Homolog of NCBI NO: 16648828 NR Description: AT3g11530/F24K9_21 [Arabidopsis thaliana] AT3g11530/F24K9_21 [Arabidopsis thaliana]
  misc_feature (10)..(111): Homolog of NCBI NO: 18399269 NR Description: expressed protein; protein id: At3g11530.1,
  misc_feature (42)..(111): Homolog of NCBI NO: 34905898 NR Description: P0458E05.25 [Oryza sativa (japonica
  misc_feature (3)..(92): Homolog of NCBI NO: 6322504 NR Description: Vacuolar Protein Sorting; Vps55p [Saccharomyces
  misc_feature (1)..(111): Homolog of NCBI NO: 19113819 NR Description: Protein with similarity to Drosophila yakuba NADH
  misc_feature (14)..(123): Homolog of NCBI NO: 13386094 NR Description: RIKEN cDNA 1520402O14 [Mus musculus] unnamed protein product [Mus musculus] unnamed protein product [Mus musculus]

SEQ ID NO: 76847 - protein, 97 aa, Arabidopsis thaliana; identical to SEQ ID NO: 27804
  peptide (1)..(97): Ceres Seq. ID no. 12335921
  misc_feature (1)..(97): Homolog of NCBI NO: 18398420 NR Description: Expressed protein; protein id: At1g32410.1, by cDNA: 252174., supported by cDNA: gi_13605733, supported by gi_17978900 [Arabidopsis thaliana]
  misc_feature (1)..(97): Homolog of NCBI NO: 21554354 NR Description: unknown [Arabidopsis thaliana]
  misc_feature (1)..(96): Homolog of NCBI NO: 25518386 NR Description: hypothetical protein F5D14.18 - Arabidopsis >gi|8920616|gb|AAF81338.1|AC007767_18 Contains similarity to a protein F19I3.26 gi|7485810 from Arabidopsis thaliana ESTs
  misc_feature (1)..(81): Homolog of NCBI NO: 12322900 NR Description: unknown protein; 72859-71336 [Arabidopsis
  misc_feature (1)..(81): Homolog of NCBI NO: 16648828 NR Description: AT3g11530/F24K9_21 [Arabidopsis thaliana] AT3g11530/F24K9_21 [Arabidopsis thaliana]
  misc_feature (1)..(81): Homolog of NCBI NO: 18399269 NR Description: expressed protein; protein id: At3g11530.1,
  misc_feature (12)..(81): Homolog of NCBI NO: 34905898 NR Description: P0458E05.25 [Oryza sativa (japonica
  misc_feature (1)..(62): Homolog of NCBI NO: 6322504 NR Description: Vacuolar Protein Sorting; Vps55p [Saccharomyces
  misc_feature (1)..(81): Homolog of NCBI NO: 19113819 NR Description: Protein with similarity to Drosophila yakuba NADH
  misc_feature (1)..(93): Homolog of NCBI NO: 13386094 NR Description: RIKEN cDNA 1520402O14 [Mus musculus] unnamed protein product [Mus musculus] unnamed protein product [Mus musculus]

SEQ ID NO: 76848 - DNA, 1072 bp, Arabidopsis thaliana
  misc_feature (1)..(1072): Ceres Seq. ID no. 12338383
  misc_feature: MA Experiment ID: 20000090 Result: Down-regulated in Transcription
  misc_feature: MA Experiment ID: 20000171 Result: Down-regulated in Transcription
  misc_feature: MA Experiment 20000171 PARAMETER Experiment Name: At_42deg_Heat_P Parameter: Age (day) Value: 14
  misc_feature: MA Experiment 20000171 PARAMETER Experiment Name: At_42deg_Heat_P Parameter: Organism Value: A. thaliana
  misc_feature: MA Experiment 20000171 PARAMETER Experiment Name: At_42deg_Heat_P Parameter: Plant Line Value: WS
  misc_feature: MA Experiment 20000171 PARAMETER Experiment Name: At_42deg_Heat_P Parameter: Temperature (deg C) Value: 42 vs. 22
  misc_feature: MA Experiment 20000171 PARAMETER Experiment Name: At_42deg_Heat_P Parameter: Timepoint (hr) Value: 1
  misc_feature: MA Experiment 20000171 PARAMETER Experiment Name: At_42deg_Heat_P Parameter: Tissue Value: Aerial
  misc_feature: MA Experiment ID: 20000173 Result: Down-regulated in Transcription
  misc_feature: MA Experiment 20000173 PARAMETER Experiment Name: At_42deg_Heat_P Parameter: Age (day) Value: 14
  misc_feature: MA Experiment 20000173 PARAMETER Experiment Name: At_42deg_Heat_P Parameter: Organism Value: A. thaliana
  misc_feature: MA Experiment 20000173 PARAMETER Experiment Name: At_42deg_Heat_P Parameter: Plant Line Value: WS
  misc_feature: MA Experiment 20000173 PARAMETER Experiment Name: At_42deg_Heat_P Parameter: Temperature (deg C) Value: 42 vs. 22
  misc_feature: MA Experiment 20000173 PARAMETER Experiment Name: At_42deg_Heat_P Parameter: Timepoint (hr) Value: 6
  misc_feature: MA Experiment 20000173 PARAMETER Experiment Name: At_42deg_Heat_P Parameter: Tissue Value: Aerial
  misc_feature: MA Experiment ID: 20000182 Result: Down-regulated in Transcription
  misc_feature: MA Experiment 20000182 PARAMETER Experiment Name: At_2mM_SA_P Parameter: Age (day) Value: 14
  misc_feature: MA Experiment 20000182 PARAMETER Experiment Name: At_2mM_SA_P Parameter: Organism Value: A. thaliana
  misc_feature: MA Experiment 20000182 PARAMETER Experiment Name: At_2mM_SA_P Parameter: Plant Line Value: WS
  misc_feature: MA Experiment 20000182 PARAMETER Experiment Name: At_2mM_SA_P Parameter: Timepoint (hr) Value: 6
  misc_feature: MA Experiment 20000182 PARAMETER Experiment Name: At_2mM_SA_P Parameter: Tissue Value: Aerial
  misc_feature: MA Experiment 20000182 PARAMETER Experiment Name: At_2mM_SA_P Parameter: Treatment Value: 2mM SA vs. No Treatment
  misc_feature: MA Experiment ID: 20000184 Result: Up-regulated in Transcription
  misc_feature: MA Experiment 20000184 PARAMETER Experiment Name: At_Shoots__P Parameter: Age (day) Value: 7
  misc_feature: MA Experiment 20000184 PARAMETER Experiment Name: At_Shoots__P Parameter: Tissue Value: Shoots vs. Whole Plant
  misc_feature: MA Experiment ID: 20000227 Result: Up-regulated in Transcription
  misc_feature: MA Experiment 20000227 PARAMETER Experiment Name: At_Root-Tips-vs-Tops_P Parameter: Tissue Value: Root Tips vs. Root Tops
  misc_feature: MA Experiment ID: 20000264 Result: Up-regulated in Transcription
  misc_feature: MA Experiment 20000264 PARAMETER Experiment Name: At_Open_Flower_P Parameter: Age (day) Value: 21
  misc_feature: MA Experiment 20000264 PARAMETER Experiment Name: At_Open_Flower_P Parameter: Plant Line Value: WS
  misc_feature: MA Experiment 20000264 PARAMETER Experiment Name: At_Open_Flower_P Parameter: Tissue Value: Open Flower vs. Whole Plant
  misc_feature: MA Experiment ID: 20000265 Result: Up-regulated in Transcription
  misc_feature: MA Experiment 20000265 PARAMETER Experiment Name: At_Open_Flower_P Parameter: Age (day) Value: 21
  misc_feature: MA Experiment 20000265 PARAMETER Experiment Name: At_Open_Flower_P Parameter: Plant Line Value: WS
  misc_feature: MA Experiment 20000265 PARAMETER Experiment Name: At_Open_Flower_P Parameter: Tissue Value: Closed Flower vs. Whole Plant
  misc_feature: MA Experiment ID: 20000286 Result: Up-regulated in Transcription
  misc_feature: MA Experiment 20000286 PARAMETER Experiment Name: At_Open_Flower_P Parameter: Age (day) Value: 21
  misc_feature: MA Experiment 20000286 PARAMETER Experiment Name: At_Open_Flower_P Parameter: Plant Line Value: WS
  misc_feature: MA Experiment 20000286 PARAMETER Experiment Name: At_Open_Flower_P Parameter: Tissue Value: Half Open vs. Whole Plant
  misc_feature: MA Experiment ID: 20000438 Result: Up-regulated in Transcription
  misc_feature: MA Experiment 20000438 PARAMETER Experiment Name: At_Shoots__P Parameter: Age (day) Value: 14
  misc_feature: MA Experiment 20000438 PARAMETER Experiment Name: At_Shoots__P Parameter: Tissue Value: Shoots vs. Whole Plant
  misc_feature: MA Experiment ID: 20000443 Result: Down-regulated in Transcription
  misc_feature: MA Experiment 20000443 PARAMETER Experiment Name: At_1uM_BR-BRZ__P Parameter: Tissue Value: Shoot Apices
  misc_feature: MA Experiment 20000443 PARAMETER Experiment Name: At_1uM_BR-BRZ__P Parameter: Treatment Value: 1uM BRZ vs. No Treatment
  misc_feature: MA Experiment ID: 20000460 Result: Up-regulated in Transcription
  misc_feature: MA Experiment 20000460 PARAMETER Experiment Name: At_10percent_PEG_P Parameter: Age (day) Value: 12
  misc_feature: MA Experiment 20000460 PARAMETER Experiment Name: At_10percent_PEG_P Parameter: Organism Value: A. thaliana
  misc_feature: MA Experiment 20000460 PARAMETER Experiment Name: At_10percent_PEG_P Parameter: Plant Line Value: WS
  misc_feature: MA Experiment 20000460 PARAMETER Experiment Name: At_10percent_PEG_P Parameter: Timepoint (day) Value: 12
  misc_feature: MA Experiment 20000460 PARAMETER Experiment Name: At_10percent_PEG_P Parameter: Tissue Value: Whole Plant
  misc_feature: MA Experiment 20000460 PARAMETER Experiment Name: At_10percent_PEG_P Parameter: Treatment Value: 10percent PEG vs. No Treatment
  misc_feature: MA Experiment ID: 20000527 Result: Up-regulated in Transcription
  misc_feature: MA Experiment 20000527 PARAMETER Experiment Name: At_10percent_PEG_P Parameter: Age (day) Value: 20
  misc_feature: MA Experiment 20000527 PARAMETER Experiment Name: At_10percent_PEG_P Parameter: Organism Value: A. thaliana
  misc_feature: MA Experiment 20000527 PARAMETER Experiment Name: At_10percent_PEG_P Parameter: Plant Line Value: WS
  misc_feature: MA Experiment 20000527 PARAMETER Experiment Name: At_10percent_PEG_P Parameter: Timepoint (day) Value: 20
  misc_feature: MA Experiment 20000527 PARAMETER Experiment Name: At_10percent_PEG_P Parameter: Tissue Value: Whole Plant
  misc_feature: MA Experiment 20000527 PARAMETER Experiment Name: At_10percent_PEG_P Parameter: Treatment Value: 10percent PEG vs. No Treatment
  misc_feature: MA Experiment ID: 20000573 Result: Down-regulated in Transcription
  misc_feature: MA Experiment 20000573 PARAMETER Experiment Name: At_100uM_ABA_Mutants__P Parameter: Organism Value: A. thaliana
  misc_feature: MA Experiment 20000573 PARAMETER Experiment Name: At_100uM_ABA_Mutants__P Parameter: Plant Line Value: CS22 vs. Ler wt
  misc_feature: MA Experiment 20000573 PARAMETER Experiment Name: At_100uM_ABA_Mutants__P Parameter: Timepoint (hr) Value: N/A
  misc_feature: MA Experiment 20000573 PARAMETER Experiment Name: At_100uM_ABA_Mutants__P Parameter: Tissue Value: Whole Plant
  misc_feature: MA Experiment 20000573 PARAMETER Experiment Name: At_100uM_ABA_Mutants__P Parameter: Treatment Value: None
  misc_feature: MA Experiment ID: 20000574 Result: Down-regulated in Transcription
  misc_feature: MA Experiment 20000574 PARAMETER Experiment Name: At_100uM_ABA_Mutants__P Parameter: Organism Value: A. thaliana
  misc_feature: MA Experiment 20000574 PARAMETER Experiment Name: At_100uM_ABA_Mutants__P Parameter: Plant Line Value: CS23 vs. Ler wt
  misc_feature: MA Experiment 20000574 PARAMETER Experiment Name: At_100uM_ABA_Mutants__P Parameter: Timepoint (hr) Value: N/A
  misc_feature: MA Experiment 20000574 PARAMETER Experiment Name: At_100uM_ABA_Mutants__P Parameter: Tissue Value: Whole Plant
  misc_feature: MA Experiment 20000574 PARAMETER Experiment Name: At_100uM_ABA_Mutants__P Parameter: Treatment Value: None
  misc_feature: MA Experiment ID: 20000794 Result: Up-regulated in Transcription
  misc_feature: MA Experiment 20000794 PARAMETER Experiment Name: At_Petals_P Parameter: Age (day) Value: 23-25 days
  misc_feature: MA Experiment 20000794 PARAMETER Experiment Name: At_Petals_P Parameter: Plant Line Value: WS
  misc_feature: MA Experiment 20000794 PARAMETER Experiment Name: At_Petals_P Parameter: Tissue Value: Petals vs. Whole plant
  misc_feature: MA Experiment ID: 20001450 Result: Up-regulated in Transcription
  misc_feature: MA Experiment 20001450 PARAMETER Experiment Name: At_Far-red-induction_P Parameter: Age (day) Value: 7
  misc_feature: MA Experiment 20001450 PARAMETER Experiment Name: At_Far-red-induction_P Parameter: Light Value: Far-red vs. White
  misc_feature: MA Experiment 20001450 PARAMETER Experiment Name: At_Far-red-induction_P Parameter: Organism Value: A. thaliana
  misc_feature: MA Experiment 20001450 PARAMETER Experiment Name: At_Far-red-induction_P Parameter: Plant Line Value: Columbia
  misc_feature: MA Experiment 20001450 PARAMETER Experiment Name: At_Far-red-induction_P Parameter: Timepoint (hr) Value: 8
  misc_feature: MA Experiment 20001450 PARAMETER Experiment Name: At_Far-red-induction_P Parameter: Tissue Value: Whole Plant
  misc_feature: MA Experiment ID: 20001557 Result: Down-regulated in Transcription
  misc_feature: MA Experiment 20001557 PARAMETER Experiment Name: At_Drought_Soil_Dry_P Parameter: Age (day) Value: 27
  misc_feature: MA Experiment 20001557 PARAMETER Experiment Name: At_Drought_Soil_Dry_P Parameter: Organism Value: A. thaliana
  misc_feature: MA Experiment 20001557 PARAMETER Experiment Name: At_Drought_Soil_Dry_P Parameter: Plant Line Value: WS
  misc_feature: MA Experiment 20001557 PARAMETER Experiment Name: At_Drought_Soil_Dry_P Parameter: Post Timepoint (hr) Value: 3
  misc_feature: MA Experiment 20001557 PARAMETER Experiment Name: At_Drought_Soil_Dry_P Parameter: Post-Treatment Value: Re-Water vs. No Drought
  misc_feature: MA Experiment 20001557 PARAMETER Experiment Name: At_Drought_Soil_Dry_P Parameter: Timepoint (day) Value: 13
  misc_feature: MA Experiment 20001557 PARAMETER Experiment Name: At_Drought_Soil_Dry_P Parameter: Treatment Value: Drought vs. No Drought
atcatcatcatcatctctttcttcttccaaaagtcataatcatgtcaaagtctctagctggattggcggttttggccgctctttttattgcggttgatgcgtttaggccttctggtttaactaatggtcacgctacattctatggaggaagtgacgcttctggaacaatgggtggagcttgtggttacggagatctttactcggcggggtacgggacaatgacggcggcgttaagcacggctctgttcaacgacggagcttcttgcggagaatgctataggataacgtgtgatcacgcggcggactcacggtggtgcttgaaaggagcttctgtggttattacagccactaacttttgcccaccaaactttgctttgcctaacaacaacggtggttggtgcaatccgccgcttaaacatttcgacatggcacaacccgcttgggaaaagatcggaatttacagaggaggaatcgttcccgtcgttttccaaagagtaagctgttacaagaaaggaggagttagattcagaataaacggaagagactacttcgagctagtgaatattcaaaatgtaggaggagcaggttctattaaatctgtatccatcaaaggatcaaagactggttggttagccatgtctcgtaactggggagctaattggcaatcgaatgcttatctagatggtcaagctctctctttctccattaccactactgatggtgctactagagtctttctcaatgttgttccttcttcttggtcttttggacagatttattcttccaacgttcagttttaagtttttttttttgttttgtatgaaatatcattggcagtggtcgcgctttgagtctgtttcttttctccctgagcgacccgccctctttgttttttttatcttatggtatgatgggtctgttaatacaaaagacccgatatgatttgagggtatatgattatatgaagtgtattgtatttgaatgtttcagactcgaaaaagattctgtagcaaaaggagttttaacacatttgtacttggttttgtttatatgaagtttgttttagtttttt

SEQ ID NO: 76849 - protein, 265 aa, Arabidopsis thaliana
  peptide (1)..(265): Ceres Seq. ID no. 12338384
  misc_feature (173)..(250): Pfam Name: Pollen allergen Pfam Description: Pollen allergen
  misc_feature (14)..(265): Homolog of NCBI NO: 15223799 NR Description: expansin, putative; protein id: At1g20190.1, by cDNA: 11011., supported by cDNA: gi_12083279 [Arabidopsis
  misc_feature (14)..(265): Homolog of NCBI NO: 21536750 NR Description: Alpha-expansin 11 precursor (At-EXP11) (AtEx11)
HHHHLFLLPKVIIMSKSLAGLAVLAALFIAVDAFRPSGLTNGHATFYGGSDASGTMGGACGYGDLYSAGYGTMTAALSTALFNDGASCGECYRITCDHAADSRWCLKGASVVITATNFCPPNFALPNNNGGWCNPPLKHFDMAQPAWEKIGIYRGGIVPVVFQRVSCYKKGGVRFRINGRDYFELVNIQNVGGAGSIKSVSIKGSKTGWLAMSRNWGANWQSNAYLDGQALSFSITTTDGATRVFLNVVPSSWSFGQIYSSNVQF

SEQ ID NO: 76850 - protein, 252 aa, Arabidopsis thaliana
  peptide (1)..(252): Ceres Seq. ID no. 12338385
  misc_feature (160)..(237): Pfam Name: Pollen allergen Pfam Description: Pollen allergen
  misc_feature (1)..(252): Homolog of NCBI NO: 15223799 NR Description: expansin, putative; protein id: At1g20190.1, by cDNA: 11011., supported by cDNA: gi_12083279 [Arabidopsis
  misc_feature (1)..(252): Homolog of NCBI NO: 21536750 NR Description: Alpha-expansin 11 precursor (At-EXP11) (AtEx11)
MSKSLAGLAVLAALFIAVDAFRPSGLTNGHATFYGGSDASGTMGGACGYGDLYSAGYGTMTAALSTALFNDGASCGECYRITCDHAADSRWCLKGASVVITATNFCPPNFALPNNNGGWCNPPLKHFDMAQPAWEKIGIYRGGIVPVVFQRVSCYKKGGVRFRINGRDYFELVNIQNVGGAGSIKSVSIKGSKTGWLAMSRNWGANWQSNAYLDGQALSFSITTTDGATRVFLNVVPSSWSFGQIYSSNVQF

SEQ ID NO: 76851 - protein, 210 aa, Arabidopsis thaliana; identical to SEQ ID NO: 28573
  peptide (1)..(210): Ceres Seq. ID no. 12338386
  misc_feature (118)..(195): Pfam Name: Pollen allergen Pfam Description: Pollen allergen
  misc_feature (1)..(210): Homolog of NCBI NO: 15223799 NR Description: expansin, putative; protein id: At1g20190.1, by cDNA: 11011., supported by cDNA: gi_12083279 [Arabidopsis
  misc_feature (1)..(210): Homolog of NCBI NO: 21536750 NR Description: Alpha-expansin 11 precursor (At-EXP11) (AtEx11)

SEQ ID NO: 76852 - DNA, 2939 bp, Arabidopsis thaliana
  misc_feature (1)..(2939): Ceres Seq. ID no. 12339772
  misc_feature: MA Experiment ID: 20000234 Result: Up-regulated in Transcription
  misc_feature: MA Experiment 20000234 PARAMETER Experiment Name: At_Siliques_P Parameter: Age (day) Value: 21
  misc_feature: MA Experiment 20000234 PARAMETER Experiment Name: At_Siliques_P Parameter: Organism Value: A. thaliana
  misc_feature: MA Experiment 20000234 PARAMETER Experiment Name: At_Siliques_P Parameter: Plant Line Value: WS
  misc_feature: MA Experiment 20000234 PARAMETER Experiment Name: At_Siliques_P Parameter: Tissue Value: Less Than 5mm Siliques vs. Whole Plant
attcactagtgattcagcgtcaggtcgaagaaaggagagaaatgagtggtcacgattcgaaatacttctccacgacgaagaagggagagatccctgagctcaaggaagagcttaattcccagtataaggataagagaaaagatgcagttaagaaggttattgcggcgatgactgttggaaaggatgtttcatcacttttcactgatgtagtcaattgtatgcaaacggaaaatttggagttgaagaagcttgtttacttgtatctcataaattatgcgaaaagccagccagatcttgctattcttgcagtaaatacctttgtaaaggattcacaggatccaaatccgctgattcgtgctttggctgtgcggacaatgggctgcattcgtgttgataaaatcacagaatatctatgtgatcctcttcaaaagtgcctaaaggatgatgacccatatgtcaggaagactgcggctatttgcgtcgctaagcttttcgacataaatgctgaattagttgaggacagaggtttccttgaagccttgaaggatttgatatcagataacaatccaatggttgttgccaatgctgtagcagcccttgcggagattcaagagaacagtagtagccccatctttgagatcaatagtaccactcttacaaagctccttactgctctaaatgaatgcactgagtggggtcaagtttttatactagatgctttatcgaagtataaagcagctgatccccgtgaggctgaaaatattgttgagagagtaacaccaaggttgcaacatgccaactgcgctgttgttctttcagctgttaagatgatccttcaacaaatggaacttattactagtacagacgtgattagaaatctttgtaagaagatggctccaccccttgttacattgctttctgccgaacctgagatacaatatgttgcacttcgtaacattaatcttattgtgcaaaaacgacccactatccttgcccatgaaattaaggttttcttctgcaagtataacgacccaatttatgttaagatggagaagttggagattatgattaaacttgcctctgacagaaacatagaccaggttcttctggaattcaaagagtatgccacagaagtagacgttgattttgttagaaaggctgttcgtgcgataggccgatgtgctatcaaactagagagagcagctgaacggtgcatcagtgttttgctcgagttgatcaagattaaagtgaattatgttgtccaggaggccattattgtcatcaaagatatcttcagaagatatccaaacacgtatgagtccataattgcaacactctgtgagagtttagacactttggatgaaccagaagctaaggcatctatgatatggatcattggtgaatatgctgaaagaattgacaatgccgatgagcttcttgaaagctttctggagaattttcctgaggaaccagcacaggtccagttgcagctcctaactgctactgttaagctattcctgaagaagccaactgaaggccctcaacaaatgattcaggttgtcttgaataatgctactgtggagacggataatcctgatctcagagatcgtgcatacatatactggcgtcttctatccactgatcctgaggctgccaaggatgttgtcttagctgaaaagcccgtgatttctgacgactcaaaccagctagacccatcacttcttgatgagcttcttacaaatatttcgaccttgtcctctgtgtaccacaaacccccagaggcttttgttacccgcttgaaaacgacagttcagaaaacagaagacgaggactttgcggaaggaagcgaacgaggatactcatctagtaatccggttgatagtgcagcttctcctccaggtaatatcccacagccttccggaagacaaccagcaccagcggtcccagctcctgtacctgatctgctaggtgacctgatgggattggataatgccgctattgtcccggttgatgatcccataactcaatctggtcctcctctgcccgttgtcgtcccagcttcaagtggtcaaggtctgcagataagcgctcaattatcccgaaaagatggacaagtattttacagtatgctcttcgagaacaactcgcagtcggttcttgatggtttcatgattcagttcaacaaaaacacattcggccttgcagctgctggatctcttcagattccgcctttgcatcccgcaacatccgccaggacaatgctacctatggtcttgttccaaaacatgtctgctgggcctccaagctcgctcttacaagtcgctgtcaaaaacaaccagcagcccgtgtggtacttcaccgataagattatacttcatgctcttttcggtgaagacggtagaatggaacgtggaaccttccttgagacatggaggtcgttaccggactcaaatgaagtcctgaaagaattccccgggatcaccatcacgagcgtcgaatcaactatcgaattgctcacagcattcaacatgttctttatagcaaagcgcaagaacgggaaccaagacgtgatctacttatcagccaaagatccacgagatgtaccgtttttgatcgagctcactgcaatggtgggccaaccaggtctcaaatgcgcagtgaaaactcccactcccgagattgcgcctctcttcttcgaagctttggagcttctcttcaaggcttgatgattaacgttgttatcaaaaggctaataagaccaagacctgaaaggtttcagagattctttcttgtttcgttatatcccaccttttttcttcttctgagtttagtgtatgtaataaatcccatgtttgtgttacttccggttgcacccttttagtttggtatttgtaatgctcactattttcttataattcttgtatcggaaccacattttt

SEQ ID NO: 76853 - protein, 907 aa, Arabidopsis thaliana
  peptide (1)..(907): Ceres Seq. ID no. 12339773
  misc_feature (26)..(548): Pfam Name: Adaptin N terminal region Pfam Description: Adaptin N terminal region
  misc_feature (18)..(672): Homolog of NCBI NO: 1703167 NR Description: Adapter-related protein complex 1 beta 1 subunit
  misc_feature (18)..(672): Homolog of NCBI NO: 6671553 NR Description: adaptor protein complex AP-1, beta 1 subunit;
  misc_feature (633)..(906): Homolog of NCBI NO: 1703167 NR Description: Adapter-related protein complex 1 beta 1 subunit
  misc_feature (643)..(906): Homolog of NCBI NO: 6671553 NR Description: adaptor protein complex AP-1, beta 1 subunit;
  misc_feature (18)..(672): Homolog of NCBI NO: 22027651 NR Description: adaptor-related protein complex 1 beta 1 subunit
  misc_feature (633)..(906): Homolog of NCBI NO: 22027651 NR Description: adaptor-related protein complex 1 beta 1 subunit
  misc_feature (18)..(692): Homolog of NCBI NO: 31242911 NR Description: ENSANGP00000013886 [Anopheles gambiae]
  misc_feature (644)..(907): Homolog of NCBI NO: 31242911 NR Description: ENSANGP00000013886 [Anopheles gambiae]
  misc_feature (19)..(596): Homolog of NCBI NO: 19113227 NR Description: putative beta-adaptin [Schizosaccharomyces pombe]
  misc_feature (27)..(591): Homolog of NCBI NO: 6322714 NR Description: Beta-adaptin, large subunit of the
SLVIQRQVEERREMSGHDSKYFSTTKKGEIPELKEELNSQYKDKRKDAVKKVIAAMTVGKDVSSLFTDVVNCMQTENLELKKLVYLYLINYAKSQPDLAILAVNTFVKDSQDPNPLIRALAVRTMGCIRVDKITEYLCDPLQKCLKDDDPYVRKTAAICVAKLFDINAELVEDRGFLEALKDLISDNNPMVVANAVAALAEIQENSSSPIFEINSTTLTKLLTALNECTEWGQVFILDALSKYKAADPREAENIVERVTPRLQHANCAVVLSAVKMILQQMELITSTDVIRNLCKKMAPPLVTLLSAEPEIQYVALRNINLIVQKRPTILAHEIKVFFCKYNDPIYVKMEKLEIMIKLASDRNIDQVLLEFKEYATEVDVDFVRKAVRAIGRCAIKLERAAERCISVLLELIKIKVNYVVQEAIIVIKDIFRRYPNTYESIIATLCESLDTLDEPEAKASMIWIIGEYAERIDNADELLESFLENFPEEPAQVQLQLLTATVKLFLKKPTEGPQQMIQVVLNNATVETDNPDLRDRAYIYWRLLSTDPEAAKDVVLAEKPVISDDSNQLDPSLLDELLTNISTLSSVYHKPPEAFVTRLKTTVQKTEDEDFAEGSERGYSSSNPVDSAASPPGNIPQPSGRQPAPAVPAPVPDLLGDLMGLDNAAIVPVDDPITQSGPPLPVVVPASSGQGLQISAQLSRKDGQVFYSMLFENNSQSVLDGFMIQFNKNTFGLAAAGSLQIPPLHPATSARTMLPMVLFQNMSAGPPSSLLQVAVKNNQQPVWYFTDKIILHALFGEDGRMERGTFLETWRSLPDSNEVLKEFPGITITSVESTIELLTAFNMFFIAKRKNGNQDVIYLSAKDPRDVPFLIELTAMVGQPGLKCAVKTPTPEIAPLFFEALELLFKA

SEQ ID NO: 76854 - protein, 894 aa, Arabidopsis thaliana
  peptide (1)..(894): Ceres Seq. ID no. 12339774
  misc_feature (13)..(535): Pfam Name: Adaptin N terminal region Pfam Description: Adaptin N terminal region
  misc_feature (5)..(659): Homolog of NCBI NO: 1703167 NR Description: Adapter-related protein complex 1 beta 1 subunit
  misc_feature (5)..(659): Homolog of NCBI NO: 6671553 NR Description: adaptor protein complex AP-1, beta 1 subunit;
  misc_feature (620)..(893): Homolog of NCBI NO: 1703167 NR Description: Adapter-related protein complex 1 beta 1 subunit
  misc_feature (630)..(893): Homolog of NCBI NO: 6671553 NR Description: adaptor protein complex AP-1, beta 1 subunit;
  misc_feature (5)..(659): Homolog of NCBI NO: 22027651 NR Description: adaptor-related protein complex 1 beta 1 subunit
  misc_feature (620)..(893): Homolog of NCBI NO: 22027651 NR Description: adaptor-related protein complex 1 beta 1 subunit
  misc_feature (5)..(679): Homolog of NCBI NO: 31242911 NR Description: ENSANGP00000013886 [Anopheles gambiae]
  misc_feature (631)..(894): Homolog of NCBI NO: 31242911 NR Description: ENSANGP00000013886 [Anopheles gambiae]
  misc_feature (6)..(583): Homolog of NCBI NO: 19113227 NR Description: putative beta-adaptin [Schizosaccharomyces pombe]
  misc_feature (14)..(578): Homolog of NCBI NO: 6322714 NR Description: Beta-adaptin, large subunit of the
MSGHDSKYFSTTKKGEIPELKEELNSQYKDKRKDAVKKVIAAMTVGKDVSSLFTDVVNCMQTENLELKKLVYLYLINYAKSQPDLAILAVNTFVKDSQDPNPLIRALAVRTMGCIRVDKITEYLCDPLQKCLKDDDPYVRKTAAICVAKLFDINAELVEDRGFLEALKDLISDNNPMVVANAVAALAEIQENSSSPIFEINSTTLTKLLTALNECTEWGQVFILDALSKYKAADPREAENIVERVTPRLQHANCAVVLSAVKMILQQMELITSTDVIRNLCKKMAPPLVTLLSAEPEIQYVALRNINLIVQKRPTILAHEIKVFFCKYNDPIYVKMEKLEIMIKLASDRNIDQVLLEFKEYATEVDVDFVRKAVRAIGRCAIKLERAAERCISVLLELIKIKVNYVVQEAIIVIKDIFRRYPNTYESIIATLCESLDTLDEPEAKASMIWIIGEYAERIDNADELLESFLENFPEEPAQVQLQLLTATVKLFLKKPTEGPQQMIQVVLNNATVETDNPDLRDRAYIYWRLLSTDPEAAKDVVLAEKPVISDDSNQLDPSLLDELLTNISTLSSVYHKPPEAFVTRLKTTVQKTEDEDFAEGSERGYSSSNPVDSAASPPGNIPQPSGRQPAPAVPAPVPDLLGDLMGLDNAAIVPVDDPITQSGPPLPVVVPASSGQGLQISAQLSRKDGQVFYSMLFENNSQSVLDGFMIQFNKNTFGLAAAGSLQIPPLHPATSARTMLPMVLFQNMSAGPPSSLLQVAVKNNQQPVWYFTDKIILHALFGEDGRMERGTFLETWRSLPDSNEVLKEFPGITITSVESTIELLTAFNMFFIAKRKNGNQDVIYLSAKDPRDVPFLIELTAMVGQPGLKCAVKTPTPEIAPLFFEALELLFKA

SEQ ID NO: 76855 - protein, 852 aa, Arabidopsis thaliana
  peptide (1)..(852): Ceres Seq. ID no. 12339775
  misc_feature (1)..(493): Pfam Name: Adaptin N terminal region Pfam Description: Adaptin N terminal region
  misc_feature (1)..(617): Homolog of NCBI NO: 1703167 NR Description: Adapter-related protein complex 1 beta 1 subunit
  misc_feature (1)..(617): Homolog of NCBI NO: 6671553 NR Description: adaptor protein complex AP-1, beta 1 subunit;
  misc_feature (578)..(851): Homolog of NCBI NO: 1703167 NR Description: Adapter-related protein complex 1 beta 1 subunit
  misc_feature (588)..(851): Homolog of NCBI NO: 6671553 NR Description: adaptor protein complex AP-1, beta 1 subunit;
  misc_feature (1)..(617): Homolog of NCBI NO: 22027651 NR Description: adaptor-related protein complex 1 beta 1 subunit
  misc_feature (578)..(851): Homolog of NCBI NO: 22027651 NR Description: adaptor-related protein complex 1 beta 1 subunit
  misc_feature (1)..(637): Homolog of NCBI NO: 31242911 NR Description: ENSANGP00000013886 [Anopheles gambiae]
  misc_feature (589)..(852): Homolog of NCBI NO: 31242911 NR Description: ENSANGP00000013886 [Anopheles gambiae]
  misc_feature (1)..(541): Homolog of NCBI NO: 19113227 NR Description: putative beta-adaptin [Schizosaccharomyces pombe]
  misc_feature (1)..(536): Homolog of NCBI NO: 6322714 NR Description: Beta-adaptin, large subunit of the
MTVGKDVSSLFTDVVNCMQTENLELKKLVYLYLINYAKSQPDLAILAVNTFVKDSQDPNPLIRALAVRTMGCIRVDKITEYLCDPLQKCLKDDDPYVRKTAAICVAKLFDINAELVEDRGFLEALKDLISDNNPMVVANAVAALAEIQENSSSPIFEINSTTLTKLLTALNECTEWGQVFILDALSKYKAADPREAENIVERVTPRLQHANCAVVLSAVKMILQQMELITSTDVIRNLCKKMAPPLVTLLSAEPEIQYVALRNINLIVQKRPTILAHEIKVFFCKYNDPIYVKMEKLEIMIKLASDRNIDQVLLEFKEYATEVDVDFVRKAVRAIGRCAIKLERAAERCISVLLELIKIKVNYVVQEAIIVIKDIFRRYPNTYESIIATLCESLDTLDEPEAKASMIWIIGEYAERIDNADELLESFLENFPEEPAQVQLQLLTATVKLFLKKPTEGPQQMIQVVLNNATVETDNPDLRDRAYIYWRLLSTDPEAAKDVVLAEKPVISDDSNQLDPSLLDELLTNISTLSSVYHKPPEAFVTRLKTTVQKTEDEDFAEGSERGYSSSNPVDSAASPPGNIPQPSGRQPAPAVPAPVPDLLGDLMGLDNAAIVPVDDPITQSGPPLPVVVPASSGQGLQISAQLSRKDGQVFYSMLFENNSQSVLDGFMIQFNKNTFGLAAAGSLQIPPLHPATSARTMLPMVLFQNMSAGPPSSLLQVAVKNNQQPVWYFTDKIILHALFGEDGRMERGTFLETWRSLPDSNEVLKEFPGITITSVESTIELLTAFNMFFIAKRKNGNQDVIYLSAKDPRDVPFLIELTAMVGQPGLKCAVKTPTPEIAPLFFEALELLFKA

SEQ ID NO: 76856 - DNA, 942 bp, Arabidopsis thaliana
  misc_feature (1)..(942): Ceres Seq. ID no. 12340199
  misc_feature: MA Experiment ID: 108434 Result: Down-regulated in Transcription
  misc_feature: MA Experiment 108434 PARAMETER Experiment Name: At_Root_Tips_cDNA_P Parameter: Tissue Value: Root Tips
  misc_feature: MA Experiment ID: 108462 Result: Up-regulated in Transcription
  misc_feature: MA Experiment 108462 PARAMETER Experiment Name: At_Germinating_Seeds_cDNA_P Parameter: Age (day) Value: 2 vs. 0
  misc_feature: MA Experiment 108462 PARAMETER Experiment Name: At_Germinating_Seeds_cDNA_P Parameter: Tissue Value: Germinating Seeds
  misc_feature: MA Experiment ID: 108463 Result: Up-regulated in Transcription
  misc_feature: MA Experiment 108463 PARAMETER Experiment Name: At_Germinating_Seeds_cDNA_P Parameter: Age (day) Value: 3 vs. 0
  misc_feature: MA Experiment 108463 PARAMETER Experiment Name: At_Germinating_Seeds_cDNA_P Parameter: Tissue Value: Germinating Seeds
  misc_feature: MA Experiment ID: 108464 Result: Up-regulated in Transcription
  misc_feature: MA Experiment 108464 PARAMETER Experiment Name: At_Germinating_Seeds_cDNA_P Parameter: Age (day) Value: 4 vs. 0
  misc_feature: MA Experiment 108464 PARAMETER Experiment Name: At_Germinating_Seeds_cDNA_P Parameter: Tissue Value: Germinating Seeds
  misc_feature: MA Experiment ID: 108488 Result: Down-regulated in Transcription
  misc_feature: MA Experiment ID: 108668 Result: Up-regulated in Transcription
  misc_feature: MA Experiment 108668 PARAMETER Experiment Name: At_2mM_SA_cDNA_P Parameter: Plant Line Value: WS
  misc_feature: MA Experiment 108668 PARAMETER Experiment Name: At_2mM_SA_cDNA_P Parameter: Timepoint (hr) Value: 6
  misc_feature: MA Experiment 108668 PARAMETER Experiment Name: At_2mM_SA_cDNA_P Parameter: Treatment Value: 2mM SA vs. No Treatment
  misc_feature: MA Experiment ID: 20000182 Result: Up-regulated in Transcription
  misc_feature: MA Experiment 20000182 PARAMETER Experiment Name: At_2mM_SA_P Parameter: Age (day) Value: 14
  misc_feature: MA Experiment 20000182 PARAMETER Experiment Name: At_2mM_SA_P Parameter: Organism Value: A. thaliana
  misc_feature: MA Experiment 20000182 PARAMETER Experiment Name: At_2mM_SA_P Parameter: Plant Line Value: WS
  misc_feature: MA Experiment 20000182 PARAMETER Experiment Name: At_2mM_SA_P Parameter: Timepoint (hr) Value: 6
  misc_feature: MA Experiment 20000182 PARAMETER Experiment Name: At_2mM_SA_P Parameter: Tissue Value: Aerial
  misc_feature: MA Experiment 20000182 PARAMETER Experiment Name: At_2mM_SA_P Parameter: Treatment Value: 2mM SA vs. No Treatment
gtctacgtatacaattgatcttcccccatctccaattcagatttggacagagtaacctgtgatcgtgtcggttggggtagaagagatcgaagtgggagcaaaatcatgatgaatcggctattcgggaaacccaagcaggaggctaatgctctccaaactttagacaagcttaacgagacgcttgagatgctagagaaaaaggagaaagtactcttgaagaaagctggtgcagaggttgagaaggcaaaagaatactcccgggctaagaacaaacgagcggctatacagtgtttgaaaaggaagaggttatatgagggacaagtcgaacagcttgggaatttccagctccgtattcatgatcaaatgattatgttagaaggtgcaaaagcaacaaccgaaactgttgatgcattgaggagtggagcttctgcaatgaaggcaatgcagaaagcaacaaatattgatgatgtggataagaccatggacgagatcaatgagcaaaccgagaacatgaaacagatccaagaagcattggcgactccaatgggggcagcggctgacttcgacgaggatgagcttgcagcagagcttgatgaactagaaagtgaagagcttgaatcgcaacttctacagccggcaacaacagctcctccattgccttcagttccagtgcctgcagggcgtcaaccggctcgtcctgttccccagaagcggactgctgaggaagaagaactcgctgcattacaggctgagatggccctctaaggttattcacctctccgagcagagacatgtatgcattgatagacacgaacagacgatgtatataaggatctgaatcagattaattcggagcgaaaaacttttataatccccgtcgttaatgttatctgcaatttgagtgttcttcacataatttatcttttgtaatttttgtatctt

SEQ ID NO: 76857 - protein, 219 aa, Arabidopsis thaliana; identical to SEQ ID NO: 26925
  peptide (1)..(219): Ceres Seq. ID no. 12340200
  misc_feature (17)..(189): Pfam Name: SNF7 Pfam Description: SNF7
  misc_feature (1)..(219): Homolog of NCBI NO: 15233464 NR Description: putative protein; protein id: At4g29160.1, by cDNA: 7471., supported by cDNA: gi_14596130, supported by
  misc_feature (2)..(219): Homolog of NCBI NO: 21594892 NR Description: copia-like retroelement pol polyprotein
  misc_feature (1)..(219): Homolog of NCBI NO: 15224854 NR Description: copia-like retroelement pol polyprotein; protein At2g19830.1, supported by cDNA: gi_15028176, supported by cDNA:
  misc_feature (7)..(215): Homolog of NCBI NO: 28277855 NR Description: Unknown (protein for MGC:56112) [Danio rerio]
  misc_feature (4)..(219): Homolog of NCBI NO: 19115183 NR Description: similar to yeast Snf7 protein involved in glucose
  misc_feature (7)..(209): Homolog of NCBI NO: 28278647 NR Description: Similar to RIKEN cDNA 2010012F05 gene [Danio
  misc_feature (17)..(214): Homolog of NCBI NO: 28077049 NR Description: RIKEN cDNA 2010012F05 [Mus musculus] Protein c20orf178 homolog >gi|15030308|gb|AAH11429.1| Unknown
  misc_feature (17)..(214): Homolog of NCBI NO: 28827795 NR Description: chromosome 20 open reading frame 178 [Homo >gi|24636296|sp|Q9H444|CTH8_HUMAN Protein c20orf178 dJ553F4.4 (Novel protein similar to Drosophila CG8055 protein)
  misc_feature (4)..(219): Homolog of NCBI NO: 28850339 NR Description: similar to C56C10.3.p [Caenorhabditis elegans]
  misc_feature (1)..(213): Homolog of NCBI NO: 40548422 NR Description: Snf7 homologue associated with Alix 2 [Homo >gi|28071136|emb|CAD61949.1| unnamed protein product [Homo

SEQ ID NO: 76858 - protein, 218 aa, Arabidopsis thaliana; identical to SEQ ID NO: 26926
  peptide (1)..(218): Ceres Seq. ID no. 12340201
  misc_feature (16)..(188): Pfam Name: SNF7 Pfam Description: SNF7
  misc_feature (1)..(218): Homolog of NCBI NO: 15233464 NR Description: putative protein; protein id: At4g29160.1, by cDNA: 7471., supported by cDNA: gi_14596130, supported by
  misc_feature (1)..(218): Homolog of NCBI NO: 21594892 NR Description: copia-like retroelement pol polyprotein
  misc_feature (1)..(218): Homolog of NCBI NO: 15224854 NR Description: copia-like retroelement pol polyprotein; protein At2g19830.1, supported by cDNA: gi_15028176, supported by cDNA:
  misc_feature (6)..(214): Homolog of NCBI NO: 28277855 NR Description: Unknown (protein for MGC:56112) [Danio rerio]
  misc_feature (3)..(218): Homolog of NCBI NO: 19115183 NR Description: similar to yeast Snf7 protein involved in glucose
  misc_feature (6)..(208): Homolog of NCBI NO: 28278647 NR Description: Similar to RIKEN cDNA 2010012F05 gene [Danio
  misc_feature (16)..(213): Homolog of NCBI NO: 28077049 NR Description: RIKEN cDNA 2010012F05 [Mus musculus] Protein c20orf178 homolog >gi|15030308|gb|AAH11429.1| Unknown
  misc_feature (16)..(213): Homolog of NCBI NO: 28827795 NR Description: chromosome 20 open reading frame 178 [Homo >gi|24636296|sp|Q9H444|CTH8_HUMAN Protein c20orf178 dJ553F4.4 (Novel protein similar to Drosophila CG8055 protein)
  misc_feature (3)..(218): Homolog of NCBI NO: 28850339 NR Description: similar to C56C10.3.p [Caenorhabditis elegans]
  misc_feature (1)..(212): Homolog of NCBI NO: 40548422 NR Description: Snf7 homologue associated with Alix 2 [Homo >gi|28071136|emb|CAD61949.1| unnamed protein product [Homo

SEQ ID NO: 76859 - protein, 192 aa, Arabidopsis thaliana; identical to SEQ ID NO: 72232
  peptide (1)..(192): Ceres Seq. ID no. 12340202
  misc_feature (1)..(162): Pfam Name: SNF7 Pfam Description: SNF7
  misc_feature (1)..(192): Homolog of NCBI NO: 15233464 NR Description: putative protein; protein id: At4g29160.1, by cDNA: 7471., supported by cDNA: gi_14596130, supported by
  misc_feature (1)..(192): Homolog of NCBI NO: 21594892 NR Description: copia-like retroelement pol polyprotein
  misc_feature (1)..(192): Homolog of NCBI NO: 15224854 NR Description: copia-like retroelement pol polyprotein; protein At2g19830.1, supported by cDNA: gi_15028176, supported by cDNA:
  misc_feature (1)..(188): Homolog of NCBI NO: 28277855 NR Description: Unknown (protein for MGC:56112) [Danio rerio]
  misc_feature (1)..(192): Homolog of NCBI NO: 19115183 NR Description: similar to yeast Snf7 protein involved in glucose
  misc_feature (1)..(182): Homolog of NCBI NO: 28278647 NR Description: Similar to RIKEN cDNA 2010012F05 gene [Danio
  misc_feature (1)..(187): Homolog of NCBI NO: 28077049 NR Description: RIKEN cDNA 2010012F05 [Mus musculus] Protein c20orf178 homolog >gi|15030308|gb|AAH11429.1| Unknown
  misc_feature (1)..(187): Homolog of NCBI NO: 28827795 NR Description: chromosome 20 open reading frame 178 [Homo >gi|24636296|sp|Q9H444|CTH8_HUMAN Protein c20orf178 dJ553F4.4 (Novel protein similar to Drosophila CG8055 protein)
  misc_feature (1)..(192): Homolog of NCBI NO: 28850339 NR Description: similar to C56C10.3.p [Caenorhabditis elegans]
  misc_feature (1)..(186): Homolog of NCBI NO: 40548422 NR Description: Snf7 homologue associated with Alix 2 [Homo >gi|28071136|emb|CAD61949.1| unnamed protein product [Homo

SEQ ID NO: 76860 - DNA, 705 bp, Arabidopsis thaliana
  misc_feature (1)..(705): Ceres Seq. ID no. 12345022
  misc_feature: MA Experiment ID: 108488 Result: Down-regulated in Transcription
  misc_feature: MA Experiment ID: 108576 Result: Down-regulated in Transcription
  misc_feature: MA Experiment 108576 PARAMETER Experiment Name: At_42deg_Heat_cDNA_P Parameter: Temperature (deg C) Value: 42 vs. 22
  misc_feature: MA Experiment 108576 PARAMETER Experiment Name: At_42deg_Heat_cDNA_P Parameter: Timepoint (hr) Value: 1
  misc_feature: MA Experiment 108576 PARAMETER Experiment Name: At_42deg_Heat_cDNA_P Parameter: Tissue Value: Aerial
  misc_feature: MA Experiment ID: 108577 Result: Down-regulated in Transcription
  misc_feature: MA Experiment 108577 PARAMETER Experiment Name: At_42deg_Heat_cDNA_P Parameter: Temperature (deg C) Value: 42 vs. 22
  misc_feature: MA Experiment 108577 PARAMETER Experiment Name: At_42deg_Heat_cDNA_P Parameter: Timepoint (hr) Value: 6
  misc_feature: MA Experiment 108577 PARAMETER Experiment Name: At_42deg_Heat_cDNA_P Parameter: Tissue Value: Aerial
  misc_feature: MA Experiment ID: 20000112 Result: Down-regulated in Transcription
  misc_feature: MA Experiment 20000112 PARAMETER Experiment Name: At_42deg_Heat_cDNA_P Parameter: Temperature (deg C) Value: 42 vs. 22
  misc_feature: MA Experiment 20000112 PARAMETER Experiment Name: At_42deg_Heat_cDNA_P Parameter: Timepoint (hr) Value: 2
  misc_feature: MA Experiment 20000112 PARAMETER Experiment Name: At_42deg_Heat_cDNA_P Parameter: Tissue Value: Aerial
aaccactacttcaatcatcccctattactgcttttgttacgaaagacaaaaaaacaaaacaaaacaaaagtcagctcaggcgaagaacagatggctcgtaccaagcaaaccgctcgtaagtccaccggaggtaaagctccaaggaagcaacttgctactaaggctgctcgtaaatctgcaccaactactggtggagtcaagaaaccacatcgttaccgtcctggaactgttgctctccgtgaaatccgtaagtaccagaagagtactgagttgcttatcaggaaactgccatttcagaggctagtccgtgagattgctcaagatttcaagactgatttgcgtttccagagccatgctgtcttagctctccaggaagctgcagaagcatatcttgttggtctctttgaagacactaacctttgtgccattcatgccaagcgtgtgaccataatgcccaaagacattcagctcgctcgtcgtatcagaggtgaacgcgcttaagccaaccaagaatccgagatttggttcaagtagtttttgttttttatgaaagcaagatcttaattgctgtgttttttaaatctctgggtatgtagtagtaagagtagtaagaagtctgcaatctaagaatgttgtgttctttaagcttattattatgtgtgttgcgaactctttttaactcttttgttaaattcttatgttttc

SEQ ID NO: 76861 - protein, 166 aa, Arabidopsis thaliana; identical to SEQ ID NO: 74816
  peptide (1)..(166): Ceres Seq. ID no. 12345023
  misc_feature (47)..(165): Pfam Name: Core histone H2A/H2B/H3/H4 Pfam Description: Core histone H2A/H2B/H3/H4
  misc_feature (31)..(166): Homolog of NCBI NO: 15236103 NR Description: histone H3.3; protein id: At4g40030.1, supported cDNA: gi_14326561 [Arabidopsis thaliana] Histon H3; protein id: At4g40040.1, supported by cDNA: 2670.
  misc_feature (31)..(166): Homolog of NCBI NO: 18698662 NR Description: disease-resistent-related protein [Oryza sativa]
  misc_feature (12)..(166): Homolog of NCBI NO: 34876364 NR Description: similar to CG31613-PA [Rattus norvegicus]
  misc_feature (29)..(166): Homolog of NCBI NO: 34876394 NR Description: similar to histone protein Hist2h3c1 [Rattus
  misc_feature (31)..(166): Homolog of NCBI NO: 2119013 NR Description: histone H3.2 protein - shrew mouse
  misc_feature (31)..(166): Homolog of NCBI NO: 7305139 NR Description: histone 1, H3f; histone gene complex 1 [Mus
  misc_feature (31)..(166): Homolog of NCBI NO: 30061401 NR Description: histone 2, H3ca1 [Mus musculus]
  misc_feature (31)..(166): Homolog of NCBI NO: 34858254 NR Description: similar to histone protein Hist2h3c1 [Rattus
  misc_feature (31)..(166): Homolog of NCBI NO: 34858260 NR Description: similar to histone protein Hist2h3c1 [Rattus
  misc_feature (31)..(166): Homolog of NCBI NO: 37546835 NR Description: similar to histone protein Hist2h3c1 [Homo

SEQ ID NO: 76862 - protein, 136 aa, Arabidopsis thaliana; identical to SEQ ID NO: 26403
  peptide (1)..(136): Ceres Seq. ID no. 12345024
  misc_feature (17)..(135): Pfam Name: Core histone H2A/H2B/H3/H4 Pfam Description: Core histone H2A/H2B/H3/H4
  misc_feature (1)..(136): Homolog of NCBI NO: 15236103 NR Description: histone H3.3; protein id: At4g40030.1, supported cDNA: gi_14326561 [Arabidopsis thaliana] Histon H3; protein id: At4g40040.1, supported by cDNA: 2670.
  misc_feature (1)..(136): Homolog of NCBI NO: 18698662 NR Description: disease-resistent-related protein [Oryza sativa]
  misc_feature (1)..(136): Homolog of NCBI NO: 34876364 NR Description: similar to CG31613-PA [Rattus norvegicus]
  misc_feature (1)..(136): Homolog of NCBI NO: 34876394 NR Description: similar to histone protein Hist2h3c1 [Rattus
  misc_feature (1)..(136): Homolog of NCBI NO: 2119013 NR Description: histone H3.2 protein - shrew mouse
  misc_feature (1)..(136): Homolog of NCBI NO: 7305139 NR Description: histone 1, H3f; histone gene complex 1 [Mus
  misc_feature (1)..(136): Homolog of NCBI NO: 30061401 NR Description: histone 2, H3ca1 [Mus musculus]
  misc_feature (1)..(136): Homolog of NCBI NO: 34858254 NR Description: similar to histone protein Hist2h3c1 [Rattus
  misc_feature (1)..(136): Homolog of NCBI NO: 37546835 NR Description: similar to histone protein Hist2h3c1 [Homo
  misc_feature (1)..(136): Homolog of NCBI NO: 34858260 NR Description: similar to histone protein Hist2h3c1 [Rattus

SEQ ID NO: 76863 - protein, 100 aa, Arabidopsis thaliana
  peptide (1)..(100): Ceres Seq. ID no. 12345025
TTTSIIPYYCFCYERQKNKTKQKSAQAKNRWLVPSKPLVSPPEVKLQGSNLLLRLLVNLHQLLVESRNHIVTVLELLLSVKSVSTRRVLSCLSGNCHFRG

SEQ ID NO: 76864 - DNA, 1291 bp, Arabidopsis thaliana
  misc_feature (1)..(1291): Ceres Seq. ID no. 12348335
  misc_feature: MA Experiment ID: 108434 Result: Down-regulated in Transcription
  misc_feature: MA Experiment 108434 PARAMETER Experiment Name: At_Root_Tips_cDNA_P Parameter: Tissue Value: Root Tips
  misc_feature: MA Experiment ID: 108462 Result: Up-regulated in Transcription
  misc_feature: MA Experiment 108462 PARAMETER Experiment Name: At_Germinating_Seeds_cDNA_P Parameter: Age (day) Value: 2 vs. 0
  misc_feature: MA Experiment 108462 PARAMETER Experiment Name: At_Germinating_Seeds_cDNA_P Parameter: Tissue Value: Germinating Seeds
  misc_feature: MA Experiment ID: 108463 Result: Up-regulated in Transcription
  misc_feature: MA Experiment 108463 PARAMETER Experiment Name: At_Germinating_Seeds_cDNA_P Parameter: Age (day) Value: 3 vs. 0
  misc_feature: MA Experiment 108463 PARAMETER Experiment Name: At_Germinating_Seeds_cDNA_P Parameter: Tissue Value: Germinating Seeds
  misc_feature: MA Experiment ID: 108464 Result: Up-regulated in Transcription
  misc_feature: MA Experiment 108464 PARAMETER Experiment Name: At_Germinating_Seeds_cDNA_P Parameter: Age (day) Value: 4 vs. 0
  misc_feature: MA Experiment 108464 PARAMETER Experiment Name: At_Germinating_Seeds_cDNA_P Parameter: Tissue Value: Germinating Seeds
  misc_feature: MA Experiment ID: 108469 Result: Up-regulated in Transcription
  misc_feature: MA Experiment ID: 108473 Result: Down-regulated in Transcription
  misc_feature: MA Experiment 108473 PARAMETER Experiment Name: At_Drought_Flowers_cDNA_P Parameter: Timepoint (hr) Value: 7 d
  misc_feature: MA Experiment 108473 PARAMETER Experiment Name: At_Drought_Flowers_cDNA_P Parameter: Tissue Value: Flower
  misc_feature: MA Experiment 108473 PARAMETER Experiment Name: At_Drought_Flowers_cDNA_P Parameter: Treatment Value: Drought vs. No Drought
  misc_feature: MA Experiment ID: 108489 Result: Down-regulated in Transcription
  misc_feature: MA Experiment ID: 108572 Result: Down-regulated in Transcription
  misc_feature: MA Experiment 108572 PARAMETER Experiment Name: At_Drought_cDNA_P Parameter: Timepoint (hr) Value: 1
  misc_feature: MA Experiment 108572 PARAMETER Experiment Name: At_Drought_cDNA_P Parameter: Tissue Value: Aerial
  misc_feature: MA Experiment 108572 PARAMETER Experiment Name: At_Drought_cDNA_P Parameter: Treatment Value: Drought vs. No Drought
  misc_feature: MA Experiment ID: 108573 Result: Down-regulated in Transcription
  misc_feature: MA Experiment 108573 PARAMETER Experiment Name: At_Drought_cDNA_P Parameter: Timepoint (hr) Value: 6
  misc_feature: MA Experiment 108573 PARAMETER Experiment Name: At_Drought_cDNA_P Parameter: Tissue Value: Aerial
  misc_feature: MA Experiment 108573 PARAMETER Experiment Name: At_Drought_cDNA_P Parameter: Treatment Value: Drought vs. No Drought
  misc_feature: MA Experiment ID: 108574 Result: Up-regulated in Transcription
  misc_feature: MA Experiment 108574 PARAMETER Experiment Name: At_Wounding__cDNA_P Parameter: Timepoint (hr) Value: 1
  misc_feature: MA Experiment 108574 PARAMETER Experiment Name: At_Wounding__cDNA_P Parameter: Tissue Value: Aerial
  misc_feature: MA Experiment 108574 PARAMETER Experiment Name: At_Wounding__cDNA_P Parameter: Treatment Value: Wounding vs. No Wounding
  misc_feature: MA Experiment ID: 108579 Result: Up-regulated in Transcription
  misc_feature: MA Experiment 108579 PARAMETER Experiment Name: At_4deg_Cold_cDNA_P Parameter: Temperature (deg C) Value: 4 vs. 22
  misc_feature: MA Experiment 108579 PARAMETER Experiment Name: At_4deg_Cold_cDNA_P Parameter: Timepoint (hr) Value: 6
  misc_feature: MA Experiment 108579 PARAMETER Experiment Name: At_4deg_Cold_cDNA_P Parameter: Tissue Value: Aerial
  misc_feature: MA Experiment ID: 108585 Result: Up-regulated in Transcription
  misc_feature: MA Experiment 108585 PARAMETER Experiment Name: At_5mM_NaNP_cDNA_P Parameter: Timepoint (hr) Value: 6
  misc_feature: MA Experiment 108585 PARAMETER Experiment Name: At_5mM_NaNP_cDNA_P Parameter: Tissue Value: Aerial
  misc_feature: MA Experiment 108585 PARAMETER Experiment Name: At_5mM_NaNP_cDNA_P Parameter: Treatment Value: null
  misc_feature: MA Experiment ID: 108594 Result: Down-regulated in Transcription
  misc_feature: MA Experiment 108594 PARAMETER Experiment Name: At_Ler-rhl_Root_cDNA_P Parameter: Plant Line Value: null
  misc_feature: MA Experiment ID: 108595 Result: Up-regulated in Transcription
  misc_feature: MA Experiment 108595 PARAMETER Experiment Name: At_Ler-pi_Ovule_cDNA_P Parameter: Plant Line Value: null
  misc_feature: MA Experiment ID: 108608 Result: Down-regulated in Transcription
  misc_feature: MA Experiment 108608 PARAMETER Experiment Name: At_100uM_ABA_cDNA_P Parameter: Timepoint (hr) Value: 1
  misc_feature: MA Experiment 108608 PARAMETER Experiment Name: At_100uM_ABA_cDNA_P Parameter: Tissue Value: Aerial
  misc_feature: MA Experiment 108608 PARAMETER Experiment Name: At_100uM_ABA_cDNA_P Parameter: Treatment Value: 100uM ABA vs. No Treatment
  misc_feature: MA Experiment ID: 108667 Result: Up-regulated in Transcription
  misc_feature: MA Experiment 108667 PARAMETER Experiment Name: At_2mM_SA_cDNA_P Parameter: Plant Line Value: WS
  misc_feature: MA Experiment 108667 PARAMETER Experiment Name: At_2mM_SA_cDNA_P Parameter: Timepoint (hr) Value: 1
  misc_feature: MA Experiment 108667 PARAMETER Experiment Name: At_2mM_SA_cDNA_P Parameter: Treatment Value: 2mM SA vs. No Treatment
  misc_feature: MA Experiment ID: 108668 Result: Up-regulated in Transcription
  misc_feature: MA Experiment 108668 PARAMETER Experiment Name: At_2mM_SA_cDNA_P Parameter: Plant Line Value: WS
  misc_feature: MA Experiment 108668 PARAMETER Experiment Name: At_2mM_SA_cDNA_P Parameter: Timepoint (hr) Value: 6
  misc_feature: MA Experiment 108668 PARAMETER Experiment Name: At_2mM_SA_cDNA_P Parameter: Treatment Value: 2mM SA vs. No Treatment
  misc_feature: MA Experiment ID: 20000089 Result: Up-regulated in Transcription
  misc_feature: MA Experiment ID: 20000166 Result: Down-regulated in Transcription
  misc_feature: MA Experiment 20000166 PARAMETER Experiment Name: At_100uM_ABA_P Parameter: Age (day) Value: 14
  misc_feature: MA Experiment 20000166 PARAMETER Experiment Name: At_100uM_ABA_P Parameter: Organism Value: A. thaliana
  misc_feature: MA Experiment 20000166 PARAMETER Experiment Name: At_100uM_ABA_P Parameter: Plant Line Value: WS
  misc_feature: MA Experiment 20000166 PARAMETER Experiment Name: At_100uM_ABA_P Parameter: Timepoint (hr) Value: 1
  misc_feature: MA Experiment 20000166 PARAMETER Experiment Name: At_100uM_ABA_P Parameter: Tissue Value: Aerial
  misc_feature: MA Experiment 20000166 PARAMETER Experiment Name: At_100uM_ABA_P Parameter: Treatment Value: 100uM ABA vs. No Treatment
  misc_feature: MA Experiment ID: 20000182 Result: Up-regulated in Transcription
  misc_feature: MA Experiment 20000182 PARAMETER Experiment Name: At_2mM_SA_P Parameter: Age (day) Value: 14
  misc_feature: MA Experiment 20000182 PARAMETER Experiment Name: At_2mM_SA_P Parameter: Organism Value: A. thaliana
  misc_feature: MA Experiment 20000182 PARAMETER Experiment Name: At_2mM_SA_P Parameter: Plant Line Value: WS
  misc_feature: MA Experiment 20000182 PARAMETER Experiment Name: At_2mM_SA_P Parameter: Timepoint (hr) Value: 6
  misc_feature: MA Experiment 20000182 PARAMETER Experiment Name: At_2mM_SA_P Parameter: Tissue Value: Aerial
  misc_feature: MA Experiment 20000182 PARAMETER Experiment Name: At_2mM_SA_P Parameter: Treatment Value: 2mM SA vs. No Treatment
  misc_feature: MA Experiment ID: 20000213 Result: Up-regulated in Transcription
  misc_feature: MA Experiment 20000213 PARAMETER Experiment Name: At_4deg_Cold_P Parameter: Timepoint (hr) Value: 2
  misc_feature: MA Experiment ID: 20000234 Result: Down-regulated in Transcription
  misc_feature: MA Experiment 20000234 PARAMETER Experiment Name: At_Siliques_P Parameter: Age (day) Value: 21
  misc_feature: MA Experiment 20000234 PARAMETER Experiment Name: At_Siliques_P Parameter: Organism Value: A. thaliana
  misc_feature: MA Experiment 20000234 PARAMETER Experiment Name: At_Siliques_P Parameter: Plant Line Value: WS
  misc_feature: MA Experiment 20000234 PARAMETER Experiment Name: At_Siliques_P Parameter: Tissue Value: Less Than 5mm Siliques vs. Whole Plant
  misc_feature: MA Experiment ID: 20000264 Result: Down-regulated in Transcription
  misc_feature: MA Experiment 20000264 PARAMETER Experiment Name: At_Open_Flower_P Parameter: Age (day) Value: 21
  misc_feature: MA Experiment 20000264 PARAMETER Experiment Name: At_Open_Flower_P Parameter: Plant Line Value: WS
  misc_feature: MA Experiment 20000264 PARAMETER Experiment Name: At_Open_Flower_P Parameter: Tissue Value: Open Flower vs. Whole Plant
  misc_feature: MA Experiment ID: 20000265 Result: Down-regulated in Transcription
  misc_feature: MA Experiment 20000265 PARAMETER Experiment Name: At_Open_Flower_P Parameter: Age (day) Value: 21
  misc_feature: MA Experiment 20000265 PARAMETER Experiment Name: At_Open_Flower_P Parameter: Plant Line Value: WS
  misc_feature: MA Experiment 20000265 PARAMETER Experiment Name: At_Open_Flower_P Parameter: Tissue Value: Closed Flower vs. Whole Plant
  misc_feature: MA Experiment ID: 20000286 Result: Down-regulated in Transcription
  misc_feature: MA Experiment 20000286 PARAMETER Experiment Name: At_Open_Flower_P Parameter: Age (day) Value: 21
  misc_feature: MA Experiment 20000286 PARAMETER Experiment Name: At_Open_Flower_P Parameter: Plant Line Value: WS
  misc_feature: MA Experiment 20000286 PARAMETER Experiment Name: At_Open_Flower_P Parameter: Tissue Value: Half Open vs. Whole Plant
  misc_feature: MA Experiment ID: 20000437 Result: Down-regulated in Transcription
  misc_feature: MA Experiment 20000437 PARAMETER Experiment Name: At_Drought_P Parameter: Age (day) Value: 8
  misc_feature: MA Experiment 20000437 PARAMETER Experiment Name: At_Drought_P Parameter: Organism Value: A. thaliana
  misc_feature: MA Experiment 20000437 PARAMETER Experiment Name: At_Drought_P Parameter: Plant Line Value: WS
  misc_feature: MA Experiment 20000437 PARAMETER Experiment Name: At_Drought_P Parameter: Timepoint (hr) Value: 24
  misc_feature: MA Experiment 20000437 PARAMETER Experiment Name: At_Drought_P Parameter: Tissue Value: Whole Plant
  misc_feature: MA Experiment 20000437 PARAMETER Experiment Name: At_Drought_P Parameter: Treatment Value: Drought vs. No Drought
  misc_feature: MA Experiment ID: 20000438 Result: Down-regulated in Transcription
  misc_feature: MA Experiment 20000438 PARAMETER Experiment Name: At_Shoots__P Parameter: Age (day) Value: 14
  misc_feature: MA Experiment 20000438 PARAMETER Experiment Name: At_Shoots__P Parameter: Tissue Value: Shoots vs. Whole Plant
  misc_feature: MA Experiment ID: 20000456 Result: Up-regulated in Transcription
  misc_feature: MA Experiment 20000456 PARAMETER Experiment Name: At_100uM_BA_P Parameter: Age (day) Value: 14
  misc_feature: MA Experiment 20000456 PARAMETER Experiment Name: At_100uM_BA_P Parameter: Organism Value: A. thaliana
  misc_feature: MA Experiment 20000456 PARAMETER Experiment Name: At_100uM_BA_P Parameter: Plant Line Value: WS
  misc_feature: MA Experiment 20000456 PARAMETER Experiment Name: At_100uM_BA_P Parameter: Timepoint (hr) Value: 6
  misc_feature: MA Experiment 20000456 PARAMETER Experiment Name: At_100uM_BA_P Parameter: Tissue Value: Aerial
  misc_feature: MA Experiment 20000456 PARAMETER Experiment Name: At_100uM_BA_P Parameter: Treatment Value: 100uM BA vs. No Treatment
  misc_feature: MA Experiment ID: 20000495 Result: Down-regulated in Transcription
  misc_feature: MA Experiment 20000495 PARAMETER Experiment Name: At_Guard_Cells_P Parameter: Harvest Date Value: 8/2/2002
  misc_feature: MA Experiment 20000495 PARAMETER Experiment Name: At_Guard_Cells_P Parameter: Organism Value: A. thaliana
  misc_feature: MA Experiment 20000495 PARAMETER Experiment Name: At_Guard_Cells_P Parameter: Tissue Value: Guard Cells vs. Leaves
  misc_feature: MA Experiment ID: 20000527 Result: Down-regulated in Transcription
  misc_feature: MA Experiment 20000527 PARAMETER Experiment Name: At_10percent_PEG_P Parameter: Age (day) Value: 20
  misc_feature: MA Experiment 20000527 PARAMETER Experiment Name: At_10percent_PEG_P Parameter: Organism Value: A. thaliana
  misc_feature: MA Experiment 20000527 PARAMETER Experiment Name: At_10percent_PEG_P Parameter: Plant Line Value: WS
  misc_feature: MA Experiment 20000527 PARAMETER Experiment Name: At_10percent_PEG_P Parameter: Timepoint (day) Value: 20
  misc_feature: MA Experiment 20000527 PARAMETER Experiment Name: At_10percent_PEG_P Parameter: Tissue Value: Whole Plant
  misc_feature: MA Experiment 20000527 PARAMETER Experiment Name: At_10percent_PEG_P Parameter: Treatment Value: 10percent PEG vs. No Treatment
  misc_feature: MA Experiment ID: 20000576 Result: Down-regulated in Transcription
  misc_feature: MA Experiment 20000576 PARAMETER Experiment Name: At_100uM_ABA_Mutants__P Parameter: Organism Value: A. thaliana
  misc_feature: MA Experiment 20000576 PARAMETER Experiment Name: At_100uM_ABA_Mutants__P Parameter: Plant Line Value: CS23
  misc_feature: MA Experiment 20000576 PARAMETER Experiment Name: At_100uM_ABA_Mutants__P Parameter: Timepoint (hr) Value: 6
  misc_feature: MA Experiment 20000576 PARAMETER Experiment Name: At_100uM_ABA_Mutants__P Parameter: Tissue Value: Whole Plant
  misc_feature: MA Experiment 20000576 PARAMETER Experiment Name: At_100uM_ABA_Mutants__P Parameter: Treatment Value: 1uM ABA vs. No Treatment
  misc_feature: MA Experiment ID: 20000709 Result: Up-regulated in Transcription
  misc_feature: MA Experiment 20000709 PARAMETER Experiment Name: At_15mM_NH4NO3_L-to-H_P Parameter: Age (hr) Value: 14
  misc_feature: MA Experiment 20000709 PARAMETER Experiment Name: At_15mM_NH4NO3_L-to-H_P Parameter: Organism Value: A. thaliana
  misc_feature: MA Experiment 20000709 PARAMETER Experiment Name: At_15mM_NH4NO3_L-to-H_P Parameter: Plant Line Value: WS
  misc_feature: MA Experiment 20000709 PARAMETER Experiment Name: At_15mM_NH4NO3_L-to-H_P Parameter: Timepoint (hr) Value: 4
  misc_feature: MA Experiment 20000709 PARAMETER Experiment Name: At_15mM_NH4NO3_L-to-H_P Parameter: Tissue Value: Aerial
  misc_feature: MA Experiment 20000709 PARAMETER Experiment Name: At_15mM_NH4NO3_L-to-H_P Parameter: Treatment Value: 15mM NH4NO3 vs. 30mM Mannitol
  misc_feature: MA Experiment ID: 20000794 Result: Down-regulated in Transcription
  misc_feature: MA Experiment 20000794 PARAMETER Experiment Name: At_Petals_P Parameter: Age (day) Value: 23-25 days
  misc_feature: MA Experiment 20000794 PARAMETER Experiment Name: At_Petals_P Parameter: Plant Line Value: WS
  misc_feature: MA Experiment 20000794 PARAMETER Experiment Name: At_Petals_P Parameter: Tissue Value: Petals vs. Whole plant
  misc_feature: MA Experiment ID: 20001451 Result: Down-regulated in Transcription
  misc_feature: MA Experiment 20001451 PARAMETER Experiment Name: At_Far-red-induction_P Parameter: Age (day) Value: 7
  misc_feature: MA Experiment 20001451 PARAMETER Experiment Name: At_Far-red-induction_P Parameter: Light Value: Far-red vs. White
  misc_feature: MA Experiment 20001451 PARAMETER Experiment Name: At_Far-red-induction_P Parameter: Organism Value: A. thaliana
  misc_feature: MA Experiment 20001451 PARAMETER Experiment Name: At_Far-red-induction_P Parameter: Plant Line Value: Columbia
  misc_feature: MA Experiment 20001451 PARAMETER Experiment Name: At_Far-red-induction_P Parameter: Timepoint (hr) Value: 24
  misc_feature: MA Experiment 20001451 PARAMETER Experiment Name: At_Far-red-induction_P Parameter: Tissue Value: Whole Plant
  misc_feature: MA Experiment ID: 20001554 Result: Down-regulated in Transcription
  misc_feature: MA Experiment 20001554 PARAMETER Experiment Name: At_Drought_Soil_Dry_P Parameter: Age (day) Value: 21
  misc_feature: MA Experiment 20001554 PARAMETER Experiment Name: At_Drought_Soil_Dry_P Parameter: Organism Value: A. thaliana
  misc_feature: MA Experiment 20001554 PARAMETER Experiment Name: At_Drought_Soil_Dry_P Parameter: Plant Line Value: WS
  misc_feature: MA Experiment 20001554 PARAMETER Experiment Name: At_Drought_Soil_Dry_P Parameter: Post Timepoint (hr) Value: None
  misc_feature: MA Experiment 20001554 PARAMETER Experiment Name: At_Drought_Soil_Dry_P Parameter: Post-Treatment Value: None
  misc_feature: MA Experiment 20001554 PARAMETER Experiment Name: At_Drought_Soil_Dry_P Parameter: Timepoint (day) Value: 7
  misc_feature: MA Experiment 20001554 PARAMETER Experiment Name: At_Drought_Soil_Dry_P Parameter: Treatment Value: Drought vs. No Drought
  misc_feature: MA Experiment ID: 20001557 Result: Up-regulated in Transcription
  misc_feature: MA Experiment 20001557 PARAMETER Experiment Name: At_Drought_Soil_Dry_P Parameter: Age (day) Value: 27
  misc_feature: MA Experiment 20001557 PARAMETER Experiment Name: At_Drought_Soil_Dry_P Parameter: Organism Value: A. thaliana
  misc_feature: MA Experiment 20001557 PARAMETER Experiment Name: At_Drought_Soil_Dry_P Parameter: Plant Line Value: WS
  misc_feature: MA Experiment 20001557 PARAMETER Experiment Name: At_Drought_Soil_Dry_P Parameter: Post Timepoint (hr) Value: 3
  misc_feature: MA Experiment 20001557 PARAMETER Experiment Name: At_Drought_Soil_Dry_P Parameter: Post-Treatment Value: Re-Water vs. No Drought
  misc_feature: MA Experiment 20001557 PARAMETER Experiment Name: At_Drought_Soil_Dry_P Parameter: Timepoint (day) Value: 13
  misc_feature: MA Experiment 20001557 PARAMETER Experiment Name: At_Drought_Soil_Dry_P Parameter: Treatment Value: Drought vs. No Drought
  misc_feature: MA Experiment ID: 20001904 Result: Down-regulated in Transcription
  misc_feature: MA Experiment 20001904 PARAMETER Experiment Name: At_Drought_Reproduction_P Parameter: Age (day) Value: 37
  misc_feature: MA Experiment 20001904 PARAMETER Experiment Name: At_Drought_Reproduction_P Parameter: Organism Value: A. thaliana
  misc_feature: MA Experiment 20001904 PARAMETER Experiment Name: At_Drought_Reproduction_P Parameter: Plant Line Value: WS
  misc_feature: MA Experiment 20001904 PARAMETER Experiment Name: At_Drought_Reproduction_P Parameter: Timepoint (day) Value: 7
  misc_feature: MA Experiment 20001904 PARAMETER Experiment Name: At_Drought_Reproduction_P Parameter: Tissue Value: Rosettes
  misc_feature: MA Experiment 20001904 PARAMETER Experiment Name: At_Drought_Reproduction_P Parameter: Treatment Value: Drought vs. No Drought
  misc_feature: MA Experiment ID: 20001905 Result: Down-regulated in Transcription
  misc_feature: MA Experiment 20001905 PARAMETER Experiment Name: At_Drought_Reproduction_P Parameter: Age (day) Value: 40
  misc_feature: MA Experiment 20001905 PARAMETER Experiment Name: At_Drought_Reproduction_P Parameter: Organism Value: A. thaliana
  misc_feature: MA Experiment 20001905 PARAMETER Experiment Name: At_Drought_Reproduction_P Parameter: Plant Line Value: WS
  misc_feature: MA Experiment 20001905 PARAMETER Experiment Name: At_Drought_Reproduction_P Parameter: Timepoint (day) Value: 10
  misc_feature: MA Experiment 20001905 PARAMETER Experiment Name: At_Drought_Reproduction_P Parameter: Tissue Value: Rosettes
  misc_feature: MA Experiment 20001905 PARAMETER Experiment Name: At_Drought_Reproduction_P Parameter: Treatment Value: Drought vs. No Drought
acaattcagggaaaatcttcaaagtgtttgcagagaaatctaaattcatcaacagttttttacaaaagaaatggaaaacggagaagcaaaacagagtgtacctcttctcactccctataagatgggaagattcaatctttcccatagggttgttctagcaccattgacgagacagagatcgtacggaaacgttcctcagcctcacgctgccatatattactctcagagaacgactccaggaggttttctcatcactgaagccactggagtttcagatacagctcaaggatatcaagatactcctgggatatggactaaagagcatgtggaggcatggaagccaatcgttgatgctgtacatgccaaaggtggtatcttcttctgtcagatctggcatgttggccgcgtttctaatagcgggtttcagccaaatggaaaagctcctatctcttgttcggataagccattgatgcctcaaattcgctctaatggcatcgatgaagctctctttacccctccaagacggcttggtatcgaagaaatccccggcattgtcaatgattttaggcttgctgcaagaaatgctatggaagctggttttgatggagttgagattcatggagctaatggctatctgattgaccagttcatgaaggatacggtgaatgatagaactgatgaatacggtggatcattgcaaaaccgttgcaaatttcctctagaaatagtcgatgcagttgctaaggagatcggaccagaccgtgttggaatcaggctctctccatttgctgactacatggaatctggagacactaatccaggagcattagggctttatatggcggaatctttgaacaaatacggaatcctctactgtcatgtgattgaagcgagaatgaaaacaatgggagaagtacatgcttgtcctcacacactaatgccgatgaggaaagcgtttaaggggacttttatctccgcaggaggtttcacgagggaagatgggaatgaggctgtgtcaaagggaagaactgatttggtggcttatggtcgatggtttctagccaacccggacctgccaaagaggttccaagtggatgcaccgctgaataagtacgatagaccaacgttttacacttctgatccagtcgtcggttacaccgattaccctttcctcgaatcaacagcttaaaattgttatcaataatgtaatgtagtgtgtttcccttatataagatgtaataagtttctggcttttcatttatactttttaagtttaagtcataaaaccttc

SEQ ID NO: 76865 - protein, 372 aa, Arabidopsis thaliana; identical to SEQ ID NO: 24532
  peptide (1)..(372): Ceres Seq. ID no. 12348336
  misc_feature (11)..(346): Pfam Name: NADH:flavin oxidoreductase / NADH oxidase family Pfam Description: NADH:flavin oxidoreductase / NADH oxidase family
  misc_feature (1)..(372): Homolog of NCBI NO: 15223138 NR Description: 12-oxophytodienoate reductase (OPR1); protein id: supported by cDNA: 38527., supported by cDNA: gi_18650649
  misc_feature (1)..(372): Homolog of NCBI NO: 21593388 NR Description: 12-oxophytodienoate reductase (OPR1) [Arabidopsis
  misc_feature (1)..(372): Homolog of NCBI NO: 2765083 NR Description: 12-oxophytodienoate reductase [Arabidopsis
  misc_feature (1)..(372): Homolog of NCBI NO: 15223140 NR Description: 12-oxophytodienoate reductase (OPR2); protein id: [Arabidopsis thaliana] >gi|25325950|pir||C96795 hypothetical
  misc_feature (1)..(372): Homolog of NCBI NO: 26450549 NR Description: putative 12-oxophytodienoate reductase OPR2
  misc_feature (1)..(371): Homolog of NCBI NO: 7449901 NR Description: probable 12-oxophytodienoate reductase (EC
  misc_feature (1)..(370): Homolog of NCBI NO: 4894182 NR Description: 12-oxophytodienoate reductase [Lycopersicon
  misc_feature (1)..(370): Homolog of NCBI NO: 14277800 NR Description: Chain A, Crystal Structure Of 12-Oxophytodienoate
  misc_feature (8)..(369): Homolog of NCBI NO: 7449902 NR Description: probable 12-oxophytodienoate reductase (EC
  misc_feature (9)..(368): Homolog of NCBI NO: 13516922 NR Description: 12-oxophytodienoic acid 10, 11-reductase [Pisum

SEQ ID NO: 76866 - protein, 355 aa, Arabidopsis thaliana; identical to SEQ ID NO: 24533
  peptide (1)..(355): Ceres Seq. ID no. 12348337
  misc_feature (1)..(329): Pfam Name: NADH:flavin oxidoreductase / NADH oxidase family Pfam Description: NADH:flavin oxidoreductase / NADH oxidase family
  misc_feature (1)..(355): Homolog of NCBI NO: 15223138 NR Description: 12-oxophytodienoate reductase (OPR1); protein id: supported by cDNA: 38527., supported by cDNA: gi_18650649
  misc_feature (1)..(355): Homolog of NCBI NO: 21593388 NR Description: 12-oxophytodienoate reductase (OPR1) [Arabidopsis
  misc_feature (1)..(355): Homolog of NCBI NO: 2765083 NR Description: 12-oxophytodienoate reductase [Arabidopsis
  misc_feature (1)..(355): Homolog of NCBI NO: 15223140 NR Description: 12-oxophytodienoate reductase (OPR2); protein id: [Arabidopsis thaliana] >gi|25325950|pir||C96795 hypothetical
  misc_feature (1)..(355): Homolog of NCBI NO: 26450549 NR Description: putative 12-oxophytodienoate reductase OPR2
  misc_feature (1)..(354): Homolog of NCBI NO: 7449901 NR Description: probable 12-oxophytodienoate reductase (EC
  misc_feature (1)..(353): Homolog of NCBI NO: 4894182 NR Description: 12-oxophytodienoate reductase [Lycopersicon
  misc_feature (1)..(353): Homolog of NCBI NO: 14277800 NR Description: Chain A, Crystal Structure Of 12-Oxophytodienoate
  misc_feature (1)..(352): Homolog of NCBI NO: 7449902 NR Description: probable 12-oxophytodienoate reductase (EC
  misc_feature (1)..(351): Homolog of NCBI NO: 13516922 NR Description: 12-oxophytodienoic acid 10, 11-reductase [Pisum

SEQ ID NO: 76867 - protein, 239 aa, Arabidopsis thaliana; identical to SEQ ID NO: 24534
  peptide (1)..(239): Ceres Seq. ID no. 12348338
  misc_feature (1)..(213): Pfam Name: NADH:flavin oxidoreductase / NADH oxidase family Pfam Description: NADH:flavin oxidoreductase / NADH oxidase family
  misc_feature (1)..(239): Homolog of NCBI NO: 15223138 NR Description: 12-oxophytodienoate reductase (OPR1); protein id: supported by cDNA: 38527., supported by cDNA: gi_18650649
  misc_feature (1)..(239): Homolog of NCBI NO: 21593388 NR Description: 12-oxophytodienoate reductase (OPR1) [Arabidopsis
  misc_feature (1)..(239): Homolog of NCBI NO: 2765083 NR Description: 12-oxophytodienoate reductase [Arabidopsis
  misc_feature (1)..(239): Homolog of NCBI NO: 15223140 NR Description: 12-oxophytodienoate reductase (OPR2); protein id: [Arabidopsis thaliana] >gi|25325950|pir||C96795 hypothetical
  misc_feature (1)..(239): Homolog of NCBI NO: 26450549 NR Description: putative 12-oxophytodienoate reductase OPR2
  misc_feature (1)..(238): Homolog of NCBI NO: 7449901 NR Description: probable 12-oxophytodienoate reductase (EC
  misc_feature (1)..(237): Homolog of NCBI NO: 4894182 NR Description: 12-oxophytodienoate reductase [Lycopersicon
  misc_feature (1)..(237): Homolog of NCBI NO: 14277800 NR Description: Chain A, Crystal Structure Of 12-Oxophytodienoate
  misc_feature (1)..(236): Homolog of NCBI NO: 7449902 NR Description: probable 12-oxophytodienoate reductase (EC
  misc_feature (1)..(235): Homolog of NCBI NO: 13516922 NR Description: 12-oxophytodienoic acid 10, 11-reductase [Pisum

SEQ ID NO: 76868 - DNA, 1155 bp, Arabidopsis thaliana
  misc_feature (1)..(1155): Ceres Seq. ID no. 12350377
  misc_feature: MA Experiment ID: 20000171 Result: Up-regulated in Transcription
  misc_feature: MA Experiment 20000171 PARAMETER Experiment Name: At_42deg_Heat_P Parameter: Age (day) Value: 14
  misc_feature: MA Experiment 20000171 PARAMETER Experiment Name: At_42deg_Heat_P Parameter: Organism Value: A. thaliana
  misc_feature: MA Experiment 20000171 PARAMETER Experiment Name: At_42deg_Heat_P Parameter: Plant Line Value: WS
  misc_feature: MA Experiment 20000171 PARAMETER Experiment Name: At_42deg_Heat_P Parameter: Temperature (deg C) Value: 42 vs. 22
  misc_feature: MA Experiment 20000171 PARAMETER Experiment Name: At_42deg_Heat_P Parameter: Timepoint (hr) Value: 1
  misc_feature: MA Experiment 20000171 PARAMETER Experiment Name: At_42deg_Heat_P Parameter: Tissue Value: Aerial
  misc_feature: MA Experiment ID: 20000173 Result: Up-regulated in Transcription
  misc_feature: MA Experiment 20000173 PARAMETER Experiment Name: At_42deg_Heat_P Parameter: Age (day) Value: 14
  misc_feature: MA Experiment 20000173 PARAMETER Experiment Name: At_42deg_Heat_P Parameter: Organism Value: A. thaliana
  misc_feature: MA Experiment 20000173 PARAMETER Experiment Name: At_42deg_Heat_P Parameter: Plant Line Value: WS
  misc_feature: MA Experiment 20000173 PARAMETER Experiment Name: At_42deg_Heat_P Parameter: Temperature (deg C) Value: 42 vs. 22
  misc_feature: MA Experiment 20000173 PARAMETER Experiment Name: At_42deg_Heat_P Parameter: Timepoint (hr) Value: 6
  misc_feature: MA Experiment 20000173 PARAMETER Experiment Name: At_42deg_Heat_P Parameter: Tissue Value: Aerial
  misc_feature: MA Experiment ID: 20001557 Result: Up-regulated in Transcription
  misc_feature: MA Experiment 20001557 PARAMETER Experiment Name: At_Drought_Soil_Dry_P Parameter: Age (day) Value: 27
  misc_feature: MA Experiment 20001557 PARAMETER Experiment Name: At_Drought_Soil_Dry_P Parameter: Organism Value: A. thaliana
  misc_feature: MA Experiment 20001557 PARAMETER Experiment Name: At_Drought_Soil_Dry_P Parameter: Plant Line Value: WS
  misc_feature: MA Experiment 20001557 PARAMETER Experiment Name: At_Drought_Soil_Dry_P Parameter: Post Timepoint (hr) Value: 3
  misc_feature: MA Experiment 20001557 PARAMETER Experiment Name: At_Drought_Soil_Dry_P Parameter: Post-Treatment Value: Re-Water vs. No Drought
  misc_feature: MA Experiment 20001557 PARAMETER Experiment Name: At_Drought_Soil_Dry_P Parameter: Timepoint (day) Value: 13
  misc_feature: MA Experiment 20001557 PARAMETER Experiment Name: At_Drought_Soil_Dry_P Parameter: Treatment Value: Drought vs. No Drought
agttcttcagtggggcggcttgtggcttctttttcatttttccagaaaaccccataaacctctcgctctcgggaatttgattgattcccacgaggaaaaatcaatcttcccggaaaatggcagctaggttattgttccgtcgaagttctcaaatcctccgatcaattcaacgaaatcctcaaatctcatcgtcattcgaatcaccaccttgcccgatttttcactcattgaccaccgcctcaccagatccatcgcgattatcatccttaaccttcctccgatctctctccatcgctcgtcgcggtccaacacgtcctaagaaaatcgatatcggagccaaagcgcgtcagatgcagaatcgccgtttatggacctacgcgctaaccttcagctgcatcgccggattcgtagttatcgtccttaaccaatttcaggatcagcttgtcttctacctaacgccatcagacgctatggagaaattcgcagagaatccaacaaagaacaaattcagactcggtggtttggttctagaaggtagcgttgcgcagccggcggcgtcacaggagatggagtttgtgatcactgatctgatcactgatattttggttaggtataaaggatctttgccggatctgtttagggaaggtcattcagttgtggttgaaggattcattaagccgtatacagatgaagtaaggaaggaagtttctacaaaacctatttcgaagaaagctaggaacctcgattgtttcttctcggcgactgaagttttggctaagcatgatgagaagtatatgccacaggaagttgcggcggcgattgagaagaataagaaaattattgaagcggcggcgactgaacaagctgctgaagttgcggcttcttagattggtataaacttcattctttttaagttaatcaaaattttccccaagttcgagcttttggtgagtattgttcatcttataaggttatatttgattatagtttctggaaaagagtaggaagattggaatgttatattcctggaaaacagagatttgatttttgagtctatttgagaattaagtggagaaatgtgatacactatacaatagctttgtttgattccacaaagctataagctaatctactttcttgttgtgttgatcaaat

SEQ ID NO: 76869 - protein, 256 aa, Arabidopsis thaliana
  peptide (1)..(256): Ceres Seq. ID no. 12350378
  misc_feature (64)..(230): Pfam Name: CcmE Pfam Description: CcmE
  misc_feature (1)..(256): Homolog of NCBI NO: 15231037 NR Description: putative transmembrane protein G1p; protein id: supported by cDNA: gi_1657614 [Arabidopsis thaliana]
  misc_feature (10)..(256): Homolog of NCBI NO: 37536592 NR Description: putative cytochrome c-type biogenesis protein
  misc_feature (80)..(193): Homolog of NCBI NO: 30248771 NR Description: CcmE/CycJ proteins [Nitrosomonas europaea ATCC >gi|30180366|emb|CAD84678.1| CcmE/CycJ proteins [Nitrosomonas
  misc_feature (210)..(240): Homolog of NCBI NO: 30248771 NR Description: CcmE/CycJ proteins [Nitrosomonas europaea ATCC >gi|30180366|emb|CAD84678.1| CcmE/CycJ proteins [Nitrosomonas
  misc_feature (80)..(200): Homolog of NCBI NO: 38637881 NR Description: cytochrome C-type biogenesis protein [Ralstonia
  misc_feature (210)..(251): Homolog of NCBI NO: 38637881 NR Description: cytochrome C-type biogenesis protein [Ralstonia
  misc_feature (80)..(184): Homolog of NCBI NO: 22965493 NR Description: hypothetical protein [Rhodospirillum rubrum]
  misc_feature (213)..(251): Homolog of NCBI NO: 22965493 NR Description: hypothetical protein [Rhodospirillum rubrum]
  misc_feature (80)..(184): Homolog of NCBI NO: 24461536 NR Description: putative cytochrome C-type biogenesis protein
  misc_feature (213)..(240): Homolog of NCBI NO: 24461536 NR Description: putative cytochrome C-type biogenesis protein
MAARLLFRRSSQILRSIQRNPQISSSFESPPCPIFHSLTTASPDPSRLSSLTFLRSLSIARRGPTRPKKIDIGAKARQMQNRRLWTYALTFSCIAGFVVIVLNQFQDQLVFYLTPSDAMEKFAENPTKNKFRLGGLVLEGSVAQPAASQEMEFVITDLITDILVRYKGSLPDLFREGHSVVVEGFIKPYTDEVRKEVSTKPISKKARNLDCFFSATEVLAKHDEKYMPQEVAAAIEKNKKIIEAAATEQAAEVAAS

SEQ ID NO: 76870 - protein, 178 aa, Arabidopsis thaliana
  peptide (1)..(178): Ceres Seq. ID no. 12350379
  misc_feature (1)..(152): Pfam Name: CcmE Pfam Description: CcmE
  misc_feature (1)..(178): Homolog of NCBI NO: 15231037 NR Description: putative transmembrane protein G1p; protein id: supported by cDNA: gi_1657614 [Arabidopsis thaliana]
  misc_feature (1)..(178): Homolog of NCBI NO: 37536592 NR Description: putative cytochrome c-type biogenesis protein
  misc_feature (2)..(115): Homolog of NCBI NO: 30248771 NR Description: CcmE/CycJ proteins [Nitrosomonas europaea ATCC >gi|30180366|emb|CAD84678.1| CcmE/CycJ proteins [Nitrosomonas
  misc_feature (132)..(162): Homolog of NCBI NO: 30248771 NR Description: CcmE/CycJ proteins [Nitrosomonas europaea ATCC >gi|30180366|emb|CAD84678.1| CcmE/CycJ proteins [Nitrosomonas
  misc_feature (2)..(122): Homolog of NCBI NO: 38637881 NR Description: cytochrome C-type biogenesis protein [Ralstonia
  misc_feature (132)..(173): Homolog of NCBI NO: 38637881 NR Description: cytochrome C-type biogenesis protein [Ralstonia
  misc_feature (2)..(106): Homolog of NCBI NO: 22965493 NR Description: hypothetical protein [Rhodospirillum rubrum]
  misc_feature (135)..(173): Homolog of NCBI NO: 22965493 NR Description: hypothetical protein [Rhodospirillum rubrum]
  misc_feature (2)..(106): Homolog of NCBI NO: 24461536 NR Description: putative cytochrome C-type biogenesis protein
  misc_feature (135)..(162): Homolog of NCBI NO: 24461536 NR Description: putative cytochrome C-type biogenesis protein
MQNRRLWTYALTFSCIAGFVVIVLNQFQDQLVFYLTPSDAMEKFAENPTKNKFRLGGLVLEGSVAQPAASQEMEFVITDLITDILVRYKGSLPDLFREGHSVVVEGFIKPYTDEVRKEVSTKPISKKARNLDCFFSATEVLAKHDEKYMPQEVAAAIEKNKKIIEAAATEQAAEVAAS

SEQ ID NO: 76871 - protein, 138 aa, Arabidopsis thaliana
  peptide (1)..(138): Ceres Seq. ID no. 12350380
  misc_feature (1)..(112): Pfam Name: CcmE Pfam Description: CcmE
  misc_feature (1)..(138): Homolog of NCBI NO: 15231037 NR Description: putative transmembrane protein G1p; protein id: supported by cDNA: gi_1657614 [Arabidopsis thaliana]
  misc_feature (1)..(138): Homolog of NCBI NO: 37536592 NR Description: putative cytochrome c-type biogenesis protein
  misc_feature (1)..(75): Homolog of NCBI NO: 30248771 NR Description: CcmE/CycJ proteins [Nitrosomonas europaea ATCC >gi|30180366|emb|CAD84678.1| CcmE/CycJ proteins [Nitrosomonas
  misc_feature (92)..(122): Homolog of NCBI NO: 30248771 NR Description: CcmE/CycJ proteins [Nitrosomonas europaea ATCC >gi|30180366|emb|CAD84678.1| CcmE/CycJ proteins [Nitrosomonas
  misc_feature (1)..(82): Homolog of NCBI NO: 38637881 NR Description: cytochrome C-type biogenesis protein [Ralstonia
  misc_feature (92)..(133): Homolog of NCBI NO: 38637881 NR Description: cytochrome C-type biogenesis protein [Ralstonia
  misc_feature (1)..(66): Homolog of NCBI NO: 22965493 NR Description: hypothetical protein [Rhodospirillum rubrum]
  misc_feature (95)..(133): Homolog of NCBI NO: 22965493 NR Description: hypothetical protein [Rhodospirillum rubrum]
  misc_feature (1)..(66): Homolog of NCBI NO: 24461536 NR Description: putative cytochrome C-type biogenesis protein
  misc_feature (95)..(122): Homolog of NCBI NO: 24461536 NR Description: putative cytochrome C-type biogenesis protein
MEKFAENPTKNKFRLGGLVLEGSVAQPAASQEMEFVITDLITDILVRYKGSLPDLFREGHSVVVEGFIKPYTDEVRKEVSTKPISKKARNLDCFFSATEVLAKHDEKYMPQEVAAAIEKNKKIIEAAATEQAAEVAAS

SEQ ID NO: 76872 - DNA, 1528 bp, Arabidopsis thaliana
  misc_feature (1)..(1528): Ceres Seq. ID no. 12370374
  misc_feature: MA Experiment ID: 108433 Result: Down-regulated in Transcription
  misc_feature: MA Experiment 108433 PARAMETER Experiment Name: At_rhl_Mutant2_cDNA_P Parameter: Age (day) Value: 7
  misc_feature: MA Experiment 108433 PARAMETER Experiment Name: At_rhl_Mutant2_cDNA_P Parameter: Organism Value: A. thaliana
  misc_feature: MA Experiment 108433 PARAMETER Experiment Name: At_rhl_Mutant2_cDNA_P Parameter: Plant Line Value: rhl Mutant vs. wt landsburg
  misc_feature: MA Experiment 108433 PARAMETER Experiment Name: At_rhl_Mutant2_cDNA_P Parameter: Tissue Value: Roots
  misc_feature: MA Experiment ID: 108461 Result: Down-regulated in Transcription
  misc_feature: MA Experiment 108461 PARAMETER Experiment Name: At_Germinating_Seeds_cDNA_P Parameter: Age (day) Value: 1 vs. 0
  misc_feature: MA Experiment 108461 PARAMETER Experiment Name: At_Germinating_Seeds_cDNA_P Parameter: Tissue Value: Germinating Seeds
  misc_feature: MA Experiment ID: 108474 Result: Up-regulated in Transcription
  misc_feature: MA Experiment 108474 PARAMETER Experiment Name: At_Drought_Flowers_cDNA_P Parameter: Timepoint (hr) Value: null
  misc_feature: MA Experiment 108474 PARAMETER Experiment Name: At_Drought_Flowers_cDNA_P Parameter: Treatment Value: Drought vs. No Drought
  misc_feature: MA Experiment ID: 108489 Result: Up-regulated in Transcription
  misc_feature: MA Experiment ID: 20000179 Result: Down-regulated in Transcription
  misc_feature: MA Experiment 20000179 PARAMETER Experiment Name: At_Germinating_Seeds_P Parameter: Age (hr) Value: 6 vs. 0
  misc_feature: MA Experiment 20000179 PARAMETER Experiment Name: At_Germinating_Seeds_P Parameter: Tissue Value: Germinating Seeds
  misc_feature: MA Experiment ID: 20000224 Result: Down-regulated in Transcription
  misc_feature: MA Experiment ID: 20000234 Result: Down-regulated in Transcription
  misc_feature: MA Experiment 20000234 PARAMETER Experiment Name: At_Siliques_P Parameter: Age (day) Value: 21
  misc_feature: MA Experiment 20000234 PARAMETER Experiment Name: At_Siliques_P Parameter: Organism Value: A. thaliana
  misc_feature: MA Experiment 20000234 PARAMETER Experiment Name: At_Siliques_P Parameter: Plant Line Value: WS
  misc_feature: MA Experiment 20000234 PARAMETER Experiment Name: At_Siliques_P Parameter: Tissue Value: Less Than 5mm Siliques vs. Whole Plant
  misc_feature: MA Experiment ID: 20000264 Result: Down-regulated in Transcription
  misc_feature: MA Experiment 20000264 PARAMETER Experiment Name: At_Open_Flower_P Parameter: Age (day) Value: 21
  misc_feature: MA Experiment 20000264 PARAMETER Experiment Name: At_Open_Flower_P Parameter: Plant Line Value: WS
  misc_feature: MA Experiment 20000264 PARAMETER Experiment Name: At_Open_Flower_P Parameter: Tissue Value: Open Flower vs. Whole Plant
  misc_feature: MA Experiment ID: 20000265 Result: Down-regulated in Transcription
  misc_feature: MA Experiment 20000265 PARAMETER Experiment Name: At_Open_Flower_P Parameter: Age (day) Value: 21
  misc_feature: MA Experiment 20000265 PARAMETER Experiment Name: At_Open_Flower_P Parameter: Plant Line Value: WS
  misc_feature: MA Experiment 20000265 PARAMETER Experiment Name: At_Open_Flower_P Parameter: Tissue Value: Closed Flower vs. Whole Plant
  misc_feature: MA Experiment ID: 20000286 Result: Down-regulated in Transcription
  misc_feature: MA Experiment 20000286 PARAMETER Experiment Name: At_Open_Flower_P Parameter: Age (day) Value: 21
  misc_feature: MA Experiment 20000286 PARAMETER Experiment Name: At_Open_Flower_P Parameter: Plant Line Value: WS
  misc_feature: MA Experiment 20000286 PARAMETER Experiment Name: At_Open_Flower_P Parameter: Tissue Value: Half Open vs. Whole Plant
  misc_feature: MA Experiment ID: 20000709 Result: Up-regulated in Transcription
  misc_feature: MA Experiment 20000709 PARAMETER Experiment Name: At_15mM_NH4NO3_L-to-H_P Parameter: Age (hr) Value: 14
  misc_feature: MA Experiment 20000709 PARAMETER Experiment Name: At_15mM_NH4NO3_L-to-H_P Parameter: Organism Value: A. thaliana
  misc_feature: MA Experiment 20000709 PARAMETER Experiment Name: At_15mM_NH4NO3_L-to-H_P Parameter: Plant Line Value: WS
  misc_feature: MA Experiment 20000709 PARAMETER Experiment Name: At_15mM_NH4NO3_L-to-H_P Parameter: Timepoint (hr) Value: 4
  misc_feature: MA Experiment 20000709 PARAMETER Experiment Name: At_15mM_NH4NO3_L-to-H_P Parameter: Tissue Value: Aerial
  misc_feature: MA Experiment 20000709 PARAMETER Experiment Name: At_15mM_NH4NO3_L-to-H_P Parameter: Treatment Value: 15mM NH4NO3 vs. 30mM Mannitol
  misc_feature: MA Experiment ID: 20000794 Result: Down-regulated in Transcription
  misc_feature: MA Experiment 20000794 PARAMETER Experiment Name: At_Petals_P Parameter: Age (day) Value: 23-25 days
  misc_feature: MA Experiment 20000794 PARAMETER Experiment Name: At_Petals_P Parameter: Plant Line Value: WS
  misc_feature: MA Experiment 20000794 PARAMETER Experiment Name: At_Petals_P Parameter: Tissue Value: Petals vs. Whole plant
  misc_feature: MA Experiment ID: 20001450 Result: Up-regulated in Transcription
  misc_feature: MA Experiment 20001450 PARAMETER Experiment Name: At_Far-red-induction_P Parameter: Age (day) Value: 7
  misc_feature: MA Experiment 20001450 PARAMETER Experiment Name: At_Far-red-induction_P Parameter: Light Value: Far-red vs. White
  misc_feature: MA Experiment 20001450 PARAMETER Experiment Name: At_Far-red-induction_P Parameter: Organism Value: A. thaliana
  misc_feature: MA Experiment 20001450 PARAMETER Experiment Name: At_Far-red-induction_P Parameter: Plant Line Value: Columbia
  misc_feature: MA Experiment 20001450 PARAMETER Experiment Name: At_Far-red-induction_P Parameter: Timepoint (hr) Value: 8
  misc_feature: MA Experiment 20001450 PARAMETER Experiment Name: At_Far-red-induction_P Parameter: Tissue Value: Whole Plant
  misc_feature: MA Experiment ID: 20001457 Result: Up-regulated in Transcription
  misc_feature: MA Experiment 20001457 PARAMETER Experiment Name: At_50mM_NH4NO3_L-to-H_P Parameter: Age (day) Value: Undefined
  misc_feature: MA Experiment 20001457 PARAMETER Experiment Name: At_50mM_NH4NO3_L-to-H_P Parameter: Organism Value: Undefined
  misc_feature: MA Experiment 20001457 PARAMETER Experiment Name: At_50mM_NH4NO3_L-to-H_P Parameter: Plant Line Value: Undefined
  misc_feature: MA Experiment 20001457 PARAMETER Experiment Name: At_50mM_NH4NO3_L-to-H_P Parameter: Timepoint (hr) Value: 0.5
  misc_feature: MA Experiment 20001457 PARAMETER Experiment Name: At_50mM_NH4NO3_L-to-H_P Parameter: Tissue Value: Siliques
  misc_feature: MA Experiment 20001457 PARAMETER Experiment Name: At_50mM_NH4NO3_L-to-H_P Parameter: Treatment Value: 50mM NH4NO3 vs. 100mM Manitol
  misc_feature: MA Experiment ID: 20001458 Result: Up-regulated in Transcription
  misc_feature: MA Experiment 20001458 PARAMETER Experiment Name: At_50mM_NH4NO3_L-to-H_P Parameter: Age (day) Value: Undefined
  misc_feature: MA Experiment 20001458 PARAMETER Experiment Name: At_50mM_NH4NO3_L-to-H_P Parameter: Organism Value: Undefined
  misc_feature: MA Experiment 20001458 PARAMETER Experiment Name: At_50mM_NH4NO3_L-to-H_P Parameter: Plant Line Value: Undefined
  misc_feature: MA Experiment 20001458 PARAMETER Experiment Name: At_50mM_NH4NO3_L-to-H_P Parameter: Timepoint (hr) Value: 2
  misc_feature: MA Experiment 20001458 PARAMETER Experiment Name: At_50mM_NH4NO3_L-to-H_P Parameter: Tissue Value: Siliques
  misc_feature: MA Experiment 20001458 PARAMETER Experiment Name: At_50mM_NH4NO3_L-to-H_P Parameter: Treatment Value: 50mM NH4NO3 vs. 100mM Manitol
  misc_feature: MA Experiment ID: 20001459 Result: Up-regulated in Transcription
  misc_feature: MA Experiment 20001459 PARAMETER Experiment Name: At_50mM_NH4NO3_L-to-H_P Parameter: Age (day) Value: Undefined
  misc_feature: MA Experiment 20001459 PARAMETER Experiment Name: At_50mM_NH4NO3_L-to-H_P Parameter: Organism Value: Undefined
  misc_feature: MA Experiment 20001459 PARAMETER Experiment Name: At_50mM_NH4NO3_L-to-H_P Parameter: Plant Line Value: Undefined
  misc_feature: MA Experiment 20001459 PARAMETER Experiment Name: At_50mM_NH4NO3_L-to-H_P Parameter: Timepoint (hr) Value: 4
  misc_feature: MA Experiment 20001459 PARAMETER Experiment Name: At_50mM_NH4NO3_L-to-H_P Parameter: Tissue Value: Siliques
  misc_feature: MA Experiment 20001459 PARAMETER Experiment Name: At_50mM_NH4NO3_L-to-H_P Parameter: Treatment Value: 50mM NH4NO3 vs. 100mM Manitol
  misc_feature: MA Experiment ID: 20001756 Result: Up-regulated in Transcription
  misc_feature: MA Experiment 20001756 PARAMETER Experiment Name: At_50mM_NH4NO3_L-to-H_P Parameter: Timepoint (hr) Value: 4
  misc_feature: MA Experiment 20001756 PARAMETER Experiment Name: At_50mM_NH4NO3_L-to-H_P Parameter: Tissue Value: Leaf
  misc_feature: MA Experiment 20001756 PARAMETER Experiment Name: At_50mM_NH4NO3_L-to-H_P Parameter: Treatment Value: 50mM NH4NO3 vs 100mM Mannitol
  misc_feature: MA Experiment ID: 20001757 Result: Up-regulated in Transcription
  misc_feature: MA Experiment 20001757 PARAMETER Experiment Name: At_50mM_NH4NO3_L-to-H_P Parameter: Timepoint (hr) Value: 6
  misc_feature: MA Experiment 20001757 PARAMETER Experiment Name: At_50mM_NH4NO3_L-to-H_P Parameter: Tissue Value: Leaf
  misc_feature: MA Experiment 20001757 PARAMETER Experiment Name: At_50mM_NH4NO3_L-to-H_P Parameter: Treatment Value: 50mM NH4NO3 vs 100mM Mannitol
  misc_feature: MA Experiment ID: 20001759 Result: Up-regulated in Transcription
  misc_feature: MA Experiment 20001759 PARAMETER Experiment Name: At_50mM_NH4NO3_L-to-H_P Parameter: Timepoint (hr) Value: 1
  misc_feature: MA Experiment 20001759 PARAMETER Experiment Name: At_50mM_NH4NO3_L-to-H_P Parameter: Tissue Value: Siliques
  misc_feature: MA Experiment 20001759 PARAMETER Experiment Name: At_50mM_NH4NO3_L-to-H_P Parameter: Treatment Value: 50mM NH4NO3 vs 100mM Mannitol
attttaactctcaaagattcgttttaggtacgcgacggcccgacctcgattctcttccacttctttcttgttccaaaaacctaaaccctctctctctctctctctctctctatctcttgaaaaatcaacaaaacattggaatcaatttctctatgttttgattctattttaaagatccaatattctttctccattgagattaagcttctttctcgctgtcgtctctctatagatcttggttcttagtcccttttgaataataatgatggtggagatggattacgctaagaaaatgcagaaatgtcatgaatacgttgaagcacttgaagaagaacagaagaaaatccaagtctttcaacgcgagcttcctttatgtttagagcttgtcactcaagcgatcgaagcttgtcggaaggagttatctggtacgacgacaactacatcagaacagtgttcagaacagaccacaagtgtttgtggtggtcctgtctttgaagagtttattcctatcaagaaaattagttccttgtgtgaagaagtacaagaagaagaagaagaagatggtgaacatgaatcttctccagaacttgtgaataataagaaatcagattggcttagatctgttcagctatggaatcattcaccggatctaaatccaaaagaggagcgtgtagctaagaaagcgaaagtggtggaggtgaaaccaaaaagcggtgcgtttcagccgtttcaaaagcgcgttttggagactgatttgcaaccggcggtgaaagtagctagttcgatgccagcgacgacgacgagttctacgacggaaacttgtggtggtaaaagtgatttgattaaagctggagatgaggaaagacggatagagcagcagcaatcgcagtcgcatacgcatagaaaacaaaggcggtgctggtcgccggaattacaccgtcgattcctaaacgcgcttcagcagcttggaggatctcatgttgctacaccaaagcaaatcagggatcacatgaaggttgatggattaacaaacgacgaagttaaaagccatttacagaaatatagacttcacacaagaaggccagcagcaacatccgtggcggcacaaagtaccgggaatcagcaacaaccacaatttgtggtggttggaggcatatgggtaccatcgtcacaagattttccaccaccgtccgatgtagccaacaagggtggtgtatatgctccggttgcggtggcgcaatctccaaaacgttcgttggagagaagttgcaactcgccggcggcatcttcctctacaaatacaaatacttctactcctgtgtcataatctgatagtcatactataatcatctcctgatgttgattttggtgtaggtttgaaaatgtttatgtgaatgtaagaaatattttcgtccgtttttgtttgtaaccaagaaatgttatttcctcggttggaaattttgaataaagtagacgaatgctactatgtagtatatacacgagataagtgaagactctttgtttttct

SEQ ID NO: 76873 - protein, 354 aa, Arabidopsis thaliana; identical to SEQ ID NO: 25269
  peptide (1)..(354): Ceres Seq. ID no. 12370375
  misc_feature (217)..(268): Pfam Name: Myb-like DNA-binding domain Pfam Description: Myb-like DNA-binding domain
  misc_feature (1)..(354): Homolog of NCBI NO: 18409089 NR Description: expressed protein; protein id: At1g68670.1, by cDNA: 40196., supported by cDNA: gi_20258928 [Arabidopsis >gi|17380860|gb|AAL36242.1| unknown protein [Arabidopsis
  misc_feature (2)..(354): Homolog of NCBI NO: 25404762 NR Description: F24J5.9 [imported] - Arabidopsis thaliana
  misc_feature (11)..(354): Homolog of NCBI NO: 21593572 NR Description: unknown [Arabidopsis thaliana]
  misc_feature (4)..(352): Homolog of NCBI NO: 18395724 NR Description: expressed protein; protein id: At1g25550.1, by cDNA: 1959., supported by cDNA: gi_11908085, supported by gi_12642893, supported by cDNA: gi_13926311 [Arabidopsis
  misc_feature (4)..(352): Homolog of NCBI NO: 25513742 NR Description: 38.7K hypothetical protein F2J7.21 - Arabidopsis >gi|12321504|gb|AAG50807.1|AC079281_9 hypothetical protein
  misc_feature (11)..(352): Homolog of NCBI NO: 21554044 NR Description: unknown [Arabidopsis thaliana]
  misc_feature (5)..(140): Homolog of NCBI NO: 18391499 NR Description: expressed protein; protein id: At1g13300.1, by cDNA: gi_13605874 [Arabidopsis thaliana]
  misc_feature (190)..(303): Homolog of NCBI NO: 18391499 NR Description: expressed protein; protein id: At1g13300.1, by cDNA: gi_13605874 [Arabidopsis thaliana]
  misc_feature (9)..(146): Homolog of NCBI NO: 18404660 NR Description: expressed protein; protein id: At3g25790.1, by cDNA: 157740. [Arabidopsis thaliana] gb|AAD49976.1~gene_id:K13N2.13~similar to unknown protein
  misc_feature (214)..(328): Homolog of NCBI NO: 18404660 NR Description: expressed protein; protein id: At3g25790.1, by cDNA: 157740. [Arabidopsis thaliana] gb|AAD49976.1~gene_id:K13N2.13~similar to unknown protein

SEQ ID NO: 76874 - protein, 353 aa, Arabidopsis thaliana; identical to SEQ ID NO: 25270
  peptide (1)..(353): Ceres Seq. ID no. 12370376
  misc_feature (216)..(267): Pfam Name: Myb-like DNA-binding domain Pfam Description: Myb-like DNA-binding domain
  misc_feature (1)..(353): Homolog of NCBI NO: 18409089 NR Description: expressed protein; protein id: At1g68670.1, by cDNA: 40196., supported by cDNA: gi_20258928 [Arabidopsis >gi|17380860|gb|AAL36242.1| unknown protein [Arabidopsis
  misc_feature (1)..(353): Homolog of NCBI NO: 25404762 NR Description: F24J5.9 [imported] - Arabidopsis thaliana
  misc_feature (10)..(353): Homolog of NCBI NO: 21593572 NR Description: unknown [Arabidopsis thaliana]
  misc_feature (3)..(351): Homolog of NCBI NO: 18395724 NR Description: expressed protein; protein id: At1g25550.1, by cDNA: 1959., supported by cDNA: gi_11908085, supported by gi_12642893, supported by cDNA: gi_13926311 [Arabidopsis
  misc_feature (3)..(351): Homolog of NCBI NO: 25513742 NR Description: 38.7K hypothetical protein F2J7.21 - Arabidopsis >gi|12321504|gb|AAG50807.1|AC079281_9 hypothetical protein
  misc_feature (10)..(351): Homolog of NCBI NO: 21554044 NR Description: unknown [Arabidopsis thaliana]
  misc_feature (4)..(139): Homolog of NCBI NO: 18391499 NR Description: expressed protein; protein id: At1g13300.1, by cDNA: gi_13605874 [Arabidopsis thaliana]
  misc_feature (189)..(302): Homolog of NCBI NO: 18391499 NR Description: expressed protein; protein id: At1g13300.1, by cDNA: gi_13605874 [Arabidopsis thaliana]
  misc_feature (8)..(145): Homolog of NCBI NO: 18404660 NR Description: expressed protein; protein id: At3g25790.1, by cDNA: 157740. [Arabidopsis thaliana] gb|AAD49976.1~gene_id:K13N2.13~similar to unknown protein
  misc_feature (213)..(327): Homolog of NCBI NO: 18404660 NR Description: expressed protein; protein id: At3g25790.1, by cDNA: 157740. [Arabidopsis thaliana] gb|AAD49976.1~gene_id:K13N2.13~similar to unknown protein

SEQ ID NO: 76875 - protein, 350 aa, Arabidopsis thaliana; identical to SEQ ID NO: 25271
  peptide (1)..(350): Ceres Seq. ID no. 12370377
  misc_feature (213)..(264): Pfam Name: Myb-like DNA-binding domain Pfam Description: Myb-like DNA-binding domain
  misc_feature (1)..(350): Homolog of NCBI NO: 18409089 NR Description: expressed protein; protein id: At1g68670.1, by cDNA: 40196., supported by cDNA: gi_20258928 [Arabidopsis >gi|17380860|gb|AAL36242.1| unknown protein [Arabidopsis
  misc_feature (1)..(350): Homolog of NCBI NO: 25404762 NR Description: F24J5.9 [imported] - Arabidopsis thaliana
  misc_feature (7)..(350): Homolog of NCBI NO: 21593572 NR Description: unknown [Arabidopsis thaliana]
  misc_feature (1)..(348): Homolog of NCBI NO: 18395724 NR Description: expressed protein; protein id: At1g25550.1, by cDNA: 1959., supported by cDNA: gi_11908085, supported by gi_12642893, supported by cDNA: gi_13926311 [Arabidopsis
  misc_feature (1)..(348): Homolog of NCBI NO: 25513742 NR Description: 38.7K hypothetical protein F2J7.21 - Arabidopsis >gi|12321504|gb|AAG50807.1|AC079281_9 hypothetical protein
  misc_feature (7)..(348): Homolog of NCBI NO: 21554044 NR Description: unknown [Arabidopsis thaliana]
  misc_feature (1)..(136): Homolog of NCBI NO: 18391499 NR Description: expressed protein; protein id: At1g13300.1, by cDNA: gi_13605874 [Arabidopsis thaliana]
  misc_feature (186)..(299): Homolog of NCBI NO: 18391499 NR Description: expressed protein; protein id: At1g13300.1, by cDNA: gi_13605874 [Arabidopsis thaliana]
  misc_feature (5)..(142): Homolog of NCBI NO: 18404660 NR Description: expressed protein; protein id: At3g25790.1, by cDNA: 157740. [Arabidopsis thaliana] gb|AAD49976.1~gene_id:K13N2.13~similar to unknown protein
  misc_feature (210)..(324): Homolog of NCBI NO: 18404660 NR Description: expressed protein; protein id: At3g25790.1, by cDNA: 157740. [Arabidopsis thaliana] gb|AAD49976.1~gene_id:K13N2.13~similar to unknown protein

SEQ ID NO: 76876 - DNA, 812 bp, Arabidopsis thaliana
  misc_feature (1)..(812): Ceres Seq. ID no. 12371878
  misc_feature: MA Experiment ID: 20000213 Result: Up-regulated in Transcription
  misc_feature: MA Experiment 20000213 PARAMETER Experiment Name: At_4deg_Cold_P Parameter: Timepoint (hr) Value: 2
  misc_feature: MA Experiment ID: 20000437 Result: Up-regulated in Transcription
  misc_feature: MA Experiment 20000437 PARAMETER Experiment Name: At_Drought_P Parameter: Age (day) Value: 8
  misc_feature: MA Experiment 20000437 PARAMETER Experiment Name: At_Drought_P Parameter: Organism Value: A. thaliana
  misc_feature: MA Experiment 20000437 PARAMETER Experiment Name: At_Drought_P Parameter: Plant Line Value: WS
  misc_feature: MA Experiment 20000437 PARAMETER Experiment Name: At_Drought_P Parameter: Timepoint (hr) Value: 24
  misc_feature: MA Experiment 20000437 PARAMETER Experiment Name: At_Drought_P Parameter: Tissue Value: Whole Plant
  misc_feature: MA Experiment 20000437 PARAMETER Experiment Name: At_Drought_P Parameter: Treatment Value: Drought vs. No Drought
  misc_feature: MA Experiment ID: 20000438 Result: Down-regulated in Transcription
  misc_feature: MA Experiment 20000438 PARAMETER Experiment Name: At_Shoots__P Parameter: Age (day) Value: 14
  misc_feature: MA Experiment 20000438 PARAMETER Experiment Name: At_Shoots__P Parameter: Tissue Value: Shoots vs. Whole Plant
  misc_feature: MA Experiment ID: 20001451 Result: Up-regulated in Transcription
  misc_feature: MA Experiment 20001451 PARAMETER Experiment Name: At_Far-red-induction_P Parameter: Age (day) Value: 7
  misc_feature: MA Experiment 20001451 PARAMETER Experiment Name: At_Far-red-induction_P Parameter: Light Value: Far-red vs. White
  misc_feature: MA Experiment 20001451 PARAMETER Experiment Name: At_Far-red-induction_P Parameter: Organism Value: A. thaliana
  misc_feature: MA Experiment 20001451 PARAMETER Experiment Name: At_Far-red-induction_P Parameter: Plant Line Value: Columbia
  misc_feature: MA Experiment 20001451 PARAMETER Experiment Name: At_Far-red-induction_P Parameter: Timepoint (hr) Value: 24
  misc_feature: MA Experiment 20001451 PARAMETER Experiment Name: At_Far-red-induction_P Parameter: Tissue Value: Whole Plant
  misc_feature: MA Experiment ID: 20001557 Result: Up-regulated in Transcription
  misc_feature: MA Experiment 20001557 PARAMETER Experiment Name: At_Drought_Soil_Dry_P Parameter: Age (day) Value: 27
  misc_feature: MA Experiment 20001557 PARAMETER Experiment Name: At_Drought_Soil_Dry_P Parameter: Organism Value: A. thaliana
  misc_feature: MA Experiment 20001557 PARAMETER Experiment Name: At_Drought_Soil_Dry_P Parameter: Plant Line Value: WS
  misc_feature: MA Experiment 20001557 PARAMETER Experiment Name: At_Drought_Soil_Dry_P Parameter: Post Timepoint (hr) Value: 3
  misc_feature: MA Experiment 20001557 PARAMETER Experiment Name: At_Drought_Soil_Dry_P Parameter: Post-Treatment Value: Re-Water vs. No Drought
  misc_feature: MA Experiment 20001557 PARAMETER Experiment Name: At_Drought_Soil_Dry_P Parameter: Timepoint (day) Value: 13
  misc_feature: MA Experiment 20001557 PARAMETER Experiment Name: At_Drought_Soil_Dry_P Parameter: Treatment Value: Drought vs. No Drought
acatctcactgctcactactctcactgtaatcccttagatcttcttttcaaatttcaatggcgtccggtgatgttgagtatcggtgcttcgttggaggtctagcatgggccactgatgacagagctcttgagactgccttcgctcaatacggcgacgttattgattccaagatcattaacgatcgtgagactggaagatcaaggggattcggattcgtcaccttcaaggatgagaaagccatgaaggatgcgattgagggaatgaacggacaagatctcgatggccgtagcatcactgttaacgaggctcagtcacgaggaagcggtggcggcggaggccaccgtggaggtggtggcggtggataccgcagcggcggtggtggaggttactccggtggaggtggtagctacggaggtggcggcggtagacgcgagggtggaggaggatacagcggcggcggcggcggttactcctcaagaggtggtggtggcggaagctacggtggtggaagacgtgagggaggaggaggatacggtggtggtgaaggaggaggttacggaggaagcggtggtggtggaggatggtaattcctttaattaggtttgggattaccaatgaatgttctctctctcgcttgttatgcttctacttggttttgtgtgttctctattttgttctggttctgctttagatttgatgtaacagttcgtgattaggtattttggtatctggaaacgtaatgttaagtcacttgtcattctctaaataacaaatttcttcggagatattatctctgttgattgattctatc

SEQ ID NO: 76877 - protein, 176 aa, Arabidopsis thaliana
  peptide (1)..(176): Ceres Seq. ID no. 12371879
  misc_feature (10)..(81): Pfam Name: RNA recognition motif. (a.k.a. RRM, RBD, or RNP domain) Pfam Description: RNA recognition motif. (a.k.a. RRM, RBD, or RNP
  misc_feature (1)..(176): Homolog of NCBI NO: 15226605 NR Description: glycine-rich RNA binding protein AtGRP7; protein At2g21660.1, supported by cDNA: 13879., supported by cDNA: supported by cDNA: gi_16226371, supported by cDNA: gi_166836
  misc_feature (1)..(176): Homolog of NCBI NO: 21553354 NR Description: glycine-rich RNA binding protein 7 [Arabidopsis
  misc_feature (1)..(176): Homolog of NCBI NO: 30681492 NR Description: glycine-rich RNA-binding protein (AtGRP7)
  misc_feature (1)..(176): Homolog of NCBI NO: 1346181 NR Description: Glycine-rich RNA-binding protein GRP2A
  misc_feature (1)..(176): Homolog of NCBI NO: 1346180 NR Description: Glycine-rich RNA-binding protein GRP1A
  misc_feature (5)..(176): Homolog of NCBI NO: 15235002 NR Description: glycine-rich RNA-binding protein 8 (GRP8); id: At4g39260.1, supported by cDNA: gi_166838 [Arabidopsis
  misc_feature (1)..(176): Homolog of NCBI NO: 34851124 NR Description: putative glycine-rich RNA-binding protein [Prunus
  misc_feature (5)..(176): Homolog of NCBI NO: 544416 NR Description: Glycine-rich RNA-binding protein 10
  misc_feature (1)..(176): Homolog of NCBI NO: 544423 NR Description: Glycine-rich RNA-binding protein 2
  misc_feature (1)..(176): Homolog of NCBI NO: 10799202 NR Description: glycine-rich RNA-binding protein [Sorghum bicolor]
MASGDVEYRCFVGGLAWATDDRALETAFAQYGDVIDSKIINDRETGRSRGFGFVTFKDEKAMKDAIEGMNGQDLDGRSITVNEAQSRGSGGGGGHRGGGGGGYRSGGGGGYSGGGGSYGGGGGRREGGGGYSGGGGGYSSRGGGGGSYGGGRREGGGGYGGGEGGGYGGSGGGGGW

SEQ ID NO: 76878 - protein, 115 aa, Arabidopsis thaliana
  peptide (1)..(115): Ceres Seq. ID no. 12371880
  misc_feature (27)..(113): Pfam Name: Herpesvirus large structural phosphoprotein UL32 Pfam Description: Herpesvirus large structural phosphoprotein UL32
  misc_feature (1)..(115): Homolog of NCBI NO: 15226605 NR Description: glycine-rich RNA binding protein AtGRP7; protein At2g21660.1, supported by cDNA: 13879., supported by cDNA: supported by cDNA: gi_16226371, supported by cDNA: gi_166836
  misc_feature (1)..(115): Homolog of NCBI NO: 21553354 NR Description: glycine-rich RNA binding protein 7 [Arabidopsis
  misc_feature (1)..(115): Homolog of NCBI NO: 30681492 NR Description: glycine-rich RNA-binding protein (AtGRP7)
  misc_feature (1)..(115): Homolog of NCBI NO: 1346181 NR Description: Glycine-rich RNA-binding protein GRP2A
  misc_feature (1)..(115): Homolog of NCBI NO: 1346180 NR Description: Glycine-rich RNA-binding protein GRP1A
  misc_feature (1)..(115): Homolog of NCBI NO: 15235002 NR Description: glycine-rich RNA-binding protein 8 (GRP8); id: At4g39260.1, supported by cDNA: gi_166838 [Arabidopsis
  misc_feature (1)..(115): Homolog of NCBI NO: 34851124 NR Description: putative glycine-rich RNA-binding protein [Prunus
  misc_feature (1)..(115): Homolog of NCBI NO: 544416 NR Description: Glycine-rich RNA-binding protein 10
  misc_feature (1)..(115): Homolog of NCBI NO: 544423 NR Description: Glycine-rich RNA-binding protein 2
  misc_feature (1)..(115): Homolog of NCBI NO: 10799202 NR Description: glycine-rich RNA-binding protein [Sorghum bicolor]
MKDAIEGMNGQDLDGRSITVNEAQSRGSGGGGGHRGGGGGGYRSGGGGGYSGGGGSYGGGGGRREGGGGYSGGGGGYSSRGGGGGSYGGGRREGGGGYGGGEGGGYGGSGGGGGW

SEQ ID NO: 76879 - protein, 108 aa, Arabidopsis thaliana
  peptide (1)..(108): Ceres Seq. ID no. 12371881
  misc_feature (20)..(106): Pfam Name: Herpesvirus large structural phosphoprotein UL32 Pfam Description: Herpesvirus large structural phosphoprotein UL32
  misc_feature (1)..(108): Homolog of NCBI NO: 15226605 NR Description: glycine-rich RNA binding protein AtGRP7; protein At2g21660.1, supported by cDNA: 13879., supported by cDNA: supported by cDNA: gi_16226371, supported by cDNA: gi_166836
  misc_feature (1)..(108): Homolog of NCBI NO: 21553354 NR Description: glycine-rich RNA binding protein 7 [Arabidopsis
  misc_feature (1)..(108): Homolog of NCBI NO: 30681492 NR Description: glycine-rich RNA-binding protein (AtGRP7)
  misc_feature (1)..(108): Homolog of NCBI NO: 1346181 NR Description: Glycine-rich RNA-binding protein GRP2A
  misc_feature (1)..(108): Homolog of NCBI NO: 1346180 NR Description: Glycine-rich RNA-binding protein GRP1A
  misc_feature (1)..(108): Homolog of NCBI NO: 15235002 NR Description: glycine-rich RNA-binding protein 8 (GRP8); id: At4g39260.1, supported by cDNA: gi_166838 [Arabidopsis
  misc_feature (1)..(108): Homolog of NCBI NO: 34851124 NR Description: putative glycine-rich RNA-binding protein [Prunus
  misc_feature (1)..(108): Homolog of NCBI NO: 544416 NR Description: Glycine-rich RNA-binding protein 10
  misc_feature (1)..(108): Homolog of NCBI NO: 544423 NR Description: Glycine-rich RNA-binding protein 2
  misc_feature (1)..(108): Homolog of NCBI NO: 10799202 NR Description: glycine-rich RNA-binding protein [Sorghum bicolor]
MNGQDLDGRSITVNEAQSRGSGGGGGHRGGGGGGYRSGGGGGYSGGGGSYGGGGGRREGGGGYSGGGGGYSSRGGGGGSYGGGRREGGGGYGGGEGGGYGGSGGGGGW

SEQ ID NO: 76880 - DNA, 1038 bp, Arabidopsis thaliana
  misc_feature (1)..(1038): Ceres Seq. ID no. 12372031
  misc_feature: MA Experiment ID: 20000171 Result: Down-regulated in Transcription
  misc_feature: MA Experiment 20000171 PARAMETER Experiment Name: At_42deg_Heat_P Parameter: Age (day) Value: 14
  misc_feature: MA Experiment 20000171 PARAMETER Experiment Name: At_42deg_Heat_P Parameter: Organism Value: A. thaliana
  misc_feature: MA Experiment 20000171 PARAMETER Experiment Name: At_42deg_Heat_P Parameter: Plant Line Value: WS
  misc_feature: MA Experiment 20000171 PARAMETER Experiment Name: At_42deg_Heat_P Parameter: Temperature (deg C) Value: 42 vs. 22
  misc_feature: MA Experiment 20000171 PARAMETER Experiment Name: At_42deg_Heat_P Parameter: Timepoint (hr) Value: 1
  misc_feature: MA Experiment 20000171 PARAMETER Experiment Name: At_42deg_Heat_P Parameter: Tissue Value: Aerial
  misc_feature: MA Experiment ID: 20000173 Result: Down-regulated in Transcription
  misc_feature: MA Experiment 20000173 PARAMETER Experiment Name: At_42deg_Heat_P Parameter: Age (day) Value: 14
  misc_feature: MA Experiment 20000173 PARAMETER Experiment Name: At_42deg_Heat_P Parameter: Organism Value: A. thaliana
  misc_feature: MA Experiment 20000173 PARAMETER Experiment Name: At_42deg_Heat_P Parameter: Plant Line Value: WS
  misc_feature: MA Experiment 20000173 PARAMETER Experiment Name: At_42deg_Heat_P Parameter: Temperature (deg C) Value: 42 vs. 22
  misc_feature: MA Experiment 20000173 PARAMETER Experiment Name: At_42deg_Heat_P Parameter: Timepoint (hr) Value: 6
  misc_feature: MA Experiment 20000173 PARAMETER Experiment Name: At_42deg_Heat_P Parameter: Tissue Value: Aerial
  misc_feature: MA Experiment ID: 20000180 Result: Up-regulated in Transcription
  misc_feature: MA Experiment 20000180 PARAMETER Experiment Name: At_Germinating_Seeds_P Parameter: Age (hr) Value: 24 vs. 0
  misc_feature: MA Experiment 20000180 PARAMETER Experiment Name: At_Germinating_Seeds_P Parameter: Tissue Value: Germinating Seeds
  misc_feature: MA Experiment ID: 20000234 Result: Up-regulated in Transcription
  misc_feature: MA Experiment 20000234 PARAMETER Experiment Name: At_Siliques_P Parameter: Age (day) Value: 21
  misc_feature: MA Experiment 20000234 PARAMETER Experiment Name: At_Siliques_P Parameter: Organism Value: A. thaliana
  misc_feature: MA Experiment 20000234 PARAMETER Experiment Name: At_Siliques_P Parameter: Plant Line Value: WS
  misc_feature: MA Experiment 20000234 PARAMETER Experiment Name: At_Siliques_P Parameter: Tissue Value: Less Than 5mm Siliques vs. Whole Plant
  misc_feature: MA Experiment ID: 20000235 Result: Up-regulated in Transcription
  misc_feature: MA Experiment 20000235 PARAMETER Experiment Name: At_Siliques_P Parameter: Age (day) Value: 21
  misc_feature: MA Experiment 20000235 PARAMETER Experiment Name: At_Siliques_P Parameter: Organism Value: A. thaliana
  misc_feature: MA Experiment 20000235 PARAMETER Experiment Name: At_Siliques_P Parameter: Plant Line Value: WS
  misc_feature: MA Experiment 20000235 PARAMETER Experiment Name: At_Siliques_P Parameter: Tissue Value: 5-10mm Siliques vs. Whole Plant
  misc_feature: MA Experiment ID: 20000264 Result: Up-regulated in Transcription
  misc_feature: MA Experiment 20000264 PARAMETER Experiment Name: At_Open_Flower_P Parameter: Age (day) Value: 21
  misc_feature: MA Experiment 20000264 PARAMETER Experiment Name: At_Open_Flower_P Parameter: Plant Line Value: WS
  misc_feature: MA Experiment 20000264 PARAMETER Experiment Name: At_Open_Flower_P Parameter: Tissue Value: Open Flower vs. Whole Plant
  misc_feature: MA Experiment ID: 20000265 Result: Up-regulated in Transcription
  misc_feature: MA Experiment 20000265 PARAMETER Experiment Name: At_Open_Flower_P Parameter: Age (day) Value: 21
  misc_feature: MA Experiment 20000265 PARAMETER Experiment Name: At_Open_Flower_P Parameter: Plant Line Value: WS
  misc_feature: MA Experiment 20000265 PARAMETER Experiment Name: At_Open_Flower_P Parameter: Tissue Value: Closed Flower vs. Whole Plant
  misc_feature: MA Experiment ID: 20000286 Result: Up-regulated in Transcription
  misc_feature: MA Experiment 20000286 PARAMETER Experiment Name: At_Open_Flower_P Parameter: Age (day) Value: 21
  misc_feature: MA Experiment 20000286 PARAMETER Experiment Name: At_Open_Flower_P Parameter: Plant Line Value: WS
  misc_feature: MA Experiment 20000286 PARAMETER Experiment Name: At_Open_Flower_P Parameter: Tissue Value: Half Open vs. Whole Plant
  misc_feature: MA Experiment ID: 20000437 Result: Down-regulated in Transcription
  misc_feature: MA Experiment 20000437 PARAMETER Experiment Name: At_Drought_P Parameter: Age (day) Value: 8
  misc_feature: MA Experiment 20000437 PARAMETER Experiment Name: At_Drought_P Parameter: Organism Value: A. thaliana
  misc_feature: MA Experiment 20000437 PARAMETER Experiment Name: At_Drought_P Parameter: Plant Line Value: WS
  misc_feature: MA Experiment 20000437 PARAMETER Experiment Name: At_Drought_P Parameter: Timepoint (hr) Value: 24
  misc_feature: MA Experiment 20000437 PARAMETER Experiment Name: At_Drought_P Parameter: Tissue Value: Whole Plant
  misc_feature: MA Experiment 20000437 PARAMETER Experiment Name: At_Drought_P Parameter: Treatment Value: Drought vs. No Drought
  misc_feature: MA Experiment ID: 20000573 Result: Down-regulated in Transcription
  misc_feature: MA Experiment 20000573 PARAMETER Experiment Name: At_100uM_ABA_Mutants__P Parameter: Organism Value: A. thaliana
  misc_feature: MA Experiment 20000573 PARAMETER Experiment Name: At_100uM_ABA_Mutants__P Parameter: Plant Line Value: CS22 vs. Ler wt
  misc_feature: MA Experiment 20000573 PARAMETER Experiment Name: At_100uM_ABA_Mutants__P Parameter: Timepoint (hr) Value: N/A
  misc_feature: MA Experiment 20000573 PARAMETER Experiment Name: At_100uM_ABA_Mutants__P Parameter: Tissue Value: Whole Plant
  misc_feature: MA Experiment 20000573 PARAMETER Experiment Name: At_100uM_ABA_Mutants__P Parameter: Treatment Value: None
  misc_feature: MA Experiment ID: 20000574 Result: Down-regulated in Transcription
  misc_feature: MA Experiment 20000574 PARAMETER Experiment Name: At_100uM_ABA_Mutants__P Parameter: Organism Value: A. thaliana
  misc_feature: MA Experiment 20000574 PARAMETER Experiment Name: At_100uM_ABA_Mutants__P Parameter: Plant Line Value: CS23 vs. Ler wt
  misc_feature: MA Experiment 20000574 PARAMETER Experiment Name: At_100uM_ABA_Mutants__P Parameter: Timepoint (hr) Value: N/A
  misc_feature: MA Experiment 20000574 PARAMETER Experiment Name: At_100uM_ABA_Mutants__P Parameter: Tissue Value: Whole Plant
  misc_feature: MA Experiment 20000574 PARAMETER Experiment Name: At_100uM_ABA_Mutants__P Parameter: Treatment Value: None
  misc_feature: MA Experiment ID: 20000794 Result: Down-regulated in Transcription
  misc_feature: MA Experiment 20000794 PARAMETER Experiment Name: At_Petals_P Parameter: Age (day) Value: 23-25 days
  misc_feature: MA Experiment 20000794 PARAMETER Experiment Name: At_Petals_P Parameter: Plant Line Value: WS
  misc_feature: MA Experiment 20000794 PARAMETER Experiment Name: At_Petals_P Parameter: Tissue Value: Petals vs. Whole plant
  misc_feature: MA Experiment ID: 20001248 Result: Down-regulated in Transcription
  misc_feature: MA Experiment 20001248 PARAMETER Experiment Name: At_Far-red-induction_P Parameter: Age (day) Value: 7
  misc_feature: MA Experiment 20001248 PARAMETER Experiment Name: At_Far-red-induction_P Parameter: Light Value: Far-red vs. White
  misc_feature: MA Experiment 20001248 PARAMETER Experiment Name: At_Far-red-induction_P Parameter: Organism Value: A. thaliana
  misc_feature: MA Experiment 20001248 PARAMETER Experiment Name: At_Far-red-induction_P Parameter: Plant Line Value: Columbia
  misc_feature: MA Experiment 20001248 PARAMETER Experiment Name: At_Far-red-induction_P Parameter: Timepoint (hr) Value: 4
  misc_feature: MA Experiment 20001248 PARAMETER Experiment Name: At_Far-red-induction_P Parameter: Tissue Value: Whole Plant
  misc_feature: MA Experiment ID: 20001450 Result: Down-regulated in Transcription
  misc_feature: MA Experiment 20001450 PARAMETER Experiment Name: At_Far-red-induction_P Parameter: Age (day) Value: 7
  misc_feature: MA Experiment 20001450 PARAMETER Experiment Name: At_Far-red-induction_P Parameter: Light Value: Far-red vs. White
  misc_feature: MA Experiment 20001450 PARAMETER Experiment Name: At_Far-red-induction_P Parameter: Organism Value: A. thaliana
  misc_feature: MA Experiment 20001450 PARAMETER Experiment Name: At_Far-red-induction_P Parameter: Plant Line Value: Columbia
  misc_feature: MA Experiment 20001450 PARAMETER Experiment Name: At_Far-red-induction_P Parameter: Timepoint (hr) Value: 8
  misc_feature: MA Experiment 20001450 PARAMETER Experiment Name: At_Far-red-induction_P Parameter: Tissue Value: Whole Plant
  misc_feature: MA Experiment ID: 20001451 Result: Down-regulated in Transcription
  misc_feature: MA Experiment 20001451 PARAMETER Experiment Name: At_Far-red-induction_P Parameter: Age (day) Value: 7
  misc_feature: MA Experiment 20001451 PARAMETER Experiment Name: At_Far-red-induction_P Parameter: Light Value: Far-red vs. White
  misc_feature: MA Experiment 20001451 PARAMETER Experiment Name: At_Far-red-induction_P Parameter: Organism Value: A. thaliana
  misc_feature: MA Experiment 20001451 PARAMETER Experiment Name: At_Far-red-induction_P Parameter: Plant Line Value: Columbia
  misc_feature: MA Experiment 20001451 PARAMETER Experiment Name: At_Far-red-induction_P Parameter: Timepoint (hr) Value: 24
  misc_feature: MA Experiment 20001451 PARAMETER Experiment Name: At_Far-red-induction_P Parameter: Tissue Value: Whole Plant
  misc_feature: MA Experiment ID: 20001906 Result: Down-regulated in Transcription
  misc_feature: MA Experiment 20001906 PARAMETER Experiment Name: At_Drought_Reproduction_P Parameter: Age (day) Value: 35
  misc_feature: MA Experiment 20001906 PARAMETER Experiment Name: At_Drought_Reproduction_P Parameter: Organism Value: A. thaliana
  misc_feature: MA Experiment 20001906 PARAMETER Experiment Name: At_Drought_Reproduction_P Parameter: Plant Line Value: WS
  misc_feature: MA Experiment 20001906 PARAMETER Experiment Name: At_Drought_Reproduction_P Parameter: Timepoint (day) Value: 5
  misc_feature: MA Experiment 20001906 PARAMETER Experiment Name: At_Drought_Reproduction_P Parameter: Tissue Value: Siliques
  misc_feature: MA Experiment 20001906 PARAMETER Experiment Name: At_Drought_Reproduction_P Parameter: Treatment Value: Drought vs. No Drought
  misc_feature: MA Experiment ID: 20001911 Result: Down-regulated in Transcription
  misc_feature: MA Experiment 20001911 PARAMETER Experiment Name: At_Drought_Reproduction_P Parameter: Age (day) Value: 40
  misc_feature: MA Experiment 20001911 PARAMETER Experiment Name: At_Drought_Reproduction_P Parameter: Organism Value: A. thaliana
  misc_feature: MA Experiment 20001911 PARAMETER Experiment Name: At_Drought_Reproduction_P Parameter: Plant Line Value: WS
  misc_feature: MA Experiment 20001911 PARAMETER Experiment Name: At_Drought_Reproduction_P Parameter: Timepoint (day) Value: 10
  misc_feature: MA Experiment 20001911 PARAMETER Experiment Name: At_Drought_Reproduction_P Parameter: Tissue Value: Flowers
  misc_feature: MA Experiment 20001911 PARAMETER Experiment Name: At_Drought_Reproduction_P Parameter: Treatment Value: Drought vs. No Drought
atgggcagatcgccatgttgtgataaggccgggttgaagaaagggccttggactccagaagaggatcagaaacttttggcttatattgaagaacatggccatggaagctggcgttctttgcctgagaaagccggtctccaaaggtgtggaaagagttgcagactcagatggactaactacctaagacctgacatcaagagaggcaaattcactgtacaagaagaacaaaccatcattcaactccacgctctcctcggaaacaggtggtcagcgattgcaactcatttaccaaagaggacagacaacgagatcaagaactactggaacacacacttgaagaaacgtctgatcaaaatggggatagatccagtgactcacaagcacaaaaacgagactctttcgtcttccacaggacaatcaaagaacgcagccacgcttagtcatatggctcaatgggagagtgcaagactcgaagctgaagcaaggctagctagagaatcaaagcttctccatttacagcattaccaaaacaataacaaccttaacaaatcagcagctcctcaacaacattgcttcactcaaaaaacatcaacaaactggactaaaccaaaccaaggaaacggagaccaacagcttgaatctccgacatcgacggtgacattctctgagaatcttctgatgcctttaggaatccctacggatagcagcagaaatagaaacaataacaacaatgagtcctcggcgatgattgaattggccgtatcttcgtcaacctcctccgatgtgagtctggtcaaagaacatgaacacgactggattaggcagatcaactgtggtagtggaggaataggagaaggattcacgagtctattgatcggtgattcggtcggccggggtttacccaccgggaaaaacgaagcgacggcgggcgtggggaatgagagtgagtataactactatgaggataacaagaattactggaatagcattctcaacttggttgattcttcaccgtccgattccgcgacgatgttctga

SEQ ID NO: 76881 - protein, 345 aa, Arabidopsis thaliana
  peptide (1)..(345): Ceres Seq. ID no. 12372032
  misc_feature (14)..(61): Pfam Name: Myb-like DNA-binding domain Pfam Description: Myb-like DNA-binding domain
  misc_feature (1)..(345): Homolog of NCBI NO: 15232045 NR Description: myb family transcription factor; protein id:
  misc_feature (1)..(169): Homolog of NCBI NO: 28628947 NR Description: MYB1 [Dendrobium sp. XMW-2002-1]
  misc_feature (200)..(341): Homolog of NCBI NO: 28628947 NR Description: MYB1 [Dendrobium sp. XMW-2002-1]
  misc_feature (1)..(223): Homolog of NCBI NO: 15242272 NR Description: myb family transcription factor; protein id: supported by cDNA: gi_13877708 [Arabidopsis thaliana]
  misc_feature (1)..(336): Homolog of NCBI NO: 27125807 NR Description: MYB27 protein [Oryza sativa (japonica
  misc_feature (1)..(343): Homolog of NCBI NO: 38344966 NR Description: OSJNBa0072F16.11 [Oryza sativa (japonica
  misc_feature (1)..(276): Homolog of NCBI NO: 13346188 NR Description: GHMYB25 [Gossypium hirsutum]
  misc_feature (1)..(341): Homolog of NCBI NO: 282964 NR Description: myb-related protein 1 - garden petunia
  misc_feature (1)..(336): Homolog of NCBI NO: 4886264 NR Description: Myb-related transcription factor mixta-like 1
  misc_feature (1)..(181): Homolog of NCBI NO: 629737 NR Description: myb-related protein MIXTA - garden snapdragon
MGRSPCCDKAGLKKGPWTPEEDQKLLAYIEEHGHGSWRSLPEKAGLQRCGKSCRLRWTNYLRPDIKRGKFTVQEEQTIIQLHALLGNRWSAIATHLPKRTDNEIKNYWNTHLKKRLIKMGIDPVTHKHKNETLSSSTGQSKNAATLSHMAQWESARLEAEARLARESKLLHLQHYQNNNNLNKSAAPQQHCFTQKTSTNWTKPNQGNGDQQLESPTSTVTFSENLLMPLGIPTDSSRNRNNNNNESSAMIELAVSSSTSSDVSLVKEHEHDWIRQINCGSGGIGEGFTSLLIGDSVGRGLPTGKNEATAGVGNESEYNYYEDNKNYWNSILNLVDSSPSDSATMF

SEQ ID NO: 76882 - protein, 227 aa, Arabidopsis thaliana
  peptide (1)..(227): Ceres Seq. ID no. 12372033
  misc_feature (1)..(227): Homolog of NCBI NO: 15232045 NR Description: myb family transcription factor; protein id:
  misc_feature (1)..(51): Homolog of NCBI NO: 28628947 NR Description: MYB1 [Dendrobium sp. XMW-2002-1]
  misc_feature (82)..(223): Homolog of NCBI NO: 28628947 NR Description: MYB1 [Dendrobium sp. XMW-2002-1]
  misc_feature (1)..(105): Homolog of NCBI NO: 15242272 NR Description: myb family transcription factor; protein id: supported by cDNA: gi_13877708 [Arabidopsis thaliana]
  misc_feature (1)..(218): Homolog of NCBI NO: 27125807 NR Description: MYB27 protein [Oryza sativa (japonica
  misc_feature (1)..(225): Homolog of NCBI NO: 38344966 NR Description: OSJNBa0072F16.11 [Oryza sativa (japonica
  misc_feature (1)..(158): Homolog of NCBI NO: 13346188 NR Description: GHMYB25 [Gossypium hirsutum]
  misc_feature (1)..(223): Homolog of NCBI NO: 282964 NR Description: myb-related protein 1 - garden petunia
  misc_feature (1)..(218): Homolog of NCBI NO: 4886264 NR Description: Myb-related transcription factor mixta-like 1
  misc_feature (1)..(63): Homolog of NCBI NO: 629737 NR Description: myb-related protein MIXTA - garden snapdragon
MGIDPVTHKHKNETLSSSTGQSKNAATLSHMAQWESARLEAEARLARESKLLHLQHYQNNNNLNKSAAPQQHCFTQKTSTNWTKPNQGNGDQQLESPTSTVTFSENLLMPLGIPTDSSRNRNNNNNESSAMIELAVSSSTSSDVSLVKEHEHDWIRQINCGSGGIGEGFTSLLIGDSVGRGLPTGKNEATAGVGNESEYNYYEDNKNYWNSILNLVDSSPSDSATMF

SEQ ID NO: 76883 - protein, 197 aa, Arabidopsis thaliana
  peptide (1)..(197): Ceres Seq. ID no. 12372034
  misc_feature (1)..(197): Homolog of NCBI NO: 15232045 NR Description: myb family transcription factor; protein id:
  misc_feature (1)..(21): Homolog of NCBI NO: 28628947 NR Description: MYB1 [Dendrobium sp. XMW-2002-1]
  misc_feature (52)..(193): Homolog of NCBI NO: 28628947 NR Description: MYB1 [Dendrobium sp. XMW-2002-1]
  misc_feature (1)..(75): Homolog of NCBI NO: 15242272 NR Description: myb family transcription factor; protein id: supported by cDNA: gi_13877708 [Arabidopsis thaliana]
  misc_feature (1)..(188): Homolog of NCBI NO: 27125807 NR Description: MYB27 protein [Oryza sativa (japonica
  misc_feature (1)..(195): Homolog of NCBI NO: 38344966 NR Description: OSJNBa0072F16.11 [Oryza sativa (japonica
  misc_feature (1)..(128): Homolog of NCBI NO: 13346188 NR Description: GHMYB25 [Gossypium hirsutum]
  misc_feature (1)..(193): Homolog of NCBI NO: 282964 NR Description: myb-related protein 1 - garden petunia
  misc_feature (1)..(188): Homolog of NCBI NO: 4886264 NR Description: Myb-related transcription factor mixta-like 1
  misc_feature (1)..(33): Homolog of NCBI NO: 629737 NR Description: myb-related protein MIXTA - garden snapdragon
MAQWESARLEAEARLARESKLLHLQHYQNNNNLNKSAAPQQHCFTQKTSTNWTKPNQGNGDQQLESPTSTVTFSENLLMPLGIPTDSSRNRNNNNNESSAMIELAVSSSTSSDVSLVKEHEHDWIRQINCGSGGIGEGFTSLLIGDSVGRGLPTGKNEATAGVGNESEYNYYEDNKNYWNSILNLVDSSPSDSATMF

SEQ ID NO: 76884 - DNA, 1664 bp, Arabidopsis thaliana
  misc_feature (1)..(1664): Ceres Seq. ID no. 12377367
  misc_feature: MA Experiment ID: 20000166 Result: Down-regulated in Transcription
  misc_feature: MA Experiment 20000166 PARAMETER Experiment Name: At_100uM_ABA_P Parameter: Age (day) Value: 14
  misc_feature: MA Experiment 20000166 PARAMETER Experiment Name: At_100uM_ABA_P Parameter: Organism Value: A. thaliana
  misc_feature: MA Experiment 20000166 PARAMETER Experiment Name: At_100uM_ABA_P Parameter: Plant Line Value: WS
  misc_feature: MA Experiment 20000166 PARAMETER Experiment Name: At_100uM_ABA_P Parameter: Timepoint (hr) Value: 1
  misc_feature: MA Experiment 20000166 PARAMETER Experiment Name: At_100uM_ABA_P Parameter: Tissue Value: Aerial
  misc_feature: MA Experiment 20000166 PARAMETER Experiment Name: At_100uM_ABA_P Parameter: Treatment Value: 100uM ABA vs. No Treatment
  misc_feature: MA Experiment ID: 20000169 Result: Down-regulated in Transcription
  misc_feature: MA Experiment 20000169 PARAMETER Experiment Name: At_100uM_ABA_P Parameter: Age (day) Value: 14
  misc_feature: MA Experiment 20000169 PARAMETER Experiment Name: At_100uM_ABA_P Parameter: Organism Value: A. thaliana
  misc_feature: MA Experiment 20000169 PARAMETER Experiment Name: At_100uM_ABA_P Parameter: Plant Line Value: WS
  misc_feature: MA Experiment 20000169 PARAMETER Experiment Name: At_100uM_ABA_P Parameter: Timepoint (hr) Value: 6
  misc_feature: MA Experiment 20000169 PARAMETER Experiment Name: At_100uM_ABA_P Parameter: Tissue Value: Aerial
  misc_feature: MA Experiment 20000169 PARAMETER Experiment Name: At_100uM_ABA_P Parameter: Treatment Value: 100uM ABA vs. No Treatment
  misc_feature: MA Experiment ID: 20000171 Result: Down-regulated in Transcription
  misc_feature: MA Experiment 20000171 PARAMETER Experiment Name: At_42deg_Heat_P Parameter: Age (day) Value: 14
  misc_feature: MA Experiment 20000171 PARAMETER Experiment Name: At_42deg_Heat_P Parameter: Organism Value: A. thaliana
  misc_feature: MA Experiment 20000171 PARAMETER Experiment Name: At_42deg_Heat_P Parameter: Plant Line Value: WS
  misc_feature: MA Experiment 20000171 PARAMETER Experiment Name: At_42deg_Heat_P Parameter: Temperature (deg C) Value: 42 vs. 22
  misc_feature: MA Experiment 20000171 PARAMETER Experiment Name: At_42deg_Heat_P Parameter: Timepoint (hr) Value: 1
  misc_feature: MA Experiment 20000171 PARAMETER Experiment Name: At_42deg_Heat_P Parameter: Tissue Value: Aerial
  misc_feature: MA Experiment ID: 20000173 Result: Down-regulated in Transcription
  misc_feature: MA Experiment 20000173 PARAMETER Experiment Name: At_42deg_Heat_P Parameter: Age (day) Value: 14
  misc_feature: MA Experiment 20000173 PARAMETER Experiment Name: At_42deg_Heat_P Parameter: Organism Value: A. thaliana
  misc_feature: MA Experiment 20000173 PARAMETER Experiment Name: At_42deg_Heat_P Parameter: Plant Line Value: WS
  misc_feature: MA Experiment 20000173 PARAMETER Experiment Name: At_42deg_Heat_P Parameter: Temperature (deg C) Value: 42 vs. 22
  misc_feature: MA Experiment 20000173 PARAMETER Experiment Name: At_42deg_Heat_P Parameter: Timepoint (hr) Value: 6
  misc_feature: MA Experiment 20000173 PARAMETER Experiment Name: At_42deg_Heat_P Parameter: Tissue Value: Aerial
  misc_feature: MA Experiment ID: 20000180 Result: Up-regulated in Transcription
  misc_feature: MA Experiment 20000180 PARAMETER Experiment Name: At_Germinating_Seeds_P Parameter: Age (hr) Value: 24 vs. 0
  misc_feature: MA Experiment 20000180 PARAMETER Experiment Name: At_Germinating_Seeds_P Parameter: Tissue Value: Germinating Seeds
  misc_feature: MA Experiment ID: 20000227 Result: Down-regulated in Transcription
  misc_feature: MA Experiment 20000227 PARAMETER Experiment Name: At_Root-Tips-vs-Tops_P Parameter: Tissue Value: Root Tips vs. Root Tops
  misc_feature: MA Experiment ID: 20000234 Result: Down-regulated in Transcription
  misc_feature: MA Experiment 20000234 PARAMETER Experiment Name: At_Siliques_P Parameter: Age (day) Value: 21
  misc_feature: MA Experiment 20000234 PARAMETER Experiment Name: At_Siliques_P Parameter: Organism Value: A. thaliana
  misc_feature: MA Experiment 20000234 PARAMETER Experiment Name: At_Siliques_P Parameter: Plant Line Value: WS
  misc_feature: MA Experiment 20000234 PARAMETER Experiment Name: At_Siliques_P Parameter: Tissue Value: Less Than 5mm Siliques vs. Whole Plant
  misc_feature: MA Experiment ID: 20000264 Result: Down-regulated in Transcription
  misc_feature: MA Experiment 20000264 PARAMETER Experiment Name: At_Open_Flower_P Parameter: Age (day) Value: 21
  misc_feature: MA Experiment 20000264 PARAMETER Experiment Name: At_Open_Flower_P Parameter: Plant Line Value: WS
  misc_feature: MA Experiment 20000264 PARAMETER Experiment Name: At_Open_Flower_P Parameter: Tissue Value: Open Flower vs. Whole Plant
  misc_feature: MA Experiment ID: 20000265 Result: Down-regulated in Transcription
  misc_feature: MA Experiment 20000265 PARAMETER Experiment Name: At_Open_Flower_P Parameter: Age (day) Value: 21
  misc_feature: MA Experiment 20000265 PARAMETER Experiment Name: At_Open_Flower_P Parameter: Plant Line Value: WS
  misc_feature: MA Experiment 20000265 PARAMETER Experiment Name: At_Open_Flower_P Parameter: Tissue Value: Closed Flower vs. Whole Plant
  misc_feature: MA Experiment ID: 20000286 Result: Down-regulated in Transcription
  misc_feature: MA Experiment 20000286 PARAMETER Experiment Name: At_Open_Flower_P Parameter: Age (day) Value: 21
  misc_feature: MA Experiment 20000286 PARAMETER Experiment Name: At_Open_Flower_P Parameter: Plant Line Value: WS
  misc_feature: MA Experiment 20000286 PARAMETER Experiment Name: At_Open_Flower_P Parameter: Tissue Value: Half Open vs. Whole Plant
  misc_feature: MA Experiment ID: 20000436 Result: Down-regulated in Transcription
  misc_feature: MA Experiment 20000436 PARAMETER Experiment Name: At_Drought_P Parameter: Age (day) Value: 7
  misc_feature: MA Experiment 20000436 PARAMETER Experiment Name: At_Drought_P Parameter: Organism Value: A. thaliana
  misc_feature: MA Experiment 20000436 PARAMETER Experiment Name: At_Drought_P Parameter: Plant Line Value: WS
  misc_feature: MA Experiment 20000436 PARAMETER Experiment Name: At_Drought_P Parameter: Timepoint (hr) Value: 12
  misc_feature: MA Experiment 20000436 PARAMETER Experiment Name: At_Drought_P Parameter: Tissue Value: Whole Plant
  misc_feature: MA Experiment 20000436 PARAMETER Experiment Name: At_Drought_P Parameter: Treatment Value: Drought vs. No Drought
  misc_feature: MA Experiment ID: 20000437 Result: Down-regulated in Transcription
  misc_feature: MA Experiment 20000437 PARAMETER Experiment Name: At_Drought_P Parameter: Age (day) Value: 8
  misc_feature: MA Experiment 20000437 PARAMETER Experiment Name: At_Drought_P Parameter: Organism Value: A. thaliana
  misc_feature: MA Experiment 20000437 PARAMETER Experiment Name: At_Drought_P Parameter: Plant Line Value: WS
  misc_feature: MA Experiment 20000437 PARAMETER Experiment Name: At_Drought_P Parameter: Timepoint (hr) Value: 24
  misc_feature: MA Experiment 20000437 PARAMETER Experiment Name: At_Drought_P Parameter: Tissue Value: Whole Plant
  misc_feature: MA Experiment 20000437 PARAMETER Experiment Name: At_Drought_P Parameter: Treatment Value: Drought vs. No Drought
  misc_feature: MA Experiment ID: 20000441 Result: Up-regulated in Transcription
  misc_feature: MA Experiment 20000441 PARAMETER Experiment Name: At_1uM_BR-BRZ__P Parameter: Tissue Value: Shoot Apices
  misc_feature: MA Experiment 20000441 PARAMETER Experiment Name: At_1uM_BR-BRZ__P Parameter: Treatment Value: 1uM BR vs. No Treatment
  misc_feature: MA Experiment ID: 20000453 Result: Down-regulated in Transcription
  misc_feature: MA Experiment 20000453 PARAMETER Experiment Name: At_100uM_ABA_P Parameter: Age (day) Value: 15
  misc_feature: MA Experiment 20000453 PARAMETER Experiment Name: At_100uM_ABA_P Parameter: Organism Value: A. thaliana
  misc_feature: MA Experiment 20000453 PARAMETER Experiment Name: At_100uM_ABA_P Parameter: Plant Line Value: WS
  misc_feature: MA Experiment 20000453 PARAMETER Experiment Name: At_100uM_ABA_P Parameter: Timepoint (hr) Value: 24
  misc_feature: MA Experiment 20000453 PARAMETER Experiment Name: At_100uM_ABA_P Parameter: Tissue Value: Aerial
  misc_feature: MA Experiment 20000453 PARAMETER Experiment Name: At_100uM_ABA_P Parameter: Treatment Value: 100uM ABA vs. No Treatment
  misc_feature: MA Experiment ID: 20000455 Result: Down-regulated in Transcription
  misc_feature: MA Experiment 20000455 PARAMETER Experiment Name: At_100uM_ABA_P Parameter: Age (day) Value: 16
  misc_feature: MA Experiment 20000455 PARAMETER Experiment Name: At_100uM_ABA_P Parameter: Organism Value: A. thaliana
  misc_feature: MA Experiment 20000455 PARAMETER Experiment Name: At_100uM_ABA_P Parameter: Plant Line Value: WS
  misc_feature: MA Experiment 20000455 PARAMETER Experiment Name: At_100uM_ABA_P Parameter: Timepoint (hr) Value: 48
  misc_feature: MA Experiment 20000455 PARAMETER Experiment Name: At_100uM_ABA_P Parameter: Tissue Value: Aerial
  misc_feature: MA Experiment 20000455 PARAMETER Experiment Name: At_100uM_ABA_P Parameter: Treatment Value: 100uM ABA vs. No Treatment
  misc_feature: MA Experiment ID: 20000575 Result: Down-regulated in Transcription
  misc_feature: MA Experiment 20000575 PARAMETER Experiment Name: At_100uM_ABA_Mutants__P Parameter: Organism Value: A. thaliana
  misc_feature: MA Experiment 20000575 PARAMETER Experiment Name: At_100uM_ABA_Mutants__P Parameter: Plant Line Value: CS22
  misc_feature: MA Experiment 20000575 PARAMETER Experiment Name: At_100uM_ABA_Mutants__P Parameter: Timepoint (hr) Value: 6
  misc_feature: MA Experiment 20000575 PARAMETER Experiment Name: At_100uM_ABA_Mutants__P Parameter: Tissue Value: Whole Plant
  misc_feature: MA Experiment 20000575 PARAMETER Experiment Name: At_100uM_ABA_Mutants__P Parameter: Treatment Value: 1uM ABA vs. No Treatment
  misc_feature: MA Experiment ID: 20000576 Result: Down-regulated in Transcription
  misc_feature: MA Experiment 20000576 PARAMETER Experiment Name: At_100uM_ABA_Mutants__P Parameter: Organism Value: A. thaliana
  misc_feature: MA Experiment 20000576 PARAMETER Experiment Name: At_100uM_ABA_Mutants__P Parameter: Plant Line Value: CS23
  misc_feature: MA Experiment 20000576 PARAMETER Experiment Name: At_100uM_ABA_Mutants__P Parameter: Timepoint (hr) Value: 6
  misc_feature: MA Experiment 20000576 PARAMETER Experiment Name: At_100uM_ABA_Mutants__P Parameter: Tissue Value: Whole Plant
  misc_feature: MA Experiment 20000576 PARAMETER Experiment Name: At_100uM_ABA_Mutants__P Parameter: Treatment Value: 1uM ABA vs. No Treatment
  misc_feature: MA Experiment ID: 20000794 Result: Down-regulated in Transcription
  misc_feature: MA Experiment 20000794 PARAMETER Experiment Name: At_Petals_P Parameter: Age (day) Value: 23-25 days
  misc_feature: MA Experiment 20000794 PARAMETER Experiment Name: At_Petals_P Parameter: Plant Line Value: WS
  misc_feature: MA Experiment 20000794 PARAMETER Experiment Name: At_Petals_P Parameter: Tissue Value: Petals vs. Whole plant
  misc_feature: MA Experiment ID: 20001248 Result: Down-regulated in Transcription
  misc_feature: MA Experiment 20001248 PARAMETER Experiment Name: At_Far-red-induction_P Parameter: Age (day) Value: 7
  misc_feature: MA Experiment 20001248 PARAMETER Experiment Name: At_Far-red-induction_P Parameter: Light Value: Far-red vs. White
  misc_feature: MA Experiment 20001248 PARAMETER Experiment Name: At_Far-red-induction_P Parameter: Organism Value: A. thaliana
  misc_feature: MA Experiment 20001248 PARAMETER Experiment Name: At_Far-red-induction_P Parameter: Plant Line Value: Columbia
  misc_feature: MA Experiment 20001248 PARAMETER Experiment Name: At_Far-red-induction_P Parameter: Timepoint (hr) Value: 4
  misc_feature: MA Experiment 20001248 PARAMETER Experiment Name: At_Far-red-induction_P Parameter: Tissue Value: Whole Plant
  misc_feature: MA Experiment ID: 20001450 Result: Down-regulated in Transcription
  misc_feature: MA Experiment 20001450 PARAMETER Experiment Name: At_Far-red-induction_P Parameter: Age (day) Value: 7
  misc_feature: MA Experiment 20001450 PARAMETER Experiment Name: At_Far-red-induction_P Parameter: Light Value: Far-red vs. White
  misc_feature: MA Experiment 20001450 PARAMETER Experiment Name: At_Far-red-induction_P Parameter: Organism Value: A. thaliana
  misc_feature: MA Experiment 20001450 PARAMETER Experiment Name: At_Far-red-induction_P Parameter: Plant Line Value: Columbia
  misc_feature: MA Experiment 20001450 PARAMETER Experiment Name: At_Far-red-induction_P Parameter: Timepoint (hr) Value: 8
  misc_feature: MA Experiment 20001450 PARAMETER Experiment Name: At_Far-red-induction_P Parameter: Tissue Value: Whole Plant
  misc_feature: MA Experiment ID: 20001554 Result: Down-regulated in Transcription
  misc_feature: MA Experiment 20001554 PARAMETER Experiment Name: At_Drought_Soil_Dry_P Parameter: Age (day) Value: 21
  misc_feature: MA Experiment 20001554 PARAMETER Experiment Name: At_Drought_Soil_Dry_P Parameter: Organism Value: A. thaliana
  misc_feature: MA Experiment 20001554 PARAMETER Experiment Name: At_Drought_Soil_Dry_P Parameter: Plant Line Value: WS
  misc_feature: MA Experiment 20001554 PARAMETER Experiment Name: At_Drought_Soil_Dry_P Parameter: Post Timepoint (hr) Value: None
  misc_feature: MA Experiment 20001554 PARAMETER Experiment Name: At_Drought_Soil_Dry_P Parameter: Post-Treatment Value: None
  misc_feature: MA Experiment 20001554 PARAMETER Experiment Name: At_Drought_Soil_Dry_P Parameter: Timepoint (day) Value: 7
  misc_feature: MA Experiment 20001554 PARAMETER Experiment Name: At_Drought_Soil_Dry_P Parameter: Treatment Value: Drought vs. No Drought
  misc_feature: MA Experiment ID: 20001555 Result: Down-regulated in Transcription
  misc_feature: MA Experiment 20001555 PARAMETER Experiment Name: At_Drought_Soil_Dry_P Parameter: Age (day) Value: 24
  misc_feature: MA Experiment 20001555 PARAMETER Experiment Name: At_Drought_Soil_Dry_P Parameter: Organism Value: A. thaliana
  misc_feature: MA Experiment 20001555 PARAMETER Experiment Name: At_Drought_Soil_Dry_P Parameter: Plant Line Value: WS
  misc_feature: MA Experiment 20001555 PARAMETER Experiment Name: At_Drought_Soil_Dry_P Parameter: Post Timepoint (hr) Value: None
  misc_feature: MA Experiment 20001555 PARAMETER Experiment Name: At_Drought_Soil_Dry_P Parameter: Post-Treatment Value: None
  misc_feature: MA Experiment 20001555 PARAMETER Experiment Name: At_Drought_Soil_Dry_P Parameter: Timepoint (day) Value: 10
  misc_feature: MA Experiment 20001555 PARAMETER Experiment Name: At_Drought_Soil_Dry_P Parameter: Treatment Value: Drought vs. No Drought
  misc_feature: MA Experiment ID: 20001556 Result: Down-regulated in Transcription
  misc_feature: MA Experiment 20001556 PARAMETER Experiment Name: At_Drought_Soil_Dry_P Parameter: Age (day) Value: 26
  misc_feature: MA Experiment 20001556 PARAMETER Experiment Name: At_Drought_Soil_Dry_P Parameter: Organism Value: A. thaliana
  misc_feature: MA Experiment 20001556 PARAMETER Experiment Name: At_Drought_Soil_Dry_P Parameter: Plant Line Value: WS
  misc_feature: MA Experiment 20001556 PARAMETER Experiment Name: At_Drought_Soil_Dry_P Parameter: Post Timepoint (hr) Value: None
  misc_feature: MA Experiment 20001556 PARAMETER Experiment Name: At_Drought_Soil_Dry_P Parameter: Post-Treatment Value: None
  misc_feature: MA Experiment 20001556 PARAMETER Experiment Name: At_Drought_Soil_Dry_P Parameter: Timepoint (day) Value: 12
  misc_feature: MA Experiment 20001556 PARAMETER Experiment Name: At_Drought_Soil_Dry_P Parameter: Treatment Value: Drought vs. No Drought
  misc_feature: MA Experiment ID: 20001559 Result: Down-regulated in Transcription
  misc_feature: MA Experiment 20001559 PARAMETER Experiment Name: At_Drought_Soil_Dry_P Parameter: Age (day) Value: 28
  misc_feature: MA Experiment 20001559 PARAMETER Experiment Name: At_Drought_Soil_Dry_P Parameter: Organism Value: A. thaliana
  misc_feature: MA Experiment 20001559 PARAMETER Experiment Name: At_Drought_Soil_Dry_P Parameter: Plant Line Value: WS
  misc_feature: MA Experiment 20001559 PARAMETER Experiment Name: At_Drought_Soil_Dry_P Parameter: Post Timepoint (hr) Value: 29
  misc_feature: MA Experiment 20001559 PARAMETER Experiment Name: At_Drought_Soil_Dry_P Parameter: Post-Treatment Value: Re-Water vs. No Drought
  misc_feature: MA Experiment 20001559 PARAMETER Experiment Name: At_Drought_Soil_Dry_P Parameter: Timepoint (day) Value: 14
  misc_feature: MA Experiment 20001559 PARAMETER Experiment Name: At_Drought_Soil_Dry_P Parameter: Treatment Value: Drought vs. No Drought
  misc_feature: MA Experiment ID: 20001560 Result: Down-regulated in Transcription
  misc_feature: MA Experiment 20001560 PARAMETER Experiment Name: At_Drought_Soil_Dry_P Parameter: Age (day) Value: 28
  misc_feature: MA Experiment 20001560 PARAMETER Experiment Name: At_Drought_Soil_Dry_P Parameter: Organism Value: A. thaliana
  misc_feature: MA Experiment 20001560 PARAMETER Experiment Name: At_Drought_Soil_Dry_P Parameter: Plant Line Value: WS
  misc_feature: MA Experiment 20001560 PARAMETER Experiment Name: At_Drought_Soil_Dry_P Parameter: Post Timepoint (hr) Value: None
  misc_feature: MA Experiment 20001560 PARAMETER Experiment Name: At_Drought_Soil_Dry_P Parameter: Post-Treatment Value: None
  misc_feature: MA Experiment 20001560 PARAMETER Experiment Name: At_Drought_Soil_Dry_P Parameter: Timepoint (day) Value: 14
  misc_feature: MA Experiment 20001560 PARAMETER Experiment Name: At_Drought_Soil_Dry_P Parameter: Treatment Value: Drought vs. No Drought
  misc_feature: MA Experiment ID: 20001760 Result: Down-regulated in Transcription
  misc_feature: MA Experiment 20001760 PARAMETER Experiment Name: At_50mM_NH4NO3_L-to-H_P Parameter: Timepoint (hr) Value: 2
  misc_feature: MA Experiment 20001760 PARAMETER Experiment Name: At_50mM_NH4NO3_L-to-H_P Parameter: Tissue Value: Siliques
  misc_feature: MA Experiment 20001760 PARAMETER Experiment Name: At_50mM_NH4NO3_L-to-H_P Parameter: Treatment Value: 50mM NH4NO3 vs 100mM Mannitol
  misc_feature: MA Experiment ID: 20001904 Result: Down-regulated in Transcription
  misc_feature: MA Experiment 20001904 PARAMETER Experiment Name: At_Drought_Reproduction_P Parameter: Age (day) Value: 37
  misc_feature: MA Experiment 20001904 PARAMETER Experiment Name: At_Drought_Reproduction_P Parameter: Organism Value: A. thaliana
  misc_feature: MA Experiment 20001904 PARAMETER Experiment Name: At_Drought_Reproduction_P Parameter: Plant Line Value: WS
  misc_feature: MA Experiment 20001904 PARAMETER Experiment Name: At_Drought_Reproduction_P Parameter: Timepoint (day) Value: 7
  misc_feature: MA Experiment 20001904 PARAMETER Experiment Name: At_Drought_Reproduction_P Parameter: Tissue Value: Rosettes
  misc_feature: MA Experiment 20001904 PARAMETER Experiment Name: At_Drought_Reproduction_P Parameter: Treatment Value: Drought vs. No Drought
  misc_feature: MA Experiment ID: 20001905 Result: Down-regulated in Transcription
  misc_feature: MA Experiment 20001905 PARAMETER Experiment Name: At_Drought_Reproduction_P Parameter: Age (day) Value: 40
  misc_feature: MA Experiment 20001905 PARAMETER Experiment Name: At_Drought_Reproduction_P Parameter: Organism Value: A. thaliana
  misc_feature: MA Experiment 20001905 PARAMETER Experiment Name: At_Drought_Reproduction_P Parameter: Plant Line Value: WS
  misc_feature: MA Experiment 20001905 PARAMETER Experiment Name: At_Drought_Reproduction_P Parameter: Timepoint (day) Value: 10
  misc_feature: MA Experiment 20001905 PARAMETER Experiment Name: At_Drought_Reproduction_P Parameter: Tissue Value: Rosettes
  misc_feature: MA Experiment 20001905 PARAMETER Experiment Name: At_Drought_Reproduction_P Parameter: Treatment Value: Drought vs. No Drought
cacgcgtccgactaacacaaaagaaaaaaaaaaaaaaaacagagtatcaaacatgtcaatcttgctctgtttcctctgtcttttacctgttttcttagtttctttatcaatcttgtcaaaaaggctaaaaccctcaaaatggaagcttcctccgggaccaaagacgctcccgatcatcggaaacttacacaacctcacaggtttgcctcacacatgttttcgaaatctctcacaaaagttcggaccagtgatgcttctccacttcggattcgtccccgtagtcgtgatctcatcgaaagaaggagcagaagaagctctcaagacccaagatcttgaatgttgcagccgaccagagactgtagcgacaagaatgatctcttacaacttcaaagacattggattcgctccttacggtgaggaatggaaagcgttgaggaagctcgtggttatggagctcttgaacacgaaaaagtttcagtctttcaggtatataagagaggaagagaatgacttgttgatcaagaaactaaccgaatccgctctgaaaaaatcaccggtgaatctgaagaagacccttttcacgctagtcgcgagtatcgtgtgtaggctcgcgttcggggtgaatatccacaagtgcgagttcgtagacgaggacaacgttgctgatctagttaacaagtttgagatgctagtcgctggtgttgccttcaccgatttcttccctggagtgggttggcttgtagaccgaatctcaggtcagaacaagacactaaacaatgttttctcagaacttgacactttcttccaaaacgtgctcgatgatcatattaagcctggaagacaagtatctgagaaccctgacgtcgtagatgtgatgcttgatctaatgaagaagcaagagaaagatggagaatctttcaaactcacaacagatcatctcaaaggaatcatctcggacatatttcttgcaggagtaaacacaagcgccgtcactttgaactgggcgatggccgagctgatcagaaacccgagagtgatgaagaaagtgcaagacgagattaggacaacacttggggacaagaaacagagaatcacagagcaagatctaagccaagttcactacttcaagcttgtggtcaaggagatatttagattacatccagcagctccacttttgcttccaagagagacaatgtctcatgtcaagatccaaggctacgatattcctgtgaaaacacagatgatgatcaacatctactcgatcgcacgtgatccaaaactatggacaaaccctgatgagtttaaccctgacaggtttcttgacagctccatagattacagaggactaaactttgagctgttaccatttggttctggccggagaatctgtcccgggatgacgctgggaatcaccaccgtggaattgggactgttgaatttgctttacttcttcgattgggtagtgcctgtagggaagaatgtgaaggacatcaacttggaagaaacaggatcaatcattattagcaagaagacaacccttgagcttgttccacttgttcatcattgaaatgacgatcatgaaacaattagtccataagattatgtatttgtatccagcttctttatcttgatatggttgtaatcataatctgaatagtgatatc

SEQ ID NO: 76885 - protein, 521 aa, Arabidopsis thaliana
  peptide (1)..(521): Ceres Seq. ID no. 12377368
  misc_feature (50)..(515): Pfam Name: Cytochrome P450 Pfam Description: Cytochrome P450
  misc_feature (18)..(521): Homolog of NCBI NO: 15222182 NR Description: cytochrome p450 family; protein id: At1g13110.1, by cDNA: gi_18087622 [Arabidopsis thaliana]
  misc_feature (18)..(517): Homolog of NCBI NO: 15231526 NR Description: cytochrome P450 family; protein id: At3g26210.1 thaliana] >gi|13878383|sp|Q9LTM0|C72N_ARATH Cytochrome P450 71B23
  misc_feature (18)..(521): Homolog of NCBI NO: 15222177 NR Description: cytochrome p450 family; protein id: At1g13090.1, by cDNA: 35385., supported by cDNA: gi_13272452, supported by gi_17065513 [Arabidopsis thaliana]
  misc_feature (18)..(521): Homolog of NCBI NO: 21618278 NR Description: putative cytochrome P450 monooxygenase
  misc_feature (18)..(521): Homolog of NCBI NO: 15222180 NR Description: cytochrome p450 family; protein id: At1g13100.1
  misc_feature (18)..(521): Homolog of NCBI NO: 15231524 NR Description: cytochrome p450 family; protein id: At3g26190.1 thaliana] >gi|13878385|sp|Q9LTM2|C72L_ARATH Cytochrome P450 71B21
  misc_feature (18)..(520): Homolog of NCBI NO: 15231525 NR Description: cytochrome p450 family; protein id: At3g26200.1, by cDNA: gi_13430717 [Arabidopsis thaliana] Cytochrome P450 71B22 >gi|11994439|dbj|BAB02441.1| cytochrome
  misc_feature (18)..(501): Homolog of NCBI NO: 15231632 NR Description: cytochrome p450 family; protein id: At3g26830.1 thaliana] >gi|13878391|sp|Q9LW27|C72F_ARATH Cytochrome P450 71B15
  misc_feature (22)..(518): Homolog of NCBI NO: 15231520 NR Description: cytochrome p450 family; protein id: At3g26170.1, by cDNA: 262802. [Arabidopsis thaliana] Cytochrome P450 71B19 >gi|11994436|dbj|BAB02438.1| cytochrome
  misc_feature (22)..(518): Homolog of NCBI NO: 21554748 NR Description: cytochrome P450, putative [Arabidopsis thaliana]
TRPTNTKEKKKKNRVSNMSILLCFLCLLPVFLVSLSILSKRLKPSKWKLPPGPKTLPIIGNLHNLTGLPHTCFRNLSQKFGPVMLLHFGFVPVVVISSKEGAEEALKTQDLECCSRPETVATRMISYNFKDIGFAPYGEEWKALRKLVVMELLNTKKFQSFRYIREEENDLLIKKLTESALKKSPVNLKKTLFTLVASIVCRLAFGVNIHKCEFVDEDNVADLVNKFEMLVAGVAFTDFFPGVGWLVDRISGQNKTLNNVFSELDTFFQNVLDDHIKPGRQVSENPDVVDVMLDLMKKQEKDGESFKLTTDHLKGIISDIFLAGVNTSAVTLNWAMAELIRNPRVMKKVQDEIRTTLGDKKQRITEQDLSQVHYFKLVVKEIFRLHPAAPLLLPRETMSHVKIQGYDIPVKTQMMINIYSIARDPKLWTNPDEFNPDRFLDSSIDYRGLNFELLPFGSGRRICPGMTLGITTVELGLLNLLYFFDWVVPVGKNVKDINLEETGSIIISKKTTLELVPLVHH

SEQ ID NO: 76886 - protein, 504 aa, Arabidopsis thaliana
  peptide (1)..(504): Ceres Seq. ID no. 12377369
  misc_feature (33)..(498): Pfam Name: Cytochrome P450 Pfam Description: Cytochrome P450
  misc_feature (1)..(504): Homolog of NCBI NO: 15222182 NR Description: cytochrome p450 family; protein id: At1g13110.1, by cDNA: gi_18087622 [Arabidopsis thaliana]
  misc_feature (1)..(500): Homolog of NCBI NO: 15231526 NR Description: cytochrome P450 family; protein id: At3g26210.1 thaliana] >gi|13878383|sp|Q9LTM0|C72N_ARATH Cytochrome P450 71B23
  misc_feature (1)..(504): Homolog of NCBI NO: 15222177 NR Description: cytochrome p450 family; protein id: At1g13090.1, by cDNA: 35385., supported by cDNA: gi_13272452, supported by gi_17065513 [Arabidopsis thaliana]
  misc_feature (1)..(504): Homolog of NCBI NO: 21618278 NR Description: putative cytochrome P450 monooxygenase
  misc_feature (1)..(504): Homolog of NCBI NO: 15222180 NR Description: cytochrome p450 family; protein id: At1g13100.1
  misc_feature (1)..(504): Homolog of NCBI NO: 15231524 NR Description: cytochrome p450 family; protein id: At3g26190.1 thaliana] >gi|13878385|sp|Q9LTM2|C72L_ARATH Cytochrome P450 71B21
  misc_feature (1)..(503): Homolog of NCBI NO: 15231525 NR Description: cytochrome p450 family; protein id: At3g26200.1, by cDNA: gi_13430717 [Arabidopsis thaliana] Cytochrome P450 71B22 >gi|11994439|dbj|BAB02441.1| cytochrome
  misc_feature (1)..(484): Homolog of NCBI NO: 15231632 NR Description: cytochrome p450 family; protein id: At3g26830.1 thaliana] >gi|13878391|sp|Q9LW27|C72F_ARATH Cytochrome P450 71B15
  misc_feature (5)..(501): Homolog of NCBI NO: 15231520 NR Description: cytochrome p450 family; protein id: At3g26170.1, by cDNA: 262802. [Arabidopsis thaliana] Cytochrome P450 71B19 >gi|11994436|dbj|BAB02438.1| cytochrome
  misc_feature (5)..(501): Homolog of NCBI NO: 21554748 NR Description: cytochrome P450, putative [Arabidopsis thaliana]
MSILLCFLCLLPVFLVSLSILSKRLKPSKWKLPPGPKTLPIIGNLHNLTGLPHTCFRNLSQKFGPVMLLHFGFVPVVVISSKEGAEEALKTQDLECCSRPETVATRMISYNFKDIGFAPYGEEWKALRKLVVMELLNTKKFQSFRYIREEENDLLIKKLTESALKKSPVNLKKTLFTLVASIVCRLAFGVNIHKCEFVDEDNVADLVNKFEMLVAGVAFTDFFPGVGWLVDRISGQNKTLNNVFSELDTFFQNVLDDHIKPGRQVSENPDVVDVMLDLMKKQEKDGESFKLTTDHLKGIISDIFLAGVNTSAVTLNWAMAELIRNPRVMKKVQDEIRTTLGDKKQRITEQDLSQVHYFKLVVKEIFRLHPAAPLLLPRETMSHVKIQGYDIPVKTQMMINIYSIARDPKLWTNPDEFNPDRFLDSSIDYRGLNFELLPFGSGRRICPGMTLGITTVELGLLNLLYFFDWVVPVGKNVKDINLEETGSIIISKKTTLELVPLVHH

SEQ ID NO: 76887 - protein, 438 aa, Arabidopsis thaliana
  peptide (1)..(438): Ceres Seq. ID no. 12377370
  misc_feature (1)..(432): Pfam Name: Cytochrome P450 Pfam Description: Cytochrome P450
  misc_feature (1)..(438): Homolog of NCBI NO: 15222182 NR Description: cytochrome p450 family; protein id: At1g13110.1, by cDNA: gi_18087622 [Arabidopsis thaliana]
  misc_feature (1)..(434): Homolog of NCBI NO: 15231526 NR Description: cytochrome P450 family; protein id: At3g26210.1 thaliana] >gi|13878383|sp|Q9LTM0|C72N_ARATH Cytochrome P450 71B23
  misc_feature (1)..(438): Homolog of NCBI NO: 15222177 NR Description: cytochrome p450 family; protein id: At1g13090.1, by cDNA: 35385., supported by cDNA: gi_13272452, supported by gi_17065513 [Arabidopsis thaliana]
  misc_feature (1)..(438): Homolog of NCBI NO: 21618278 NR Description: putative cytochrome P450 monooxygenase
  misc_feature (1)..(438): Homolog of NCBI NO: 15222180 NR Description: cytochrome p450 family; protein id: At1g13100.1
  misc_feature (1)..(438): Homolog of NCBI NO: 15231524 NR Description: cytochrome p450 family; protein id: At3g26190.1 thaliana] >gi|13878385|sp|Q9LTM2|C72L_ARATH Cytochrome P450 71B21
  misc_feature (1)..(437): Homolog of NCBI NO: 15231525 NR Description: cytochrome p450 family; protein id: At3g26200.1, by cDNA: gi_13430717 [Arabidopsis thaliana] Cytochrome P450 71B22 >gi|11994439|dbj|BAB02441.1| cytochrome
  misc_feature (1)..(418): Homolog of NCBI NO: 15231632 NR Description: cytochrome p450 family; protein id: At3g26830.1 thaliana] >gi|13878391|sp|Q9LW27|C72F_ARATH Cytochrome P450 71B15
  misc_feature (1)..(435): Homolog of NCBI NO: 15231520 NR Description: cytochrome p450 family; protein id: At3g26170.1, by cDNA: 262802. [Arabidopsis thaliana] Cytochrome P450 71B19 >gi|11994436|dbj|BAB02438.1| cytochrome
  misc_feature (1)..(435): Homolog of NCBI NO: 21554748 NR Description: cytochrome P450, putative [Arabidopsis thaliana]
MLLHFGFVPVVVISSKEGAEEALKTQDLECCSRPETVATRMISYNFKDIGFAPYGEEWKALRKLVVMELLNTKKFQSFRYIREEENDLLIKKLTESALKKSPVNLKKTLFTLVASIVCRLAFGVNIHKCEFVDEDNVADLVNKFEMLVAGVAFTDFFPGVGWLVDRISGQNKTLNNVFSELDTFFQNVLDDHIKPGRQVSENPDVVDVMLDLMKKQEKDGESFKLTTDHLKGIISDIFLAGVNTSAVTLNWAMAELIRNPRVMKKVQDEIRTTLGDKKQRITEQDLSQVHYFKLVVKEIFRLHPAAPLLLPRETMSHVKIQGYDIPVKTQMMINIYSIARDPKLWTNPDEFNPDRFLDSSIDYRGLNFELLPFGSGRRICPGMTLGITTVELGLLNLLYFFDWVVPVGKNVKDINLEETGSIIISKKTTLELVPLVHH

SEQ ID NO: 76888 - DNA, 1143 bp, Arabidopsis thaliana
  misc_feature (1)..(1143): Ceres Seq. ID no. 12377429
  misc_feature: MA Experiment ID: 108434 Result: Down-regulated in Transcription
  misc_feature: MA Experiment 108434 PARAMETER Experiment Name: At_Root_Tips_cDNA_P Parameter: Tissue Value: Root Tips
  misc_feature: MA Experiment ID: 108435 Result: Up-regulated in Transcription
  misc_feature: MA Experiment 108435 PARAMETER Experiment Name: At_stm_Mutants_cDNA_P Parameter: Plant Line Value: wt Landsburg vs stm
  misc_feature: MA Experiment 108435 PARAMETER Experiment Name: At_stm_Mutants_cDNA_P Parameter: Tissue Value: Shoot Apical Meristem Region
  misc_feature: MA Experiment ID: 108461 Result: Up-regulated in Transcription
  misc_feature: MA Experiment 108461 PARAMETER Experiment Name: At_Germinating_Seeds_cDNA_P Parameter: Age (day) Value: 1 vs. 0
  misc_feature: MA Experiment 108461 PARAMETER Experiment Name: At_Germinating_Seeds_cDNA_P Parameter: Tissue Value: Germinating Seeds
  misc_feature: MA Experiment ID: 108462 Result: Up-regulated in Transcription
  misc_feature: MA Experiment 108462 PARAMETER Experiment Name: At_Germinating_Seeds_cDNA_P Parameter: Age (day) Value: 2 vs. 0
  misc_feature: MA Experiment 108462 PARAMETER Experiment Name: At_Germinating_Seeds_cDNA_P Parameter: Tissue Value: Germinating Seeds
  misc_feature: MA Experiment ID: 108463 Result: Up-regulated in Transcription
  misc_feature: MA Experiment 108463 PARAMETER Experiment Name: At_Germinating_Seeds_cDNA_P Parameter: Age (day) Value: 3 vs. 0
  misc_feature: MA Experiment 108463 PARAMETER Experiment Name: At_Germinating_Seeds_cDNA_P Parameter: Tissue Value: Germinating Seeds
  misc_feature: MA Experiment ID: 108469 Result: Up-regulated in Transcription
  misc_feature: MA Experiment ID: 108501 Result: Down-regulated in Transcription
  misc_feature: MA Experiment 108501 PARAMETER Experiment Name: At_ap2_floral_buds_cDNA_P Parameter: Plant Line Value: ap2 (Ler.)
  misc_feature: MA Experiment 108501 PARAMETER Experiment Name: At_ap2_floral_buds_cDNA_P Parameter: Tissue Value: Closed Flower
  misc_feature: MA Experiment ID: 108573 Result: Up-regulated in Transcription
  misc_feature: MA Experiment 108573 PARAMETER Experiment Name: At_Drought_cDNA_P Parameter: Timepoint (hr) Value: 6
  misc_feature: MA Experiment 108573 PARAMETER Experiment Name: At_Drought_cDNA_P Parameter: Tissue Value: Aerial
  misc_feature: MA Experiment 108573 PARAMETER Experiment Name: At_Drought_cDNA_P Parameter: Treatment Value: Drought vs. No Drought
  misc_feature: MA Experiment ID: 108579 Result: Down-regulated in Transcription
  misc_feature: MA Experiment 108579 PARAMETER Experiment Name: At_4deg_Cold_cDNA_P Parameter: Temperature (deg C) Value: 4 vs. 22
  misc_feature: MA Experiment 108579 PARAMETER Experiment Name: At_4deg_Cold_cDNA_P Parameter: Timepoint (hr) Value: 6
  misc_feature: MA Experiment 108579 PARAMETER Experiment Name: At_4deg_Cold_cDNA_P Parameter: Tissue Value: Aerial
  misc_feature: MA Experiment ID: 108605 Result: Up-regulated in Transcription
  misc_feature: MA Experiment 108605 PARAMETER Experiment Name: At_100uM_ABA_cDNA_P Parameter: Timepoint (hr) Value: 6
  misc_feature: MA Experiment 108605 PARAMETER Experiment Name: At_100uM_ABA_cDNA_P Parameter: Tissue Value: Aerial
  misc_feature: MA Experiment 108605 PARAMETER Experiment Name: At_100uM_ABA_cDNA_P Parameter: Treatment Value: 100uM ABA vs. No Treatment
  misc_feature: MA Experiment ID: 108667 Result: Up-regulated in Transcription
  misc_feature: MA Experiment 108667 PARAMETER Experiment Name: At_2mM_SA_cDNA_P Parameter: Plant Line Value: WS
  misc_feature: MA Experiment 108667 PARAMETER Experiment Name: At_2mM_SA_cDNA_P Parameter: Timepoint (hr) Value: 1
  misc_feature: MA Experiment 108667 PARAMETER Experiment Name: At_2mM_SA_cDNA_P Parameter: Treatment Value: 2mM SA vs. No Treatment
  misc_feature: MA Experiment ID: 108668 Result: Up-regulated in Transcription
  misc_feature: MA Experiment 108668 PARAMETER Experiment Name: At_2mM_SA_cDNA_P Parameter: Plant Line Value: WS
  misc_feature: MA Experiment 108668 PARAMETER Experiment Name: At_2mM_SA_cDNA_P Parameter: Timepoint (hr) Value: 6
  misc_feature: MA Experiment 108668 PARAMETER Experiment Name: At_2mM_SA_cDNA_P Parameter: Treatment Value: 2mM SA vs. No Treatment
  misc_feature: MA Experiment ID: 20000180 Result: Up-regulated in Transcription
  misc_feature: MA Experiment 20000180 PARAMETER Experiment Name: At_Germinating_Seeds_P Parameter: Age (hr) Value: 24 vs. 0
  misc_feature: MA Experiment 20000180 PARAMETER Experiment Name: At_Germinating_Seeds_P Parameter: Tissue Value: Germinating Seeds
  misc_feature: MA Experiment ID: 20000182 Result: Up-regulated in Transcription
  misc_feature: MA Experiment 20000182 PARAMETER Experiment Name: At_2mM_SA_P Parameter: Age (day) Value: 14
  misc_feature: MA Experiment 20000182 PARAMETER Experiment Name: At_2mM_SA_P Parameter: Organism Value: A. thaliana
  misc_feature: MA Experiment 20000182 PARAMETER Experiment Name: At_2mM_SA_P Parameter: Plant Line Value: WS
  misc_feature: MA Experiment 20000182 PARAMETER Experiment Name: At_2mM_SA_P Parameter: Timepoint (hr) Value: 6
  misc_feature: MA Experiment 20000182 PARAMETER Experiment Name: At_2mM_SA_P Parameter: Tissue Value: Aerial
  misc_feature: MA Experiment 20000182 PARAMETER Experiment Name: At_2mM_SA_P Parameter: Treatment Value: 2mM SA vs. No Treatment
  misc_feature: MA Experiment ID: 20000224 Result: Up-regulated in Transcription
  misc_feature: MA Experiment ID: 20000234 Result: Down-regulated in Transcription
  misc_feature: MA Experiment 20000234 PARAMETER Experiment Name: At_Siliques_P Parameter: Age (day) Value: 21
  misc_feature: MA Experiment 20000234 PARAMETER Experiment Name: At_Siliques_P Parameter: Organism Value: A. thaliana
  misc_feature: MA Experiment 20000234 PARAMETER Experiment Name: At_Siliques_P Parameter: Plant Line Value: WS
  misc_feature: MA Experiment 20000234 PARAMETER Experiment Name: At_Siliques_P Parameter: Tissue Value: Less Than 5mm Siliques vs. Whole Plant
  misc_feature: MA Experiment ID: 20000235 Result: Down-regulated in Transcription
  misc_feature: MA Experiment 20000235 PARAMETER Experiment Name: At_Siliques_P Parameter: Age (day) Value: 21
  misc_feature: MA Experiment 20000235 PARAMETER Experiment Name: At_Siliques_P Parameter: Organism Value: A. thaliana
  misc_feature: MA Experiment 20000235 PARAMETER Experiment Name: At_Siliques_P Parameter: Plant Line Value: WS
  misc_feature: MA Experiment 20000235 PARAMETER Experiment Name: At_Siliques_P Parameter: Tissue Value: 5-10mm Siliques vs. Whole Plant
  misc_feature: MA Experiment ID: 20000264 Result: Down-regulated in Transcription
  misc_feature: MA Experiment 20000264 PARAMETER Experiment Name: At_Open_Flower_P Parameter: Age (day) Value: 21
  misc_feature: MA Experiment 20000264 PARAMETER Experiment Name: At_Open_Flower_P Parameter: Plant Line Value: WS
  misc_feature: MA Experiment 20000264 PARAMETER Experiment Name: At_Open_Flower_P Parameter: Tissue Value: Open Flower vs. Whole Plant
  misc_feature: MA Experiment ID: 20000265 Result: Down-regulated in Transcription
  misc_feature: MA Experiment 20000265 PARAMETER Experiment Name: At_Open_Flower_P Parameter: Age (day) Value: 21
  misc_feature: MA Experiment 20000265 PARAMETER Experiment Name: At_Open_Flower_P Parameter: Plant Line Value: WS
  misc_feature: MA Experiment 20000265 PARAMETER Experiment Name: At_Open_Flower_P Parameter: Tissue Value: Closed Flower vs. Whole Plant
  misc_feature: MA Experiment ID: 20000286 Result: Down-regulated in Transcription
  misc_feature: MA Experiment 20000286 PARAMETER Experiment Name: At_Open_Flower_P Parameter: Age (day) Value: 21
  misc_feature: MA Experiment 20000286 PARAMETER Experiment Name: At_Open_Flower_P Parameter: Plant Line Value: WS
  misc_feature: MA Experiment 20000286 PARAMETER Experiment Name: At_Open_Flower_P Parameter: Tissue Value: Half Open vs. Whole Plant
  misc_feature: MA Experiment ID: 20000438 Result: Down-regulated in Transcription
  misc_feature: MA Experiment 20000438 PARAMETER Experiment Name: At_Shoots__P Parameter: Age (day) Value: 14
  misc_feature: MA Experiment 20000438 PARAMETER Experiment Name: At_Shoots__P Parameter: Tissue Value: Shoots vs. Whole Plant
  misc_feature: MA Experiment ID: 20000495 Result: Down-regulated in Transcription
  misc_feature: MA Experiment 20000495 PARAMETER Experiment Name: At_Guard_Cells_P Parameter: Harvest Date Value: 8/2/2002
  misc_feature: MA Experiment 20000495 PARAMETER Experiment Name: At_Guard_Cells_P Parameter: Organism Value: A. thaliana
  misc_feature: MA Experiment 20000495 PARAMETER Experiment Name: At_Guard_Cells_P Parameter: Tissue Value: Guard Cells vs. Leaves
  misc_feature: MA Experiment ID: 20000527 Result: Down-regulated in Transcription
  misc_feature: MA Experiment 20000527 PARAMETER Experiment Name: At_10percent_PEG_P Parameter: Age (day) Value: 20
  misc_feature: MA Experiment 20000527 PARAMETER Experiment Name: At_10percent_PEG_P Parameter: Organism Value: A. thaliana
  misc_feature: MA Experiment 20000527 PARAMETER Experiment Name: At_10percent_PEG_P Parameter: Plant Line Value: WS
  misc_feature: MA Experiment 20000527 PARAMETER Experiment Name: At_10percent_PEG_P Parameter: Timepoint (day) Value: 20
  misc_feature: MA Experiment 20000527 PARAMETER Experiment Name: At_10percent_PEG_P Parameter: Tissue Value: Whole Plant
  misc_feature: MA Experiment 20000527 PARAMETER Experiment Name: At_10percent_PEG_P Parameter: Treatment Value: 10percent PEG vs. No Treatment
  misc_feature: MA Experiment ID: 20000794 Result: Down-regulated in Transcription
  misc_feature: MA Experiment 20000794 PARAMETER Experiment Name: At_Petals_P Parameter: Age (day) Value: 23-25 days
  misc_feature: MA Experiment 20000794 PARAMETER Experiment Name: At_Petals_P Parameter: Plant Line Value: WS
  misc_feature: MA Experiment 20000794 PARAMETER Experiment Name: At_Petals_P Parameter: Tissue Value: Petals vs. Whole plant
  misc_feature: MA Experiment ID: 20001247 Result: Up-regulated in Transcription
  misc_feature: MA Experiment 20001247 PARAMETER Experiment Name: At_Far-red-induction_P Parameter: Age (day) Value: 7
  misc_feature: MA Experiment 20001247 PARAMETER Experiment Name: At_Far-red-induction_P Parameter: Light Value: Far-red vs. White
  misc_feature: MA Experiment 20001247 PARAMETER Experiment Name: At_Far-red-induction_P Parameter: Organism Value: A. thaliana
  misc_feature: MA Experiment 20001247 PARAMETER Experiment Name: At_Far-red-induction_P Parameter: Plant Line Value: Columbia
  misc_feature: MA Experiment 20001247 PARAMETER Experiment Name: At_Far-red-induction_P Parameter: Timepoint (hr) Value: 1
  misc_feature: MA Experiment 20001247 PARAMETER Experiment Name: At_Far-red-induction_P Parameter: Tissue Value: Whole Plant
  misc_feature: MA Experiment ID: 20001555 Result: Down-regulated in Transcription
  misc_feature: MA Experiment 20001555 PARAMETER Experiment Name: At_Drought_Soil_Dry_P Parameter: Age (day) Value: 24
  misc_feature: MA Experiment 20001555 PARAMETER Experiment Name: At_Drought_Soil_Dry_P Parameter: Organism Value: A. thaliana
  misc_feature: MA Experiment 20001555 PARAMETER Experiment Name: At_Drought_Soil_Dry_P Parameter: Plant Line Value: WS
  misc_feature: MA Experiment 20001555 PARAMETER Experiment Name: At_Drought_Soil_Dry_P Parameter: Post Timepoint (hr) Value: None
  misc_feature: MA Experiment 20001555 PARAMETER Experiment Name: At_Drought_Soil_Dry_P Parameter: Post-Treatment Value: None
  misc_feature: MA Experiment 20001555 PARAMETER Experiment Name: At_Drought_Soil_Dry_P Parameter: Timepoint (day) Value: 10
  misc_feature: MA Experiment 20001555 PARAMETER Experiment Name: At_Drought_Soil_Dry_P Parameter: Treatment Value: Drought vs. No Drought
  misc_feature: MA Experiment ID: 20001904 Result: Up-regulated in Transcription
  misc_feature: MA Experiment 20001904 PARAMETER Experiment Name: At_Drought_Reproduction_P Parameter: Age (day) Value: 37
  misc_feature: MA Experiment 20001904 PARAMETER Experiment Name: At_Drought_Reproduction_P Parameter: Organism Value: A. thaliana
  misc_feature: MA Experiment 20001904 PARAMETER Experiment Name: At_Drought_Reproduction_P Parameter: Plant Line Value: WS
  misc_feature: MA Experiment 20001904 PARAMETER Experiment Name: At_Drought_Reproduction_P Parameter: Timepoint (day) Value: 7
  misc_feature: MA Experiment 20001904 PARAMETER Experiment Name: At_Drought_Reproduction_P Parameter: Tissue Value: Rosettes
  misc_feature: MA Experiment 20001904 PARAMETER Experiment Name: At_Drought_Reproduction_P Parameter: Treatment Value: Drought vs. No Drought
  misc_feature: MA Experiment ID: 20001905 Result: Up-regulated in Transcription
  misc_feature: MA Experiment 20001905 PARAMETER Experiment Name: At_Drought_Reproduction_P Parameter: Age (day) Value: 40
  misc_feature: MA Experiment 20001905 PARAMETER Experiment Name: At_Drought_Reproduction_P Parameter: Organism Value: A. thaliana
  misc_feature: MA Experiment 20001905 PARAMETER Experiment Name: At_Drought_Reproduction_P Parameter: Plant Line Value: WS
  misc_feature: MA Experiment 20001905 PARAMETER Experiment Name: At_Drought_Reproduction_P Parameter: Timepoint (day) Value: 10
  misc_feature: MA Experiment 20001905 PARAMETER Experiment Name: At_Drought_Reproduction_P Parameter: Tissue Value: Rosettes
  misc_feature: MA Experiment 20001905 PARAMETER Experiment Name: At_Drought_Reproduction_P Parameter: Treatment Value: Drought vs. No Drought
atacatataaagagaaattgttttttttttttaaatggttgtgatgaacaaaacgaatctcttgttgcttattctctctctttttctcgccatcaacctctcctccgctcaactccgcggcgacttctacgccggaacttgtccgaacgtcgagcaaatcgtcagaaacgccgtacagaaaaaaatccaacaaactttcaccaccattcccgccactctacgcctctatttccatgattgtttcgtcaatggatgtgatgcatcagtgatgatagcgtcgacaaatactaataaggcggagaaggatcatgaggataatttatcgttggccggagatggattcgacaccgtcattaaagctaaagaagctgttgacgccgtcccaaattgtcgtaacaaagtttcttgcgctgatattctcacgatggccactcgtgacgtcgttaatcttgcgggtggaccacaatacgccgtagaattgggaaggcgagatggactttcgtcgtcggcttctagcgtcacagggaagctacccaaaccgacctttgatctcaaccaactcaatgcacttttcgcagaaaacggtcttagccctaatgacatgatcgctctctccggggcacacacattaggattcgcgcattgcacaaaagttttcaatcggctatacaatttcaacaagacaaataacgtggatcccacgattaacaaagattacgtgacagagctaaaagcgtcgtgtcctcaaaacatagatccaagagtggctattaacatggatcccaatacaccaagacaattcgacaacgtttactacaaaaacttgcaacaagggaaaggattgttcacgtctgatcaagtcttattcaccgatagtcggtcaaagccaaccgttgacttatgggctaataatggacagttgtttaatcaagcttttattagctcgatgatcaagcttggtcgtgttggtgttaaaactggtagtaatggtaatattcgtcgtgattgcggagctttcaattaatttaaatatatctgtttaagatattgtttatttgcactcatttgtattgggatttgggaatgggatgggtctcatgaagctggttcagctaaaatgtaataattctggttttgggtttt

SEQ ID NO: 76889 - protein, 329 aa, Arabidopsis thaliana
  peptide (1)..(329): Ceres Seq. ID no. 12377430
  misc_feature (43)..(293): Pfam Name: Peroxidase Pfam Description: Peroxidase
  misc_feature (1)..(329): Homolog of NCBI NO: 15235600 NR Description: peroxidase, putative; protein id: At4g37530.1, by cDNA: gi_18874553 [Arabidopsis thaliana] Peroxidase 51 precursor (Atperox P51) (ATP37)
  misc_feature (1)..(329): Homolog of NCBI NO: 17979440 NR Description: putative peroxidase [Arabidopsis thaliana]
  misc_feature (1)..(329): Homolog of NCBI NO: 15235597 NR Description: peroxidase, putative; protein id: At4g37520.1, by cDNA: 2583., supported by cDNA: gi_17065479, supported by gi_20148496 [Arabidopsis thaliana]
  misc_feature (1)..(329): Homolog of NCBI NO: 21554605 NR Description: peroxidase, prxr2 [Arabidopsis thaliana]
  misc_feature (18)..(329): Homolog of NCBI NO: 1546708 NR Description: peroxidase ATP9a [Arabidopsis thaliana]
  misc_feature (10)..(329): Homolog of NCBI NO: 15240737 NR Description: peroxidase, putative; protein id: At5g67400.1 thaliana] >gi|26397661|sp|Q43873|PE73_ARATH Peroxidase 73 (Atperox P73) (PRXR11) (ATP10a) >gi|1402902|emb|CAA66967.1|
  misc_feature (10)..(329): Homolog of NCBI NO: 28629828 NR Description: peroxidase 1 [Artemisia annua]
  misc_feature (4)..(329): Homolog of NCBI NO: 15229646 NR Description: peroxidase, putative; protein id: At3g49960.1 thaliana] >gi|25453201|sp|Q96510|PE35_ARATH Peroxidase 35
  misc_feature (9)..(329): Homolog of NCBI NO: 14485511 NR Description: putative peroxidase [Solanum tuberosum]
  misc_feature (4)..(325): Homolog of NCBI NO: 4138647 NR Description: peroxidase [Trifolium repens]
MVVMNKTNLLLLILSLFLAINLSSAQLRGDFYAGTCPNVEQIVRNAVQKKIQQTFTTIPATLRLYFHDCFVNGCDASVMIASTNTNKAEKDHEDNLSLAGDGFDTVIKAKEAVDAVPNCRNKVSCADILTMATRDVVNLAGGPQYAVELGRRDGLSSSASSVTGKLPKPTFDLNQLNALFAENGLSPNDMIALSGAHTLGFAHCTKVFNRLYNFNKTNNVDPTINKDYVTELKASCPQNIDPRVAINMDPNTPRQFDNVYYKNLQQGKGLFTSDQVLFTDSRSKPTVDLWANNGQLFNQAFISSMIKLGRVGVKTGSNGNIRRDCGAFN

SEQ ID NO: 76890 - protein, 326 aa, Arabidopsis thaliana
  peptide (1)..(326): Ceres Seq. ID no. 12377431
  misc_feature (40)..(290): Pfam Name: Peroxidase Pfam Description: Peroxidase
  misc_feature (1)..(326): Homolog of NCBI NO: 15235600 NR Description: peroxidase, putative; protein id: At4g37530.1, by cDNA: gi_18874553 [Arabidopsis thaliana] Peroxidase 51 precursor (Atperox P51) (ATP37)
  misc_feature (1)..(326): Homolog of NCBI NO: 17979440 NR Description: putative peroxidase [Arabidopsis thaliana]
  misc_feature (1)..(326): Homolog of NCBI NO: 15235597 NR Description: peroxidase, putative; protein id: At4g37520.1, by cDNA: 2583., supported by cDNA: gi_17065479, supported by gi_20148496 [Arabidopsis thaliana]
  misc_feature (1)..(326): Homolog of NCBI NO: 21554605 NR Description: peroxidase, prxr2 [Arabidopsis thaliana]
  misc_feature (15)..(326): Homolog of NCBI NO: 1546708 NR Description: peroxidase ATP9a [Arabidopsis thaliana]
  misc_feature (7)..(326): Homolog of NCBI NO: 15240737 NR Description: peroxidase, putative; protein id: At5g67400.1 thaliana] >gi|26397661|sp|Q43873|PE73_ARATH Peroxidase 73 (Atperox P73) (PRXR11) (ATP10a) >gi|1402902|emb|CAA66967.1|
  misc_feature (7)..(326): Homolog of NCBI NO: 28629828 NR Description: peroxidase 1 [Artemisia annua]
  misc_feature (1)..(326): Homolog of NCBI NO: 15229646 NR Description: peroxidase, putative; protein id: At3g49960.1 thaliana] >gi|25453201|sp|Q96510|PE35_ARATH Peroxidase 35
  misc_feature (6)..(326): Homolog of NCBI NO: 14485511 NR Description: putative peroxidase [Solanum tuberosum]
  misc_feature (1)..(322): Homolog of NCBI NO: 4138647 NR Description: peroxidase [Trifolium repens]
MNKTNLLLLILSLFLAINLSSAQLRGDFYAGTCPNVEQIVRNAVQKKIQQTFTTIPATLRLYFHDCFVNGCDASVMIASTNTNKAEKDHEDNLSLAGDGFDTVIKAKEAVDAVPNCRNKVSCADILTMATRDVVNLAGGPQYAVELGRRDGLSSSASSVTGKLPKPTFDLNQLNALFAENGLSPNDMIALSGAHTLGFAHCTKVFNRLYNFNKTNNVDPTINKDYVTELKASCPQNIDPRVAINMDPNTPRQFDNVYYKNLQQGKGLFTSDQVLFTDSRSKPTVDLWANNGQLFNQAFISSMIKLGRVGVKTGSNGNIRRDCGAFN

SEQ ID NO: 76891 - protein, 251 aa, Arabidopsis thaliana
  peptide (1)..(251): Ceres Seq. ID no. 12377432
  misc_feature (1)..(215): Pfam Name: Peroxidase Pfam Description: Peroxidase
  misc_feature (1)..(251): Homolog of NCBI NO: 15235600 NR Description: peroxidase, putative; protein id: At4g37530.1, by cDNA: gi_18874553 [Arabidopsis thaliana] Peroxidase 51 precursor (Atperox P51) (ATP37)
  misc_feature (1)..(251): Homolog of NCBI NO: 17979440 NR Description: putative peroxidase [Arabidopsis thaliana]
  misc_feature (1)..(251): Homolog of NCBI NO: 15235597 NR Description: peroxidase, putative; protein id: At4g37520.1, by cDNA: 2583., supported by cDNA: gi_17065479, supported by gi_20148496 [Arabidopsis thaliana]
  misc_feature (1)..(251): Homolog of NCBI NO: 21554605 NR Description: peroxidase, prxr2 [Arabidopsis thaliana]
  misc_feature (1)..(251): Homolog of NCBI NO: 1546708 NR Description: peroxidase ATP9a [Arabidopsis thaliana]
  misc_feature (1)..(251): Homolog of NCBI NO: 15240737 NR Description: peroxidase, putative; protein id: At5g67400.1 thaliana] >gi|26397661|sp|Q43873|PE73_ARATH Peroxidase 73 (Atperox P73) (PRXR11) (ATP10a) >gi|1402902|emb|CAA66967.1|
  misc_feature (1)..(251): Homolog of NCBI NO: 28629828 NR Description: peroxidase 1 [Artemisia annua]
  misc_feature (1)..(251): Homolog of NCBI NO: 15229646 NR Description: peroxidase, putative; protein id: At3g49960.1 thaliana] >gi|25453201|sp|Q96510|PE35_ARATH Peroxidase 35
  misc_feature (1)..(251): Homolog of NCBI NO: 14485511 NR Description: putative peroxidase [Solanum tuberosum]
  misc_feature (1)..(247): Homolog of NCBI NO: 4138647 NR Description: peroxidase [Trifolium repens]
MIASTNTNKAEKDHEDNLSLAGDGFDTVIKAKEAVDAVPNCRNKVSCADILTMATRDVVNLAGGPQYAVELGRRDGLSSSASSVTGKLPKPTFDLNQLNALFAENGLSPNDMIALSGAHTLGFAHCTKVFNRLYNFNKTNNVDPTINKDYVTELKASCPQNIDPRVAINMDPNTPRQFDNVYYKNLQQGKGLFTSDQVLFTDSRSKPTVDLWANNGQLFNQAFISSMIKLGRVGVKTGSNGNIRRDCGAFN

SEQ ID NO: 76892 - DNA, 1974 bp, Arabidopsis thaliana
  misc_feature (1)..(1974): Ceres Seq. ID no. 12377526
  misc_feature: MA Experiment ID: 20000234 Result: Up-regulated in Transcription
  misc_feature: MA Experiment 20000234 PARAMETER Experiment Name: At_Siliques_P Parameter: Age (day) Value: 21
  misc_feature: MA Experiment 20000234 PARAMETER Experiment Name: At_Siliques_P Parameter: Organism Value: A. thaliana
  misc_feature: MA Experiment 20000234 PARAMETER Experiment Name: At_Siliques_P Parameter: Plant Line Value: WS
  misc_feature: MA Experiment 20000234 PARAMETER Experiment Name: At_Siliques_P Parameter: Tissue Value: Less Than 5mm Siliques vs. Whole Plant
  misc_feature: MA Experiment ID: 20000235 Result: Up-regulated in Transcription
  misc_feature: MA Experiment 20000235 PARAMETER Experiment Name: At_Siliques_P Parameter: Age (day) Value: 21
  misc_feature: MA Experiment 20000235 PARAMETER Experiment Name: At_Siliques_P Parameter: Organism Value: A. thaliana
  misc_feature: MA Experiment 20000235 PARAMETER Experiment Name: At_Siliques_P Parameter: Plant Line Value: WS
  misc_feature: MA Experiment 20000235 PARAMETER Experiment Name: At_Siliques_P Parameter: Tissue Value: 5-10mm Siliques vs. Whole Plant
  misc_feature: MA Experiment ID: 20001910 Result: Up-regulated in Transcription
  misc_feature: MA Experiment 20001910 PARAMETER Experiment Name: At_Drought_Reproduction_P Parameter: Age (day) Value: 37
  misc_feature: MA Experiment 20001910 PARAMETER Experiment Name: At_Drought_Reproduction_P Parameter: Organism Value: A. thaliana
  misc_feature: MA Experiment 20001910 PARAMETER Experiment Name: At_Drought_Reproduction_P Parameter: Plant Line Value: WS
  misc_feature: MA Experiment 20001910 PARAMETER Experiment Name: At_Drought_Reproduction_P Parameter: Timepoint (day) Value: 7
  misc_feature: MA Experiment 20001910 PARAMETER Experiment Name: At_Drought_Reproduction_P Parameter: Tissue Value: Flowers
  misc_feature: MA Experiment 20001910 PARAMETER Experiment Name: At_Drought_Reproduction_P Parameter: Treatment Value: Drought vs. No Drought
aaaacttgtgattcttgtttaccacaataaaaaaaaaaaaaaaaaaatcctgcaatgaagcttctactgttgctgcttgccttctgctgtctatctctatcaaggtgtgaagaacaatccgtcccttatgattactcggcaacaatagagtgtctagagaacccttataaaccacagtacaatggagggatcatcgtgaatcctgacttgcaaaatggttcacaaggctggtcacagtttggaaacgccaaagtcgatttcagagaatttggaggcaataagtttgttgttgccacacaaaggaatcaatcttctgacagcatctcgcagaaggtgtacttggaaaaaggaattctctacactttctctgcttggttacaagtgagcataggaaaatctcccgtgagcgctgttttcaagaagaatggtgaatataagcatgccggttcggttgttgctgaatccaaatgttggtccatgctgaaaggtggtctcactgttgatgaatctggtcctgctgaactcttcttcgagagcgagaacacaatggttgagatttgggttgatagcgtctctttgcaacctttcacacaagaagagtggaactctcaccacgaacagagcattggcaaagtaagaaaaggtaccgtgagaatcagagtcatgaataacaaaggcgagacgatacctaatgcaaccatatccatagaacagaagaaactcggatacccattcgggtgcgcggtagaaaacaacatacttgggaatcaagcataccaaaactggttcactcaaagatttaccgtgacaactttcgggaacgagatgaaatggtacagcacagaaagaataagagggcaagaggattactcgacagctgacgcgatgttaagtttcttcaagagccacgggattgctgtacgtgggcacaatgttttatgggatgatcctaagtaccaacctggatgggtgaattctctgtctggtaacgacctctacaacgctgtgaaacgaagggtttactcggttgtctcgcgatacaaaggacagcttttgggttgggatgttgtgaatgagaatcttcatttctccttctttgagagcaagttcggtcctaaagcctcttataacacctacacaatggcccatgccgtcgatccaaggacaccaatgttcatgaatgaatataatacgttagagcaacctaaggatttaacttctagtccagcaaggtatttgggaaagcttagggagcttcaatctattcgggttgccggaaagattccgttagcgataggtcttgagtctcatttcagcactcctaacattccgtatatgagatcagctcttgatacttttggtgccactggtttgcctatttggctcactgagattgacgttgatgcgcctcccaatgtccgggccaactatttcgagcaagttctaagggaaggccatgcacatccgaaagtgaatggaatggtgatgtggacaggttattctccatcaggttgctaccgaatgtgcctcaccgatggaaactttaagaacctacccactggagacgtcgtggacaagcttttacgtgaatggggagggcttcgcagccaaaccacaggtgtcactgatgctaatgggttatttgaagctccactctttcatggtgactatgatctccgtatatcccatcctctcaccaattcaaaggcttcttacaactttacgttgacttccgatgacgactcctcacagaaacaaccatctctatatgtctttcgtgtttgagaagctaagtttacaactactttgtatttgagtagtttgattcttattggcagattagtgtgttttccattataactttgtgtgaggaaactcccatgggatatccatgagcatcgttgggttggtttcttatactttaattaagccgtgatattgtaataaaattatcaatgatattgaacttccttt

SEQ ID NO: 76893 - protein, 576 aa, Arabidopsis thaliana
  peptide (1)..(576): Ceres Seq. ID no. 12377527
  misc_feature (215)..(510): Pfam Name: Glycosyl hydrolase family 10 Pfam Description: Glycosyl hydrolase family 10
  misc_feature (26)..(576): Homolog of NCBI NO: 7485619 NR Description: hypothetical protein F17I5.30 - Arabidopsis >gi|3297808|emb|CAA19866.1| putative protein [Arabidopsis >gi|7270333|emb|CAB80101.1| putative protein [Arabidopsis
  misc_feature (33)..(576): Homolog of NCBI NO: 15235131 NR Description: glycosyl hydrolase family 10; protein id:
  misc_feature (31)..(576): Homolog of NCBI NO: 15235134 NR Description: glycosyl hydrolase family 10; protein id:
  misc_feature (5)..(576): Homolog of NCBI NO: 23429644 NR Description: endoxylanase [Carica papaya]
  misc_feature (1)..(359): Homolog of NCBI NO: 7485620 NR Description: hypothetical protein F17I5.40 - Arabidopsis >gi|3297809|emb|CAA19867.1| putative protein [Arabidopsis >gi|7270334|emb|CAB80102.1| putative protein [Arabidopsis
  misc_feature (142)..(351): Homolog of NCBI NO: 22329142 NR Description: glycosyl hydrolase family 10; protein id:
  misc_feature (379)..(505): Homolog of NCBI NO: 22329142 NR Description: glycosyl hydrolase family 10; protein id:
  misc_feature (2)..(565): Homolog of NCBI NO: 40363757 NR Description: putative 1,4-beta-xylanase [Triticum aestivum]
  misc_feature (39)..(561): Homolog of NCBI NO: 37533262 NR Description: putative 1,4-beta-xylanase [Oryza sativa
  misc_feature (40)..(566): Homolog of NCBI NO: 37533260 NR Description: putative 1,4-beta-xylanase [Oryza sativa
MKLLLLLLAFCCLSLSRCEEQSVPYDYSATIECLENPYKPQYNGGIIVNPDLQNGSQGWSQFGNAKVDFREFGGNKFVVATQRNQSSDSISQKVYLEKGILYTFSAWLQVSIGKSPVSAVFKKNGEYKHAGSVVAESKCWSMLKGGLTVDESGPAELFFESENTMVEIWVDSVSLQPFTQEEWNSHHEQSIGKVRKGTVRIRVMNNKGETIPNATISIEQKKLGYPFGCAVENNILGNQAYQNWFTQRFTVTTFGNEMKWYSTERIRGQEDYSTADAMLSFFKSHGIAVRGHNVLWDDPKYQPGWVNSLSGNDLYNAVKRRVYSVVSRYKGQLLGWDVVNENLHFSFFESKFGPKASYNTYTMAHAVDPRTPMFMNEYNTLEQPKDLTSSPARYLGKLRELQSIRVAGKIPLAIGLESHFSTPNIPYMRSALDTFGATGLPIWLTEIDVDAPPNVRANYFEQVLREGHAHPKVNGMVMWTGYSPSGCYRMCLTDGNFKNLPTGDVVDKLLREWGGLRSQTTGVTDANGLFEAPLFHGDYDLRISHPLTNSKASYNFTLTSDDDSSQKQPSLYVFRV

SEQ ID NO: 76894 - protein, 435 aa, Arabidopsis thaliana; identical to SEQ ID NO: 49508
  peptide (1)..(435): Ceres Seq. ID no. 12377528
  misc_feature (74)..(369): Pfam Name: Glycosyl hydrolase family 10 Pfam Description: Glycosyl hydrolase family 10
  misc_feature (1)..(435): Homolog of NCBI NO: 7485619 NR Description: hypothetical protein F17I5.30 - Arabidopsis >gi|3297808|emb|CAA19866.1| putative protein [Arabidopsis >gi|7270333|emb|CAB80101.1| putative protein [Arabidopsis
  misc_feature (1)..(435): Homolog of NCBI NO: 15235131 NR Description: glycosyl hydrolase family 10; protein id:
  misc_feature (1)..(435): Homolog of NCBI NO: 15235134 NR Description: glycosyl hydrolase family 10; protein id:
  misc_feature (1)..(435): Homolog of NCBI NO: 23429644 NR Description: endoxylanase [Carica papaya]
  misc_feature (1)..(218): Homolog of NCBI NO: 7485620 NR Description: hypothetical protein F17I5.40 - Arabidopsis >gi|3297809|emb|CAA19867.1| putative protein [Arabidopsis >gi|7270334|emb|CAB80102.1| putative protein [Arabidopsis
  misc_feature (1)..(210): Homolog of NCBI NO: 22329142 NR Description: glycosyl hydrolase family 10; protein id:
  misc_feature (238)..(364): Homolog of NCBI NO: 22329142 NR Description: glycosyl hydrolase family 10; protein id:
  misc_feature (1)..(424): Homolog of NCBI NO: 40363757 NR Description: putative 1,4-beta-xylanase [Triticum aestivum]
  misc_feature (1)..(420): Homolog of NCBI NO: 37533262 NR Description: putative 1,4-beta-xylanase [Oryza sativa
  misc_feature (1)..(425): Homolog of NCBI NO: 37533260 NR Description: putative 1,4-beta-xylanase [Oryza sativa

SEQ ID NO: 76895 - protein, 412 aa, Arabidopsis thaliana
  peptide (1)..(412): Ceres Seq. ID no. 12377529
  misc_feature (51)..(346): Pfam Name: Glycosyl hydrolase family 10 Pfam Description: Glycosyl hydrolase family 10
  misc_feature (1)..(412): Homolog of NCBI NO: 7485619 NR Description: hypothetical protein F17I5.30 - Arabidopsis >gi|3297808|emb|CAA19866.1| putative protein [Arabidopsis >gi|7270333|emb|CAB80101.1| putative protein [Arabidopsis
  misc_feature (1)..(412): Homolog of NCBI NO: 15235131 NR Description: glycosyl hydrolase family 10; protein id:
  misc_feature (1)..(412): Homolog of NCBI NO: 15235134 NR Description: glycosyl hydrolase family 10; protein id:
  misc_feature (1)..(412): Homolog of NCBI NO: 23429644 NR Description: endoxylanase [Carica papaya]
  misc_feature (1)..(195): Homolog of NCBI NO: 7485620 NR Description: hypothetical protein F17I5.40 - Arabidopsis >gi|3297809|emb|CAA19867.1| putative protein [Arabidopsis >gi|7270334|emb|CAB80102.1| putative protein [Arabidopsis
  misc_feature (1)..(187): Homolog of NCBI NO: 22329142 NR Description: glycosyl hydrolase family 10; protein id:
  misc_feature (215)..(341): Homolog of NCBI NO: 22329142 NR Description: glycosyl hydrolase family 10; protein id:
  misc_feature (1)..(401): Homolog of NCBI NO: 40363757 NR Description: putative 1,4-beta-xylanase [Triticum aestivum]
  misc_feature (1)..(397): Homolog of NCBI NO: 37533262 NR Description: putative 1,4-beta-xylanase [Oryza sativa
  misc_feature (1)..(402): Homolog of NCBI NO: 37533260 NR Description: putative 1,4-beta-xylanase [Oryza sativa
MVEIWVDSVSLQPFTQEEWNSHHEQSIGKVRKGTVRIRVMNNKGETIPNATISIEQKKLGYPFGCAVENNILGNQAYQNWFTQRFTVTTFGNEMKWYSTERIRGQEDYSTADAMLSFFKSHGIAVRGHNVLWDDPKYQPGWVNSLSGNDLYNAVKRRVYSVVSRYKGQLLGWDVVNENLHFSFFESKFGPKASYNTYTMAHAVDPRTPMFMNEYNTLEQPKDLTSSPARYLGKLRELQSIRVAGKIPLAIGLESHFSTPNIPYMRSALDTFGATGLPIWLTEIDVDAPPNVRANYFEQVLREGHAHPKVNGMVMWTGYSPSGCYRMCLTDGNFKNLPTGDVVDKLLREWGGLRSQTTGVTDANGLFEAPLFHGDYDLRISHPLTNSKASYNFTLTSDDDSSQKQPSLYVFRV

SEQ ID NO: 76896 - DNA, 1374 bp, Arabidopsis thaliana
  misc_feature (1)..(1374): Ceres Seq. ID no. 12384911
  misc_feature: MA Experiment ID: 108462 Result: Up-regulated in Transcription
  misc_feature: MA Experiment 108462 PARAMETER Experiment Name: At_Germinating_Seeds_cDNA_P Parameter: Age (day) Value: 2 vs. 0
  misc_feature: MA Experiment 108462 PARAMETER Experiment Name: At_Germinating_Seeds_cDNA_P Parameter: Tissue Value: Germinating Seeds
  misc_feature: MA Experiment ID: 108463 Result: Up-regulated in Transcription
  misc_feature: MA Experiment 108463 PARAMETER Experiment Name: At_Germinating_Seeds_cDNA_P Parameter: Age (day) Value: 3 vs. 0
  misc_feature: MA Experiment 108463 PARAMETER Experiment Name: At_Germinating_Seeds_cDNA_P Parameter: Tissue Value: Germinating Seeds
  misc_feature: MA Experiment ID: 108464 Result: Up-regulated in Transcription
  misc_feature: MA Experiment 108464 PARAMETER Experiment Name: At_Germinating_Seeds_cDNA_P Parameter: Age (day) Value: 4 vs. 0
  misc_feature: MA Experiment 108464 PARAMETER Experiment Name: At_Germinating_Seeds_cDNA_P Parameter: Tissue Value: Germinating Seeds
  misc_feature: MA Experiment ID: 108573 Result: Up-regulated in Transcription
  misc_feature: MA Experiment 108573 PARAMETER Experiment Name: At_Drought_cDNA_P Parameter: Timepoint (hr) Value: 6
  misc_feature: MA Experiment 108573 PARAMETER Experiment Name: At_Drought_cDNA_P Parameter: Tissue Value: Aerial
  misc_feature: MA Experiment 108573 PARAMETER Experiment Name: At_Drought_cDNA_P Parameter: Treatment Value: Drought vs. No Drought
  misc_feature: MA Experiment ID: 108574 Result: Down-regulated in Transcription
  misc_feature: MA Experiment 108574 PARAMETER Experiment Name: At_Wounding__cDNA_P Parameter: Timepoint (hr) Value: 1
  misc_feature: MA Experiment 108574 PARAMETER Experiment Name: At_Wounding__cDNA_P Parameter: Tissue Value: Aerial
  misc_feature: MA Experiment 108574 PARAMETER Experiment Name: At_Wounding__cDNA_P Parameter: Treatment Value: Wounding vs. No Wounding
  misc_feature: MA Experiment ID: 108577 Result: Up-regulated in Transcription
  misc_feature: MA Experiment 108577 PARAMETER Experiment Name: At_42deg_Heat_cDNA_P Parameter: Temperature (deg C) Value: 42 vs. 22
  misc_feature: MA Experiment 108577 PARAMETER Experiment Name: At_42deg_Heat_cDNA_P Parameter: Timepoint (hr) Value: 6
  misc_feature: MA Experiment 108577 PARAMETER Experiment Name: At_42deg_Heat_cDNA_P Parameter: Tissue Value: Aerial
  misc_feature: MA Experiment ID: 108579 Result: Down-regulated in Transcription
  misc_feature: MA Experiment 108579 PARAMETER Experiment Name: At_4deg_Cold_cDNA_P Parameter: Temperature (deg C) Value: 4 vs. 22
  misc_feature: MA Experiment 108579 PARAMETER Experiment Name: At_4deg_Cold_cDNA_P Parameter: Timepoint (hr) Value: 6
  misc_feature: MA Experiment 108579 PARAMETER Experiment Name: At_4deg_Cold_cDNA_P Parameter: Tissue Value: Aerial
  misc_feature: MA Experiment ID: 108595 Result: Down-regulated in Transcription
  misc_feature: MA Experiment 108595 PARAMETER Experiment Name: At_Ler-pi_Ovule_cDNA_P Parameter: Plant Line Value: null
  misc_feature: MA Experiment ID: 20000069 Result: Down-regulated in Transcription
  misc_feature: MA Experiment 20000069 PARAMETER Experiment Name: At_100uM_ABA_Mutants_cDNA_P Parameter: Plant Line Value: CS23
  misc_feature: MA Experiment 20000069 PARAMETER Experiment Name: At_100uM_ABA_Mutants_cDNA_P Parameter: Timepoint (hr) Value: 6
  misc_feature: MA Experiment 20000069 PARAMETER Experiment Name: At_100uM_ABA_Mutants_cDNA_P Parameter: Tissue Value: Aerial
  misc_feature: MA Experiment 20000069 PARAMETER Experiment Name: At_100uM_ABA_Mutants_cDNA_P Parameter: Treatment Value: 100uM ABA vs. No Treatment
  misc_feature: MA Experiment ID: 20000070 Result: Down-regulated in Transcription
  misc_feature: MA Experiment 20000070 PARAMETER Experiment Name: At_100uM_ABA_Mutants_cDNA_P Parameter: Plant Line Value: CS24
  misc_feature: MA Experiment 20000070 PARAMETER Experiment Name: At_100uM_ABA_Mutants_cDNA_P Parameter: Timepoint (hr) Value: 6
  misc_feature: MA Experiment 20000070 PARAMETER Experiment Name: At_100uM_ABA_Mutants_cDNA_P Parameter: Tissue Value: Aerial
  misc_feature: MA Experiment 20000070 PARAMETER Experiment Name: At_100uM_ABA_Mutants_cDNA_P Parameter: Treatment Value: 100uM ABA vs. No Treatment
  misc_feature: MA Experiment ID: 20000071 Result: Down-regulated in Transcription
  misc_feature: MA Experiment 20000071 PARAMETER Experiment Name: At_100uM_ABA_Mutants_cDNA_P Parameter: Plant Line Value: CS8104
  misc_feature: MA Experiment 20000071 PARAMETER Experiment Name: At_100uM_ABA_Mutants_cDNA_P Parameter: Timepoint (hr) Value: 6
  misc_feature: MA Experiment 20000071 PARAMETER Experiment Name: At_100uM_ABA_Mutants_cDNA_P Parameter: Tissue Value: Aerial
  misc_feature: MA Experiment 20000071 PARAMETER Experiment Name: At_100uM_ABA_Mutants_cDNA_P Parameter: Treatment Value: 100uM ABA vs. No Treatment
  misc_feature: MA Experiment ID: 20000072 Result: Down-regulated in Transcription
  misc_feature: MA Experiment 20000072 PARAMETER Experiment Name: At_100uM_ABA_Mutants_cDNA_P Parameter: Plant Line Value: CS8105
  misc_feature: MA Experiment 20000072 PARAMETER Experiment Name: At_100uM_ABA_Mutants_cDNA_P Parameter: Timepoint (hr) Value: 6
  misc_feature: MA Experiment 20000072 PARAMETER Experiment Name: At_100uM_ABA_Mutants_cDNA_P Parameter: Tissue Value: Aerial
  misc_feature: MA Experiment 20000072 PARAMETER Experiment Name: At_100uM_ABA_Mutants_cDNA_P Parameter: Treatment Value: 100uM ABA vs. No Treatment
  misc_feature: MA Experiment ID: 20000086 Result: Down-regulated in Transcription
  misc_feature: MA Experiment 20000086 PARAMETER Experiment Name: At_100uM_ABA_Mutants_cDNA_P Parameter: Plant Line Value: CS22
  misc_feature: MA Experiment 20000086 PARAMETER Experiment Name: At_100uM_ABA_Mutants_cDNA_P Parameter: Timepoint (hr) Value: 6
  misc_feature: MA Experiment 20000086 PARAMETER Experiment Name: At_100uM_ABA_Mutants_cDNA_P Parameter: Tissue Value: Aerial
  misc_feature: MA Experiment 20000086 PARAMETER Experiment Name: At_100uM_ABA_Mutants_cDNA_P Parameter: Treatment Value: 100uM ABA vs. No Treatment
  misc_feature: MA Experiment ID: 20000087 Result: Down-regulated in Transcription
  misc_feature: MA Experiment 20000087 PARAMETER Experiment Name: At_100uM_ABA_Mutants_cDNA_P Parameter: Plant Line Value: WS
  misc_feature: MA Experiment 20000087 PARAMETER Experiment Name: At_100uM_ABA_Mutants_cDNA_P Parameter: Timepoint (hr) Value: 6
  misc_feature: MA Experiment 20000087 PARAMETER Experiment Name: At_100uM_ABA_Mutants_cDNA_P Parameter: Tissue Value: Aerial
  misc_feature: MA Experiment 20000087 PARAMETER Experiment Name: At_100uM_ABA_Mutants_cDNA_P Parameter: Treatment Value: 100uM ABA vs. No Treatment
  misc_feature: MA Experiment ID: 20000088 Result: Down-regulated in Transcription
  misc_feature: MA Experiment 20000088 PARAMETER Experiment Name: At_100uM_ABA_Mutants_cDNA_P Parameter: Plant Line Value: Landsberg
  misc_feature: MA Experiment 20000088 PARAMETER Experiment Name: At_100uM_ABA_Mutants_cDNA_P Parameter: Timepoint (hr) Value: 6
  misc_feature: MA Experiment 20000088 PARAMETER Experiment Name: At_100uM_ABA_Mutants_cDNA_P Parameter: Tissue Value: Aerial
  misc_feature: MA Experiment 20000088 PARAMETER Experiment Name: At_100uM_ABA_Mutants_cDNA_P Parameter: Treatment Value: 100uM ABA vs. No Treatment
  misc_feature: MA Experiment ID: 20000089 Result: Down-regulated in Transcription
  misc_feature: MA Experiment ID: 20000090 Result: Down-regulated in Transcription
  misc_feature: MA Experiment ID: 20000111 Result: Up-regulated in Transcription
  misc_feature: MA Experiment 20000111 PARAMETER Experiment Name: At_42deg_Heat_cDNA_P Parameter: Temperature (deg C) Value: 42 vs. 22
  misc_feature: MA Experiment 20000111 PARAMETER Experiment Name: At_42deg_Heat_cDNA_P Parameter: Timepoint (hr) Value: 6
  misc_feature: MA Experiment 20000111 PARAMETER Experiment Name: At_42deg_Heat_cDNA_P Parameter: Tissue Value: Aerial
  misc_feature: MA Experiment ID: 20000113 Result: Up-regulated in Transcription
  misc_feature: MA Experiment 20000113 PARAMETER Experiment Name: At_42deg_Heat_cDNA_P Parameter: Temperature (deg C) Value: 42 vs. 22
  misc_feature: MA Experiment 20000113 PARAMETER Experiment Name: At_42deg_Heat_cDNA_P Parameter: Timepoint (hr) Value: 8
  misc_feature: MA Experiment 20000113 PARAMETER Experiment Name: At_42deg_Heat_cDNA_P Parameter: Tissue Value: Aerial
  misc_feature: MA Experiment ID: 20000117 Result: Down-regulated in Transcription
  misc_feature: MA Experiment 20000117 PARAMETER Experiment Name: At_100uM_ABA_Mutants_cDNA_P Parameter: Plant Line Value: Columbia
  misc_feature: MA Experiment 20000117 PARAMETER Experiment Name: At_100uM_ABA_Mutants_cDNA_P Parameter: Timepoint (hr) Value: 6
  misc_feature: MA Experiment 20000117 PARAMETER Experiment Name: At_100uM_ABA_Mutants_cDNA_P Parameter: Tissue Value: Aerial
  misc_feature: MA Experiment 20000117 PARAMETER Experiment Name: At_100uM_ABA_Mutants_cDNA_P Parameter: Treatment Value: 100uM ABA vs. No Treatment
  misc_feature: MA Experiment ID: 20000173 Result: Up-regulated in Transcription
  misc_feature: MA Experiment 20000173 PARAMETER Experiment Name: At_42deg_Heat_P Parameter: Age (day) Value: 14
  misc_feature: MA Experiment 20000173 PARAMETER Experiment Name: At_42deg_Heat_P Parameter: Organism Value: A. thaliana
  misc_feature: MA Experiment 20000173 PARAMETER Experiment Name: At_42deg_Heat_P Parameter: Plant Line Value: WS
  misc_feature: MA Experiment 20000173 PARAMETER Experiment Name: At_42deg_Heat_P Parameter: Temperature (deg C) Value: 42 vs. 22
  misc_feature: MA Experiment 20000173 PARAMETER Experiment Name: At_42deg_Heat_P Parameter: Timepoint (hr) Value: 6
  misc_feature: MA Experiment 20000173 PARAMETER Experiment Name: At_42deg_Heat_P Parameter: Tissue Value: Aerial
  misc_feature: MA Experiment ID: 20000224 Result: Down-regulated in Transcription
  misc_feature: MA Experiment ID: 20000234 Result: Down-regulated in Transcription
  misc_feature: MA Experiment 20000234 PARAMETER Experiment Name: At_Siliques_P Parameter: Age (day) Value: 21
  misc_feature: MA Experiment 20000234 PARAMETER Experiment Name: At_Siliques_P Parameter: Organism Value: A. thaliana
  misc_feature: MA Experiment 20000234 PARAMETER Experiment Name: At_Siliques_P Parameter: Plant Line Value: WS
  misc_feature: MA Experiment 20000234 PARAMETER Experiment Name: At_Siliques_P Parameter: Tissue Value: Less Than 5mm Siliques vs. Whole Plant
  misc_feature: MA Experiment ID: 20000235 Result: Down-regulated in Transcription
  misc_feature: MA Experiment 20000235 PARAMETER Experiment Name: At_Siliques_P Parameter: Age (day) Value: 21
  misc_feature: MA Experiment 20000235 PARAMETER Experiment Name: At_Siliques_P Parameter: Organism Value: A. thaliana
  misc_feature: MA Experiment 20000235 PARAMETER Experiment Name: At_Siliques_P Parameter: Plant Line Value: WS
  misc_feature: MA Experiment 20000235 PARAMETER Experiment Name: At_Siliques_P Parameter: Tissue Value: 5-10mm Siliques vs. Whole Plant
  misc_feature: MA Experiment ID: 20000264 Result: Down-regulated in Transcription
  misc_feature: MA Experiment 20000264 PARAMETER Experiment Name: At_Open_Flower_P Parameter: Age (day) Value: 21
  misc_feature: MA Experiment 20000264 PARAMETER Experiment Name: At_Open_Flower_P Parameter: Plant Line Value: WS
  misc_feature: MA Experiment 20000264 PARAMETER Experiment Name: At_Open_Flower_P Parameter: Tissue Value: Open Flower vs. Whole Plant
  misc_feature: MA Experiment ID: 20000265 Result: Down-regulated in Transcription
  misc_feature: MA Experiment 20000265 PARAMETER Experiment Name: At_Open_Flower_P Parameter: Age (day) Value: 21
  misc_feature: MA Experiment 20000265 PARAMETER Experiment Name: At_Open_Flower_P Parameter: Plant Line Value: WS
  misc_feature: MA Experiment 20000265 PARAMETER Experiment Name: At_Open_Flower_P Parameter: Tissue Value: Closed Flower vs. Whole Plant
  misc_feature: MA Experiment ID: 20000286 Result: Down-regulated in Transcription
  misc_feature: MA Experiment 20000286 PARAMETER Experiment Name: At_Open_Flower_P Parameter: Age (day) Value: 21
  misc_feature: MA Experiment 20000286 PARAMETER Experiment Name: At_Open_Flower_P Parameter: Plant Line Value: WS
  misc_feature: MA Experiment 20000286 PARAMETER Experiment Name: At_Open_Flower_P Parameter: Tissue Value: Half Open vs. Whole Plant
  misc_feature: MA Experiment ID: 20000441 Result: Up-regulated in Transcription
  misc_feature: MA Experiment 20000441 PARAMETER Experiment Name: At_1uM_BR-BRZ__P Parameter: Tissue Value: Shoot Apices
  misc_feature: MA Experiment 20000441 PARAMETER Experiment Name: At_1uM_BR-BRZ__P Parameter: Treatment Value: 1uM BR vs. No Treatment
  misc_feature: MA Experiment ID: 20000443 Result: Up-regulated in Transcription
  misc_feature: MA Experiment 20000443 PARAMETER Experiment Name: At_1uM_BR-BRZ__P Parameter: Tissue Value: Shoot Apices
  misc_feature: MA Experiment 20000443 PARAMETER Experiment Name: At_1uM_BR-BRZ__P Parameter: Treatment Value: 1uM BRZ vs. No Treatment
  misc_feature: MA Experiment ID: 20000573 Result: Down-regulated in Transcription
  misc_feature: MA Experiment 20000573 PARAMETER Experiment Name: At_100uM_ABA_Mutants__P Parameter: Organism Value: A. thaliana
  misc_feature: MA Experiment 20000573 PARAMETER Experiment Name: At_100uM_ABA_Mutants__P Parameter: Plant Line Value: CS22 vs. Ler wt
  misc_feature: MA Experiment 20000573 PARAMETER Experiment Name: At_100uM_ABA_Mutants__P Parameter: Timepoint (hr) Value: N/A
  misc_feature: MA Experiment 20000573 PARAMETER Experiment Name: At_100uM_ABA_Mutants__P Parameter: Tissue Value: Whole Plant
  misc_feature: MA Experiment 20000573 PARAMETER Experiment Name: At_100uM_ABA_Mutants__P Parameter: Treatment Value: None
  misc_feature: MA Experiment ID: 20000574 Result: Down-regulated in Transcription
  misc_feature: MA Experiment 20000574 PARAMETER Experiment Name: At_100uM_ABA_Mutants__P Parameter: Organism Value: A. thaliana
  misc_feature: MA Experiment 20000574 PARAMETER Experiment Name: At_100uM_ABA_Mutants__P Parameter: Plant Line Value: CS23 vs. Ler wt
  misc_feature: MA Experiment 20000574 PARAMETER Experiment Name: At_100uM_ABA_Mutants__P Parameter: Timepoint (hr) Value: N/A
  misc_feature: MA Experiment 20000574 PARAMETER Experiment Name: At_100uM_ABA_Mutants__P Parameter: Tissue Value: Whole Plant
  misc_feature: MA Experiment 20000574 PARAMETER Experiment Name: At_100uM_ABA_Mutants__P Parameter: Treatment Value: None
  misc_feature: MA Experiment ID: 20001247 Result: Up-regulated in Transcription
  misc_feature: MA Experiment 20001247 PARAMETER Experiment Name: At_Far-red-induction_P Parameter: Age (day) Value: 7
  misc_feature: MA Experiment 20001247 PARAMETER Experiment Name: At_Far-red-induction_P Parameter: Light Value: Far-red vs. White
  misc_feature: MA Experiment 20001247 PARAMETER Experiment Name: At_Far-red-induction_P Parameter: Organism Value: A. thaliana
  misc_feature: MA Experiment 20001247 PARAMETER Experiment Name: At_Far-red-induction_P Parameter: Plant Line Value: Columbia
  misc_feature: MA Experiment 20001247 PARAMETER Experiment Name: At_Far-red-induction_P Parameter: Timepoint (hr) Value: 1
  misc_feature: MA Experiment 20001247 PARAMETER Experiment Name: At_Far-red-induction_P Parameter: Tissue Value: Whole Plant
  misc_feature: MA Experiment ID: 20001450 Result: Up-regulated in Transcription
  misc_feature: MA Experiment 20001450 PARAMETER Experiment Name: At_Far-red-induction_P Parameter: Age (day) Value: 7
  misc_feature: MA Experiment 20001450 PARAMETER Experiment Name: At_Far-red-induction_P Parameter: Light Value: Far-red vs. White
  misc_feature: MA Experiment 20001450 PARAMETER Experiment Name: At_Far-red-induction_P Parameter: Organism Value: A. thaliana
  misc_feature: MA Experiment 20001450 PARAMETER Experiment Name: At_Far-red-induction_P Parameter: Plant Line Value: Columbia
  misc_feature: MA Experiment 20001450 PARAMETER Experiment Name: At_Far-red-induction_P Parameter: Timepoint (hr) Value: 8
  misc_feature: MA Experiment 20001450 PARAMETER Experiment Name: At_Far-red-induction_P Parameter: Tissue Value: Whole Plant
  misc_feature: MA Experiment ID: 20001451 Result: Up-regulated in Transcription
  misc_feature: MA Experiment 20001451 PARAMETER Experiment Name: At_Far-red-induction_P Parameter: Age (day) Value: 7
  misc_feature: MA Experiment 20001451 PARAMETER Experiment Name: At_Far-red-induction_P Parameter: Light Value: Far-red vs. White
  misc_feature: MA Experiment 20001451 PARAMETER Experiment Name: At_Far-red-induction_P Parameter: Organism Value: A. thaliana
  misc_feature: MA Experiment 20001451 PARAMETER Experiment Name: At_Far-red-induction_P Parameter: Plant Line Value: Columbia
  misc_feature: MA Experiment 20001451 PARAMETER Experiment Name: At_Far-red-induction_P Parameter: Timepoint (hr) Value: 24
  misc_feature: MA Experiment 20001451 PARAMETER Experiment Name: At_Far-red-induction_P Parameter: Tissue Value: Whole Plant
  misc_feature: MA Experiment ID: 20001557 Result: Down-regulated in Transcription
  misc_feature: MA Experiment 20001557 PARAMETER Experiment Name: At_Drought_Soil_Dry_P Parameter: Age (day) Value: 27
  misc_feature: MA Experiment 20001557 PARAMETER Experiment Name: At_Drought_Soil_Dry_P Parameter: Organism Value: A. thaliana
  misc_feature: MA Experiment 20001557 PARAMETER Experiment Name: At_Drought_Soil_Dry_P Parameter: Plant Line Value: WS
  misc_feature: MA Experiment 20001557 PARAMETER Experiment Name: At_Drought_Soil_Dry_P Parameter: Post Timepoint (hr) Value: 3
  misc_feature: MA Experiment 20001557 PARAMETER Experiment Name: At_Drought_Soil_Dry_P Parameter: Post-Treatment Value: Re-Water vs. No Drought
  misc_feature: MA Experiment 20001557 PARAMETER Experiment Name: At_Drought_Soil_Dry_P Parameter: Timepoint (day) Value: 13
  misc_feature: MA Experiment 20001557 PARAMETER Experiment Name: At_Drought_Soil_Dry_P Parameter: Treatment Value: Drought vs. No Drought
ggatatcgtcgtcatttctctctctaaccccttctctcttcagtctctctctctctagacgatctctatcttgaataaaataccgataatgacctcaaccaatccggtggtcgccgaagtaataccggcggaaacttctacagatgctacagagacgacgattgcaacgacggaagctggtgaagcaccggagaagaaggtgaggaaagcttacacaatcaccaagtctagagagagttggactgaaggagaacacgacaagtttctggaagctcttcaattgtttgatcgtgactggaaaaagatagaagattttgttggttcaaagacagttattcagatcaggagccatgcccaaaaatactttctaaaggtccaaaaaaatgggactttagcacatgttccaccccctaggcctaagcgcaaagctgctcatccatatcctcaaaaggcatcgaaaaatgctcaaatgtcgcttcacgtttccatgtcctttcctactcaaataaataacctgcctggatatactccatgggatgatgatacatctgcattgttaaacattgctgtaagtggggttattccaccagaagatgaacttgatactctttgtggagcagaagttgatgttggatcaaatgacatgataagtgaaactagtccttcagcatctggtatcggaagctcaagcagaacactatcagattctaagggtttgagactggcgaaacaagctccctcaatgcatggtcttcctgattttgctgaggtttataacttcattgggagtgtgttcgatcctgacagcaaaggccgcatgaaaaagctcaaggaaatggatcctataaatttcgaaactgttttgctgttgatgagaaacctcacagtgaacttgtcaaaccctgactttgaacctacttctgaatatgttgatgctgcagaggaaggtcatgaacacttaagctcttagctgtttgtgcactcaacaagttatatatcttcttgacgacttcttgctcgcaacaactctctaccagctatcaaatgcattctacggttgttgtctgaggagaacataactgagtcgtcgtcacaaacaagaggaacatatgcagtttcggtcagaaccagtcgtgtgaatggtagatatatgtatgtgtgtgtagaaaatggttaccaattgtatcttctttttgataattattttttcatgccttttgtaatatgtaagtttctttacctcgttctctgattggttattttctggttatctgtttaaccaaaagctatgtaacacagtagcaaattgttacttaactcggaagtgagatacataactctgttgtattgcacttgtatcaagcgttaacgtcc

SEQ ID NO: 76897 - protein, 293 aa, Arabidopsis thaliana; identical to SEQ ID NO: 46730
  peptide (1)..(293): Ceres Seq. ID no. 12384912
  misc_feature (48)..(93): Pfam Name: Myb-like DNA-binding domain Pfam Description: Myb-like DNA-binding domain
  misc_feature (1)..(293): Homolog of NCBI NO: 18414039 NR Description: myb family transcription factor; protein id: supported by cDNA: gi_14596212, supported by cDNA: gi_20148386
  misc_feature (1)..(293): Homolog of NCBI NO: 14596213 NR Description: putative protein [Arabidopsis thaliana]
  misc_feature (1)..(293): Homolog of NCBI NO: 11357907 NR Description: hypothetical protein F9G14.150 - Arabidopsis >gi|7413559|emb|CAB86038.1| putative protein [Arabidopsis
  misc_feature (3)..(277): Homolog of NCBI NO: 30680926 NR Description: myb family transcription factor [Arabidopsis >gi|20268705|gb|AAM14056.1| unknown protein [Arabidopsis >gi|21689883|gb|AAM67502.1| unknown protein [Arabidopsis
  misc_feature (14)..(289): Homolog of NCBI NO: 30696221 NR Description: myb family transcription factor [Arabidopsis
  misc_feature (14)..(289): Homolog of NCBI NO: 30696225 NR Description: myb family transcription factor [Arabidopsis >gi|25082907|gb|AAN72013.1| putative protein [Arabidopsis
  misc_feature (14)..(275): Homolog of NCBI NO: 8953721 NR Description: contains similarity to MYB-related DNA-binding
  misc_feature (17)..(274): Homolog of NCBI NO: 15234118 NR Description: myb family transcription factor; protein id:
  misc_feature (3)..(125): Homolog of NCBI NO: 6682239 NR Description: putative MYB-related protein [Arabidopsis
  misc_feature (1)..(124): Homolog of NCBI NO: 2505876 NR Description: MYB-related protein [Arabidopsis thaliana]

SEQ ID NO: 76898 - protein, 166 aa, Arabidopsis thaliana; identical to SEQ ID NO: 22744
  peptide (1)..(166): Ceres Seq. ID no. 12384913
  misc_feature (1)..(166): Homolog of NCBI NO: 18414039 NR Description: myb family transcription factor; protein id: supported by cDNA: gi_14596212, supported by cDNA: gi_20148386
  misc_feature (1)..(166): Homolog of NCBI NO: 14596213 NR Description: putative protein [Arabidopsis thaliana]
  misc_feature (1)..(166): Homolog of NCBI NO: 11357907 NR Description: hypothetical protein F9G14.150 - Arabidopsis >gi|7413559|emb|CAB86038.1| putative protein [Arabidopsis
  misc_feature (1)..(150): Homolog of NCBI NO: 30680926 NR Description: myb family transcription factor [Arabidopsis >gi|20268705|gb|AAM14056.1| unknown protein [Arabidopsis >gi|21689883|gb|AAM67502.1| unknown protein [Arabidopsis
  misc_feature (1)..(162): Homolog of NCBI NO: 30696221 NR Description: myb family transcription factor [Arabidopsis
  misc_feature (1)..(162): Homolog of NCBI NO: 30696225 NR Description: myb family transcription factor [Arabidopsis >gi|25082907|gb|AAN72013.1| putative protein [Arabidopsis
  misc_feature (1)..(148): Homolog of NCBI NO: 8953721 NR Description: contains similarity to MYB-related DNA-binding
  misc_feature (1)..(147): Homolog of NCBI NO: 15234118 NR Description: myb family transcription factor; protein id:
  misc_feature (96)..(156): Homolog of NCBI NO: 15223419 NR Description: myb family transcription factor; protein id:
  misc_feature (95)..(163): Homolog of NCBI NO: 34897744 NR Description: Similar to Arabidopsis thaliana DNA chromosome 4, I contig fragment No. 6, membrane protein homolog. (Z97341)

SEQ ID NO: 76899 - protein, 160 aa, Arabidopsis thaliana; identical to SEQ ID NO: 22745
  peptide (1)..(160): Ceres Seq. ID no. 12384914
  misc_feature (1)..(160): Homolog of NCBI NO: 18414039 NR Description: myb family transcription factor; protein id: supported by cDNA: gi_14596212, supported by cDNA: gi_20148386
  misc_feature (1)..(160): Homolog of NCBI NO: 14596213 NR Description: putative protein [Arabidopsis thaliana]
  misc_feature (1)..(160): Homolog of NCBI NO: 11357907 NR Description: hypothetical protein F9G14.150 - Arabidopsis >gi|7413559|emb|CAB86038.1| putative protein [Arabidopsis
  misc_feature (1)..(144): Homolog of NCBI NO: 30680926 NR Description: myb family transcription factor [Arabidopsis >gi|20268705|gb|AAM14056.1| unknown protein [Arabidopsis >gi|21689883|gb|AAM67502.1| unknown protein [Arabidopsis
  misc_feature (1)..(156): Homolog of NCBI NO: 30696221 NR Description: myb family transcription factor [Arabidopsis
  misc_feature (1)..(156): Homolog of NCBI NO: 30696225 NR Description: myb family transcription factor [Arabidopsis >gi|25082907|gb|AAN72013.1| putative protein [Arabidopsis
  misc_feature (1)..(142): Homolog of NCBI NO: 8953721 NR Description: contains similarity to MYB-related DNA-binding
  misc_feature (1)..(141): Homolog of NCBI NO: 15234118 NR Description: myb family transcription factor; protein id:
  misc_feature (90)..(150): Homolog of NCBI NO: 15223419 NR Description: myb family transcription factor; protein id:
  misc_feature (89)..(157): Homolog of NCBI NO: 34897744 NR Description: Similar to Arabidopsis thaliana DNA chromosome 4, I contig fragment No. 6, membrane protein homolog. (Z97341)

SEQ ID NO: 76900 - DNA, 1063 bp, Arabidopsis thaliana
  misc_feature (1)..(1063): Ceres Seq. ID no. 12389077
  misc_feature: MA Experiment ID: 108434 Result: Down-regulated in Transcription
  misc_feature: MA Experiment 108434 PARAMETER Experiment Name: At_Root_Tips_cDNA_P Parameter: Tissue Value: Root Tips
  misc_feature: MA Experiment ID: 108488 Result: Down-regulated in Transcription
  misc_feature: MA Experiment ID: 108576 Result: Up-regulated in Transcription
  misc_feature: MA Experiment 108576 PARAMETER Experiment Name: At_42deg_Heat_cDNA_P Parameter: Temperature (deg C) Value: 42 vs. 22
  misc_feature: MA Experiment 108576 PARAMETER Experiment Name: At_42deg_Heat_cDNA_P Parameter: Timepoint (hr) Value: 1
  misc_feature: MA Experiment 108576 PARAMETER Experiment Name: At_42deg_Heat_cDNA_P Parameter: Tissue Value: Aerial
  misc_feature: MA Experiment ID: 108579 Result: Down-regulated in Transcription
  misc_feature: MA Experiment 108579 PARAMETER Experiment Name: At_4deg_Cold_cDNA_P Parameter: Temperature (deg C) Value: 4 vs. 22
  misc_feature: MA Experiment 108579 PARAMETER Experiment Name: At_4deg_Cold_cDNA_P Parameter: Timepoint (hr) Value: 6
  misc_feature: MA Experiment 108579 PARAMETER Experiment Name: At_4deg_Cold_cDNA_P Parameter: Tissue Value: Aerial
  misc_feature: MA Experiment ID: 20000111 Result: Up-regulated in Transcription
  misc_feature: MA Experiment 20000111 PARAMETER Experiment Name: At_42deg_Heat_cDNA_P Parameter: Temperature (deg C) Value: 42 vs. 22
  misc_feature: MA Experiment 20000111 PARAMETER Experiment Name: At_42deg_Heat_cDNA_P Parameter: Timepoint (hr) Value: 6
  misc_feature: MA Experiment 20000111 PARAMETER Experiment Name: At_42deg_Heat_cDNA_P Parameter: Tissue Value: Aerial
  misc_feature: MA Experiment ID: 20000112 Result: Up-regulated in Transcription
  misc_feature: MA Experiment 20000112 PARAMETER Experiment Name: At_42deg_Heat_cDNA_P Parameter: Temperature (deg C) Value: 42 vs. 22
  misc_feature: MA Experiment 20000112 PARAMETER Experiment Name: At_42deg_Heat_cDNA_P Parameter: Timepoint (hr) Value: 2
  misc_feature: MA Experiment 20000112 PARAMETER Experiment Name: At_42deg_Heat_cDNA_P Parameter: Tissue Value: Aerial
  misc_feature: MA Experiment ID: 20000113 Result: Up-regulated in Transcription
  misc_feature: MA Experiment 20000113 PARAMETER Experiment Name: At_42deg_Heat_cDNA_P Parameter: Temperature (deg C) Value: 42 vs. 22
  misc_feature: MA Experiment 20000113 PARAMETER Experiment Name: At_42deg_Heat_cDNA_P Parameter: Timepoint (hr) Value: 8
  misc_feature: MA Experiment 20000113 PARAMETER Experiment Name: At_42deg_Heat_cDNA_P Parameter: Tissue Value: Aerial
  misc_feature: MA Experiment ID: 20000144 Result: Up-regulated in Transcription
  misc_feature: MA Experiment 20000144 PARAMETER Experiment Name: At_42deg_Heat_cDNA_P Parameter: Temperature (deg C) Value: 42 vs. 22
  misc_feature: MA Experiment 20000144 PARAMETER Experiment Name: At_42deg_Heat_cDNA_P Parameter: Timepoint (hr) Value: 1
  misc_feature: MA Experiment 20000144 PARAMETER Experiment Name: At_42deg_Heat_cDNA_P Parameter: Tissue Value: Aerial
  misc_feature: MA Experiment ID: 20000224 Result: Down-regulated in Transcription
gtaacggtgtcgtcgtcgccaaacgatttgcctcttcctaaagggtacaacaagaatggaagaagagtatgagagtcgtcgattgaggagatgggaagagttggacactgacatcttagtaagaattttccagaagtttagcgtctttgagttgacttcgggattagctcatgtttgtagaggatggagagctgcttgttgcgatccgattctttggaagacggtggatttgtcaaacatgagatctagtttcatcaagatcccattagagccttatgtctatgtggaacgccgatctgatgaggccctaacccgcatcctgaaactctccatgaaccttagcggaggaagcacgaggaccttgatttttcatttcaacttgttcttgagtgatgatcagcttacttacaccgcagaaaggtgtccagggttgagacgggtcgtcctaccggcttggaacagaataaagaagactggtatatgcaaagcgataagaatctggaaagatctagagtcactaacaatgccaagcatcgcaaacccgccttatctcttaacagaaattgccaagaactgcaagaattttaaagagctgaagatcatgggtccattcgaggtcttctttgcaaacacgctcatcacttgcctcccaaacatcaaaacactcagcatcagatgctcggcgataaagcgggaagcactgatgaaaatccttgacggattaccaagccttgaagtgctcaacatatcacactctcacctagtggagtacagcggttggcagcctcagcagaaggtgattgttagagagctcgataagacgataatggagaaaacagcaaggctaaagaaattcttgacttgcatggatcacaagacgtgtgtgatgtgtcagaggactgaaaacgatgaagggattgtgagatggtacaagtatgaggaaggagactggaaggttgatgaagtgagttctcttcatctttgatgtttctgctgtgatcattctctgtgaaggacttaacttgttattgttctcatctttgactgttgaattgtttatttc

SEQ ID NO: 76901 - protein, 309 aa, Arabidopsis thaliana; identical to SEQ ID NO: 37206
  peptide (1)..(309): Ceres Seq. ID no. 12389078
  misc_feature (1)..(309): Homolog of NCBI NO: 15229043 NR Description: F-box protein family; protein id: At3g48880.2, by cDNA: 99337., supported by cDNA: gi_15028346, supported by gi_19310704 [Arabidopsis thaliana] >gi|11358182|pir||T49284
  misc_feature (1)..(309): Homolog of NCBI NO: 21618163 NR Description: unknown [Arabidopsis thaliana]
  misc_feature (111)..(309): Homolog of NCBI NO: 37535806 NR Description: putative Rhizobium-induced nodule development
  misc_feature (12)..(222): Homolog of NCBI NO: 37718854 NR Description: hypothetical protein [Oryza sativa (japonica
  misc_feature (11)..(231): Homolog of NCBI NO: 30692594 NR Description: predicted protein [Arabidopsis thaliana] contains similarity to Medicago truncatula N7 protein (GB:Y17613)

SEQ ID NO: 76902 - protein, 248 aa, Arabidopsis thaliana; identical to SEQ ID NO: 37207
  peptide (1)..(248): Ceres Seq. ID no. 12389079
  misc_feature (1)..(248): Homolog of NCBI NO: 15229043 NR Description: F-box protein family; protein id: At3g48880.2, by cDNA: 99337., supported by cDNA: gi_15028346, supported by gi_19310704 [Arabidopsis thaliana] >gi|11358182|pir||T49284
  misc_feature (1)..(248): Homolog of NCBI NO: 21618163 NR Description: unknown [Arabidopsis thaliana]
  misc_feature (50)..(248): Homolog of NCBI NO: 37535806 NR Description: putative Rhizobium-induced nodule development
  misc_feature (1)..(161): Homolog of NCBI NO: 37718854 NR Description: hypothetical protein [Oryza sativa (japonica
  misc_feature (1)..(170): Homolog of NCBI NO: 30692594 NR Description: predicted protein [Arabidopsis thaliana] contains similarity to Medicago truncatula N7 protein (GB:Y17613)

SEQ ID NO: 76903 - protein, 217 aa, Arabidopsis thaliana; identical to SEQ ID NO: 37208
  peptide (1)..(217): Ceres Seq. ID no. 12389080
  misc_feature (1)..(217): Homolog of NCBI NO: 15229043 NR Description: F-box protein family; protein id: At3g48880.2, by cDNA: 99337., supported by cDNA: gi_15028346, supported by gi_19310704 [Arabidopsis thaliana] >gi|11358182|pir||T49284
  misc_feature (1)..(217): Homolog of NCBI NO: 21618163 NR Description: unknown [Arabidopsis thaliana]
  misc_feature (19)..(217): Homolog of NCBI NO: 37535806 NR Description: putative Rhizobium-induced nodule development
  misc_feature (1)..(130): Homolog of NCBI NO: 37718854 NR Description: hypothetical protein [Oryza sativa (japonica
  misc_feature (1)..(139): Homolog of NCBI NO: 30692594 NR Description: predicted protein [Arabidopsis thaliana] contains similarity to Medicago truncatula N7 protein (GB:Y17613)

SEQ ID NO: 76904 - DNA, 967 bp, Arabidopsis thaliana
  misc_feature (1)..(967): Ceres Seq. ID no. 12389183
  misc_feature: MA Experiment ID: 108461 Result: Down-regulated in Transcription
  misc_feature: MA Experiment 108461 PARAMETER Experiment Name: At_Germinating_Seeds_cDNA_P Parameter: Age (day) Value: 1 vs. 0
  misc_feature: MA Experiment 108461 PARAMETER Experiment Name: At_Germinating_Seeds_cDNA_P Parameter: Tissue Value: Germinating Seeds
  misc_feature: MA Experiment ID: 108501 Result: Up-regulated in Transcription
  misc_feature: MA Experiment 108501 PARAMETER Experiment Name: At_ap2_floral_buds_cDNA_P Parameter: Plant Line Value: ap2 (Ler.)
  misc_feature: MA Experiment 108501 PARAMETER Experiment Name: At_ap2_floral_buds_cDNA_P Parameter: Tissue Value: Closed Flower
  misc_feature: MA Experiment ID: 108572 Result: Up-regulated in Transcription
  misc_feature: MA Experiment 108572 PARAMETER Experiment Name: At_Drought_cDNA_P Parameter: Timepoint (hr) Value: 1
  misc_feature: MA Experiment 108572 PARAMETER Experiment Name: At_Drought_cDNA_P Parameter: Tissue Value: Aerial
  misc_feature: MA Experiment 108572 PARAMETER Experiment Name: At_Drought_cDNA_P Parameter: Treatment Value: Drought vs. No Drought
  misc_feature: MA Experiment ID: 108576 Result: Up-regulated in Transcription
  misc_feature: MA Experiment 108576 PARAMETER Experiment Name: At_42deg_Heat_cDNA_P Parameter: Temperature (deg C) Value: 42 vs. 22
  misc_feature: MA Experiment 108576 PARAMETER Experiment Name: At_42deg_Heat_cDNA_P Parameter: Timepoint (hr) Value: 1
  misc_feature: MA Experiment 108576 PARAMETER Experiment Name: At_42deg_Heat_cDNA_P Parameter: Tissue Value: Aerial
  misc_feature: MA Experiment ID: 108577 Result: Up-regulated in Transcription
  misc_feature: MA Experiment 108577 PARAMETER Experiment Name: At_42deg_Heat_cDNA_P Parameter: Temperature (deg C) Value: 42 vs. 22
  misc_feature: MA Experiment 108577 PARAMETER Experiment Name: At_42deg_Heat_cDNA_P Parameter: Timepoint (hr) Value: 6
  misc_feature: MA Experiment 108577 PARAMETER Experiment Name: At_42deg_Heat_cDNA_P Parameter: Tissue Value: Aerial
  misc_feature: MA Experiment ID: 108595 Result: Up-regulated in Transcription
  misc_feature: MA Experiment 108595 PARAMETER Experiment Name: At_Ler-pi_Ovule_cDNA_P Parameter: Plant Line Value: null
  misc_feature: MA Experiment ID: 108607 Result: Up-regulated in Transcription
  misc_feature: MA Experiment 108607 PARAMETER Experiment Name: At_100uM_ABA_cDNA_P Parameter: Timepoint (hr) Value: 4
  misc_feature: MA Experiment 108607 PARAMETER Experiment Name: At_100uM_ABA_cDNA_P Parameter: Tissue Value: Aerial
  misc_feature: MA Experiment 108607 PARAMETER Experiment Name: At_100uM_ABA_cDNA_P Parameter: Treatment Value: 100uM ABA vs. No Treatment
  misc_feature: MA Experiment ID: 108608 Result: Up-regulated in Transcription
  misc_feature: MA Experiment 108608 PARAMETER Experiment Name: At_100uM_ABA_cDNA_P Parameter: Timepoint (hr) Value: 1
  misc_feature: MA Experiment 108608 PARAMETER Experiment Name: At_100uM_ABA_cDNA_P Parameter: Tissue Value: Aerial
  misc_feature: MA Experiment 108608 PARAMETER Experiment Name: At_100uM_ABA_cDNA_P Parameter: Treatment Value: 100uM ABA vs. No Treatment
  misc_feature: MA Experiment ID: 20000089 Result: Down-regulated in Transcription
  misc_feature: MA Experiment ID: 20000093 Result: Up-regulated in Transcription
  misc_feature: MA Experiment 20000093 PARAMETER Experiment Name: At_42deg_Heat_cDNA_P Parameter: Temperature (deg C) Value: 42 vs. 22
  misc_feature: MA Experiment 20000093 PARAMETER Experiment Name: At_42deg_Heat_cDNA_P Parameter: Timepoint (hr) Value: 0.5
  misc_feature: MA Experiment 20000093 PARAMETER Experiment Name: At_42deg_Heat_cDNA_P Parameter: Tissue Value: Aerial
  misc_feature: MA Experiment ID: 20000111 Result: Up-regulated in Transcription
  misc_feature: MA Experiment 20000111 PARAMETER Experiment Name: At_42deg_Heat_cDNA_P Parameter: Temperature (deg C) Value: 42 vs. 22
  misc_feature: MA Experiment 20000111 PARAMETER Experiment Name: At_42deg_Heat_cDNA_P Parameter: Timepoint (hr) Value: 6
  misc_feature: MA Experiment 20000111 PARAMETER Experiment Name: At_42deg_Heat_cDNA_P Parameter: Tissue Value: Aerial
  misc_feature: MA Experiment ID: 20000112 Result: Up-regulated in Transcription
  misc_feature: MA Experiment 20000112 PARAMETER Experiment Name: At_42deg_Heat_cDNA_P Parameter: Temperature (deg C) Value: 42 vs. 22
  misc_feature: MA Experiment 20000112 PARAMETER Experiment Name: At_42deg_Heat_cDNA_P Parameter: Timepoint (hr) Value: 2
  misc_feature: MA Experiment 20000112 PARAMETER Experiment Name: At_42deg_Heat_cDNA_P Parameter: Tissue Value: Aerial
  misc_feature: MA Experiment ID: 20000113 Result: Up-regulated in Transcription
  misc_feature: MA Experiment 20000113 PARAMETER Experiment Name: At_42deg_Heat_cDNA_P Parameter: Temperature (deg C) Value: 42 vs. 22
  misc_feature: MA Experiment 20000113 PARAMETER Experiment Name: At_42deg_Heat_cDNA_P Parameter: Timepoint (hr) Value: 8
  misc_feature: MA Experiment 20000113 PARAMETER Experiment Name: At_42deg_Heat_cDNA_P Parameter: Tissue Value: Aerial
  misc_feature: MA Experiment ID: 20000144 Result: Up-regulated in Transcription
  misc_feature: MA Experiment 20000144 PARAMETER Experiment Name: At_42deg_Heat_cDNA_P Parameter: Temperature (deg C) Value: 42 vs. 22
  misc_feature: MA Experiment 20000144 PARAMETER Experiment Name: At_42deg_Heat_cDNA_P Parameter: Timepoint (hr) Value: 1
  misc_feature: MA Experiment 20000144 PARAMETER Experiment Name: At_42deg_Heat_cDNA_P Parameter: Tissue Value: Aerial
  misc_feature: MA Experiment ID: 20000166 Result: Up-regulated in Transcription
  misc_feature: MA Experiment 20000166 PARAMETER Experiment Name: At_100uM_ABA_P Parameter: Age (day) Value: 14
  misc_feature: MA Experiment 20000166 PARAMETER Experiment Name: At_100uM_ABA_P Parameter: Organism Value: A. thaliana
  misc_feature: MA Experiment 20000166 PARAMETER Experiment Name: At_100uM_ABA_P Parameter: Plant Line Value: WS
  misc_feature: MA Experiment 20000166 PARAMETER Experiment Name: At_100uM_ABA_P Parameter: Timepoint (hr) Value: 1
  misc_feature: MA Experiment 20000166 PARAMETER Experiment Name: At_100uM_ABA_P Parameter: Tissue Value: Aerial
  misc_feature: MA Experiment 20000166 PARAMETER Experiment Name: At_100uM_ABA_P Parameter: Treatment Value: 100uM ABA vs. No Treatment
  misc_feature: MA Experiment ID: 20000171 Result: Up-regulated in Transcription
  misc_feature: MA Experiment 20000171 PARAMETER Experiment Name: At_42deg_Heat_P Parameter: Age (day) Value: 14
  misc_feature: MA Experiment 20000171 PARAMETER Experiment Name: At_42deg_Heat_P Parameter: Organism Value: A. thaliana
  misc_feature: MA Experiment 20000171 PARAMETER Experiment Name: At_42deg_Heat_P Parameter: Plant Line Value: WS
  misc_feature: MA Experiment 20000171 PARAMETER Experiment Name: At_42deg_Heat_P Parameter: Temperature (deg C) Value: 42 vs. 22
  misc_feature: MA Experiment 20000171 PARAMETER Experiment Name: At_42deg_Heat_P Parameter: Timepoint (hr) Value: 1
  misc_feature: MA Experiment 20000171 PARAMETER Experiment Name: At_42deg_Heat_P Parameter: Tissue Value: Aerial
  misc_feature: MA Experiment ID: 20000173 Result: Up-regulated in Transcription
  misc_feature: MA Experiment 20000173 PARAMETER Experiment Name: At_42deg_Heat_P Parameter: Age (day) Value: 14
  misc_feature: MA Experiment 20000173 PARAMETER Experiment Name: At_42deg_Heat_P Parameter: Organism Value: A. thaliana
  misc_feature: MA Experiment 20000173 PARAMETER Experiment Name: At_42deg_Heat_P Parameter: Plant Line Value: WS
  misc_feature: MA Experiment 20000173 PARAMETER Experiment Name: At_42deg_Heat_P Parameter: Temperature (deg C) Value: 42 vs. 22
  misc_feature: MA Experiment 20000173 PARAMETER Experiment Name: At_42deg_Heat_P Parameter: Timepoint (hr) Value: 6
  misc_feature: MA Experiment 20000173 PARAMETER Experiment Name: At_42deg_Heat_P Parameter: Tissue Value: Aerial
  misc_feature: MA Experiment ID: 20000234 Result: Up-regulated in Transcription
  misc_feature: MA Experiment 20000234 PARAMETER Experiment Name: At_Siliques_P Parameter: Age (day) Value: 21
  misc_feature: MA Experiment 20000234 PARAMETER Experiment Name: At_Siliques_P Parameter: Organism Value: A. thaliana
  misc_feature: MA Experiment 20000234 PARAMETER Experiment Name: At_Siliques_P Parameter: Plant Line Value: WS
  misc_feature: MA Experiment 20000234 PARAMETER Experiment Name: At_Siliques_P Parameter: Tissue Value: Less Than 5mm Siliques vs. Whole Plant
  misc_feature: MA Experiment ID: 20001248 Result: Down-regulated in Transcription
  misc_feature: MA Experiment 20001248 PARAMETER Experiment Name: At_Far-red-induction_P Parameter: Age (day) Value: 7
  misc_feature: MA Experiment 20001248 PARAMETER Experiment Name: At_Far-red-induction_P Parameter: Light Value: Far-red vs. White
  misc_feature: MA Experiment 20001248 PARAMETER Experiment Name: At_Far-red-induction_P Parameter: Organism Value: A. thaliana
  misc_feature: MA Experiment 20001248 PARAMETER Experiment Name: At_Far-red-induction_P Parameter: Plant Line Value: Columbia
  misc_feature: MA Experiment 20001248 PARAMETER Experiment Name: At_Far-red-induction_P Parameter: Timepoint (hr) Value: 4
  misc_feature: MA Experiment 20001248 PARAMETER Experiment Name: At_Far-red-induction_P Parameter: Tissue Value: Whole Plant
  misc_feature: MA Experiment ID: 20001450 Result: Down-regulated in Transcription
  misc_feature: MA Experiment 20001450 PARAMETER Experiment Name: At_Far-red-induction_P Parameter: Age (day) Value: 7
  misc_feature: MA Experiment 20001450 PARAMETER Experiment Name: At_Far-red-induction_P Parameter: Light Value: Far-red vs. White
  misc_feature: MA Experiment 20001450 PARAMETER Experiment Name: At_Far-red-induction_P Parameter: Organism Value: A. thaliana
  misc_feature: MA Experiment 20001450 PARAMETER Experiment Name: At_Far-red-induction_P Parameter: Plant Line Value: Columbia
  misc_feature: MA Experiment 20001450 PARAMETER Experiment Name: At_Far-red-induction_P Parameter: Timepoint (hr) Value: 8
  misc_feature: MA Experiment 20001450 PARAMETER Experiment Name: At_Far-red-induction_P Parameter: Tissue Value: Whole Plant
  misc_feature: MA Experiment ID: 20001554 Result: Up-regulated in Transcription
  misc_feature: MA Experiment 20001554 PARAMETER Experiment Name: At_Drought_Soil_Dry_P Parameter: Age (day) Value: 21
  misc_feature: MA Experiment 20001554 PARAMETER Experiment Name: At_Drought_Soil_Dry_P Parameter: Organism Value: A. thaliana
  misc_feature: MA Experiment 20001554 PARAMETER Experiment Name: At_Drought_Soil_Dry_P Parameter: Plant Line Value: WS
  misc_feature: MA Experiment 20001554 PARAMETER Experiment Name: At_Drought_Soil_Dry_P Parameter: Post Timepoint (hr) Value: None
  misc_feature: MA Experiment 20001554 PARAMETER Experiment Name: At_Drought_Soil_Dry_P Parameter: Post-Treatment Value: None
  misc_feature: MA Experiment 20001554 PARAMETER Experiment Name: At_Drought_Soil_Dry_P Parameter: Timepoint (day) Value: 7
  misc_feature: MA Experiment 20001554 PARAMETER Experiment Name: At_Drought_Soil_Dry_P Parameter: Treatment Value: Drought vs. No Drought
  misc_feature: MA Experiment ID: 20001555 Result: Up-regulated in Transcription
  misc_feature: MA Experiment 20001555 PARAMETER Experiment Name: At_Drought_Soil_Dry_P Parameter: Age (day) Value: 24
  misc_feature: MA Experiment 20001555 PARAMETER Experiment Name: At_Drought_Soil_Dry_P Parameter: Organism Value: A. thaliana
  misc_feature: MA Experiment 20001555 PARAMETER Experiment Name: At_Drought_Soil_Dry_P Parameter: Plant Line Value: WS
  misc_feature: MA Experiment 20001555 PARAMETER Experiment Name: At_Drought_Soil_Dry_P Parameter: Post Timepoint (hr) Value: None
  misc_feature: MA Experiment 20001555 PARAMETER Experiment Name: At_Drought_Soil_Dry_P Parameter: Post-Treatment Value: None
  misc_feature: MA Experiment 20001555 PARAMETER Experiment Name: At_Drought_Soil_Dry_P Parameter: Timepoint (day) Value: 10
  misc_feature: MA Experiment 20001555 PARAMETER Experiment Name: At_Drought_Soil_Dry_P Parameter: Treatment Value: Drought vs. No Drought
  misc_feature: MA Experiment ID: 20001556 Result: Up-regulated in Transcription
  misc_feature: MA Experiment 20001556 PARAMETER Experiment Name: At_Drought_Soil_Dry_P Parameter: Age (day) Value: 26
  misc_feature: MA Experiment 20001556 PARAMETER Experiment Name: At_Drought_Soil_Dry_P Parameter: Organism Value: A. thaliana
  misc_feature: MA Experiment 20001556 PARAMETER Experiment Name: At_Drought_Soil_Dry_P Parameter: Plant Line Value: WS
  misc_feature: MA Experiment 20001556 PARAMETER Experiment Name: At_Drought_Soil_Dry_P Parameter: Post Timepoint (hr) Value: None
  misc_feature: MA Experiment 20001556 PARAMETER Experiment Name: At_Drought_Soil_Dry_P Parameter: Post-Treatment Value: None
  misc_feature: MA Experiment 20001556 PARAMETER Experiment Name: At_Drought_Soil_Dry_P Parameter: Timepoint (day) Value: 12
  misc_feature: MA Experiment 20001556 PARAMETER Experiment Name: At_Drought_Soil_Dry_P Parameter: Treatment Value: Drought vs. No Drought
  misc_feature: MA Experiment ID: 20001558 Result: Down-regulated in Transcription
  misc_feature: MA Experiment 20001558 PARAMETER Experiment Name: At_Drought_Soil_Dry_P Parameter: Age (day) Value: 27
  misc_feature: MA Experiment 20001558 PARAMETER Experiment Name: At_Drought_Soil_Dry_P Parameter: Organism Value: A. thaliana
  misc_feature: MA Experiment 20001558 PARAMETER Experiment Name: At_Drought_Soil_Dry_P Parameter: Plant Line Value: WS
  misc_feature: MA Experiment 20001558 PARAMETER Experiment Name: At_Drought_Soil_Dry_P Parameter: Post Timepoint (hr) Value: 6
  misc_feature: MA Experiment 20001558 PARAMETER Experiment Name: At_Drought_Soil_Dry_P Parameter: Post-Treatment Value: Re-Water vs. No Drought
  misc_feature: MA Experiment 20001558 PARAMETER Experiment Name: At_Drought_Soil_Dry_P Parameter: Timepoint (day) Value: 13
  misc_feature: MA Experiment 20001558 PARAMETER Experiment Name: At_Drought_Soil_Dry_P Parameter: Treatment Value: Drought vs. No Drought
  misc_feature: MA Experiment ID: 20001559 Result: Up-regulated in Transcription
  misc_feature: MA Experiment 20001559 PARAMETER Experiment Name: At_Drought_Soil_Dry_P Parameter: Age (day) Value: 28
  misc_feature: MA Experiment 20001559 PARAMETER Experiment Name: At_Drought_Soil_Dry_P Parameter: Organism Value: A. thaliana
  misc_feature: MA Experiment 20001559 PARAMETER Experiment Name: At_Drought_Soil_Dry_P Parameter: Plant Line Value: WS
  misc_feature: MA Experiment 20001559 PARAMETER Experiment Name: At_Drought_Soil_Dry_P Parameter: Post Timepoint (hr) Value: 29
  misc_feature: MA Experiment 20001559 PARAMETER Experiment Name: At_Drought_Soil_Dry_P Parameter: Post-Treatment Value: Re-Water vs. No Drought
  misc_feature: MA Experiment 20001559 PARAMETER Experiment Name: At_Drought_Soil_Dry_P Parameter: Timepoint (day) Value: 14
  misc_feature: MA Experiment 20001559 PARAMETER Experiment Name: At_Drought_Soil_Dry_P Parameter: Treatment Value: Drought vs. No Drought
  misc_feature: MA Experiment ID: 20001906 Result: Up-regulated in Transcription
  misc_feature: MA Experiment 20001906 PARAMETER Experiment Name: At_Drought_Reproduction_P Parameter: Age (day) Value: 35
  misc_feature: MA Experiment 20001906 PARAMETER Experiment Name: At_Drought_Reproduction_P Parameter: Organism Value: A. thaliana
  misc_feature: MA Experiment 20001906 PARAMETER Experiment Name: At_Drought_Reproduction_P Parameter: Plant Line Value: WS
  misc_feature: MA Experiment 20001906 PARAMETER Experiment Name: At_Drought_Reproduction_P Parameter: Timepoint (day) Value: 5
  misc_feature: MA Experiment 20001906 PARAMETER Experiment Name: At_Drought_Reproduction_P Parameter: Tissue Value: Siliques
  misc_feature: MA Experiment 20001906 PARAMETER Experiment Name: At_Drought_Reproduction_P Parameter: Treatment Value: Drought vs. No Drought
actggtatgtctgtgtttcttcttccattttctgtttctattggaaacttctctctccaatttcgttttcttcacttcttagatcctttagctttgacaaaaccgtagtaaaggatcaaaagttatcatctttggtccatgttgtgaatcgtgctctgcttggntcgtgactcccaaataccggatttgaaaccagcatatctgagcttaattcgagcatagatagcttagcaatggagcagtcagaagagggtcaacagcaacagcaacagggagtgatggattatgtacctcctcatgcttatcagagtgggccagtaaatgcagcttcccatatggcattccaacaagctcaccacttccaccaccaccatcagcagcaacaacagcagcagcttcagatgttctgggctaaccaaatgcaagagatcgagcataccactgatttcaagaaccacacccttcccctagcccgcatcaagaagatcatgaaagctgatgaagatgtgaggatgatctctgcggaggctcctgtgatttttgccaaggcctgtgagatgttcattttggagctcactctacgtgcttggatccacaccgaggagaacaagaggaggaccttgcagaagaacgacatcgccgctgccatttccaggaccgacgtgtttgatttccttgtggacataatcccgagggacgagctgaaagaagaaggtttaggcgtgaccaaagggaccataccatcggtggtgggttccccgccatactattacttgcaacaacaggggatgatgcaacactggccccaggagcaacaccctgatgagtcttaaaacttttcccctttcgtttgtttggttgtatcgtagtaaggtagctctgctctgctgggaaccatttctattgtgttctgtaatgacatgttagtatatccccagtctatatctatggcaatgcagtttctgtt

SEQ ID NO: 76905 - protein, 199 aa, Arabidopsis thaliana; identical to SEQ ID NO: 25138
  peptide (1)..(199): Ceres Seq. ID no. 12389184
  misc_feature (1)..(199): Homolog of NCBI NO: 15223482 NR Description: transcription factor, putative; protein id: supported by cDNA: 26157., supported by cDNA: gi_18252952 thaliana] >gi|18252953|gb|AAL62403.1| transcription putative
  misc_feature (1)..(60): Homolog of NCBI NO: 21554704 NR Description: transcription factor, putative [Arabidopsis
  misc_feature (1)..(199): Homolog of NCBI NO: 32967225 NR Description: HapE [Aspergillus niger]
  misc_feature (52)..(199): Homolog of NCBI NO: 34913076 NR Description: P0672C09.19 [Oryza sativa (japonica
  misc_feature (50)..(199): Homolog of NCBI NO: 37531970 NR Description: putative transcription binding factor [Oryza

SEQ ID NO: 76906 - protein, 184 aa, Arabidopsis thaliana; identical to SEQ ID NO: 25139
  peptide (1)..(184): Ceres Seq. ID no. 12389185
  misc_feature (1)..(184): Homolog of NCBI NO: 15223482 NR Description: transcription factor, putative; protein id: supported by cDNA: 26157., supported by cDNA: gi_18252952 thaliana] >gi|18252953|gb|AAL62403.1| transcription putative
  misc_feature (1)..(45): Homolog of NCBI NO: 21554704 NR Description: transcription factor, putative [Arabidopsis
  misc_feature (1)..(184): Homolog of NCBI NO: 32967225 NR Description: HapE [Aspergillus niger]
  misc_feature (37)..(184): Homolog of NCBI NO: 34913076 NR Description: P0672C09.19 [Oryza sativa (japonica
  misc_feature (35)..(184): Homolog of NCBI NO: 37531970 NR Description: putative transcription binding factor [Oryza

SEQ ID NO: 76907 - protein, 165 aa, Arabidopsis thaliana; identical to SEQ ID NO: 25140
  peptide (1)..(165): Ceres Seq. ID no. 12389186
  misc_feature (1)..(165): Homolog of NCBI NO: 15223482 NR Description: transcription factor, putative; protein id: supported by cDNA: 26157., supported by cDNA: gi_18252952 thaliana] >gi|18252953|gb|AAL62403.1| transcription putative
  misc_feature (1)..(26): Homolog of NCBI NO: 21554704 NR Description: transcription factor, putative [Arabidopsis
  misc_feature (1)..(165): Homolog of NCBI NO: 32967225 NR Description: HapE [Aspergillus niger]
  misc_feature (18)..(165): Homolog of NCBI NO: 34913076 NR Description: P0672C09.19 [Oryza sativa (japonica
  misc_feature (16)..(165): Homolog of NCBI NO: 37531970 NR Description: putative transcription binding factor [Oryza

SEQ ID NO: 76908 - DNA, 1495 bp, Arabidopsis thaliana
  misc_feature (1)..(1495): Ceres Seq. ID no. 12393082
  misc_feature: MA Experiment ID: 108461 Result: Down-regulated in Transcription
  misc_feature: MA Experiment 108461 PARAMETER Experiment Name: At_Germinating_Seeds_cDNA_P Parameter: Age (day) Value: 1 vs. 0
  misc_feature: MA Experiment 108461 PARAMETER Experiment Name: At_Germinating_Seeds_cDNA_P Parameter: Tissue Value: Germinating Seeds
  misc_feature: MA Experiment ID: 108462 Result: Down-regulated in Transcription
  misc_feature: MA Experiment 108462 PARAMETER Experiment Name: At_Germinating_Seeds_cDNA_P Parameter: Age (day) Value: 2 vs. 0
  misc_feature: MA Experiment 108462 PARAMETER Experiment Name: At_Germinating_Seeds_cDNA_P Parameter: Tissue Value: Germinating Seeds
  misc_feature: MA Experiment ID: 108463 Result: Down-regulated in Transcription
  misc_feature: MA Experiment 108463 PARAMETER Experiment Name: At_Germinating_Seeds_cDNA_P Parameter: Age (day) Value: 3 vs. 0
  misc_feature: MA Experiment 108463 PARAMETER Experiment Name: At_Germinating_Seeds_cDNA_P Parameter: Tissue Value: Germinating Seeds
  misc_feature: MA Experiment ID: 108464 Result: Down-regulated in Transcription
  misc_feature: MA Experiment 108464 PARAMETER Experiment Name: At_Germinating_Seeds_cDNA_P Parameter: Age (day) Value: 4 vs. 0
  misc_feature: MA Experiment 108464 PARAMETER Experiment Name: At_Germinating_Seeds_cDNA_P Parameter: Tissue Value: Germinating Seeds
  misc_feature: MA Experiment ID: 108488 Result: Down-regulated in Transcription
  misc_feature: MA Experiment ID: 108573 Result: Up-regulated in Transcription
  misc_feature: MA Experiment 108573 PARAMETER Experiment Name: At_Drought_cDNA_P Parameter: Timepoint (hr) Value: 6
  misc_feature: MA Experiment 108573 PARAMETER Experiment Name: At_Drought_cDNA_P Parameter: Tissue Value: Aerial
  misc_feature: MA Experiment 108573 PARAMETER Experiment Name: At_Drought_cDNA_P Parameter: Treatment Value: Drought vs. No Drought
  misc_feature: MA Experiment ID: 108585 Result: Up-regulated in Transcription
  misc_feature: MA Experiment 108585 PARAMETER Experiment Name: At_5mM_NaNP_cDNA_P Parameter: Timepoint (hr) Value: 6
  misc_feature: MA Experiment 108585 PARAMETER Experiment Name: At_5mM_NaNP_cDNA_P Parameter: Tissue Value: Aerial
  misc_feature: MA Experiment 108585 PARAMETER Experiment Name: At_5mM_NaNP_cDNA_P Parameter: Treatment Value: null
  misc_feature: MA Experiment ID: 108595 Result: Down-regulated in Transcription
  misc_feature: MA Experiment 108595 PARAMETER Experiment Name: At_Ler-pi_Ovule_cDNA_P Parameter: Plant Line Value: null
  misc_feature: MA Experiment ID: 108605 Result: Up-regulated in Transcription
  misc_feature: MA Experiment 108605 PARAMETER Experiment Name: At_100uM_ABA_cDNA_P Parameter: Timepoint (hr) Value: 6
  misc_feature: MA Experiment 108605 PARAMETER Experiment Name: At_100uM_ABA_cDNA_P Parameter: Tissue Value: Aerial
  misc_feature: MA Experiment 108605 PARAMETER Experiment Name: At_100uM_ABA_cDNA_P Parameter: Treatment Value: 100uM ABA vs. No Treatment
  misc_feature: MA Experiment ID: 20000069 Result: Up-regulated in Transcription
  misc_feature: MA Experiment 20000069 PARAMETER Experiment Name: At_100uM_ABA_Mutants_cDNA_P Parameter: Plant Line Value: CS23
  misc_feature: MA Experiment 20000069 PARAMETER Experiment Name: At_100uM_ABA_Mutants_cDNA_P Parameter: Timepoint (hr) Value: 6
  misc_feature: MA Experiment 20000069 PARAMETER Experiment Name: At_100uM_ABA_Mutants_cDNA_P Parameter: Tissue Value: Aerial
  misc_feature: MA Experiment 20000069 PARAMETER Experiment Name: At_100uM_ABA_Mutants_cDNA_P Parameter: Treatment Value: 100uM ABA vs. No Treatment
  misc_feature: MA Experiment ID: 20000088 Result: Up-regulated in Transcription
  misc_feature: MA Experiment 20000088 PARAMETER Experiment Name: At_100uM_ABA_Mutants_cDNA_P Parameter: Plant Line Value: Landsberg
  misc_feature: MA Experiment 20000088 PARAMETER Experiment Name: At_100uM_ABA_Mutants_cDNA_P Parameter: Timepoint (hr) Value: 6
  misc_feature: MA Experiment 20000088 PARAMETER Experiment Name: At_100uM_ABA_Mutants_cDNA_P Parameter: Tissue Value: Aerial
  misc_feature: MA Experiment 20000088 PARAMETER Experiment Name: At_100uM_ABA_Mutants_cDNA_P Parameter: Treatment Value: 100uM ABA vs. No Treatment
  misc_feature: MA Experiment ID: 20000169 Result: Up-regulated in Transcription
  misc_feature: MA Experiment 20000169 PARAMETER Experiment Name: At_100uM_ABA_P Parameter: Age (day) Value: 14
  misc_feature: MA Experiment 20000169 PARAMETER Experiment Name: At_100uM_ABA_P Parameter: Organism Value: A. thaliana
  misc_feature: MA Experiment 20000169 PARAMETER Experiment Name: At_100uM_ABA_P Parameter: Plant Line Value: WS
  misc_feature: MA Experiment 20000169 PARAMETER Experiment Name: At_100uM_ABA_P Parameter: Timepoint (hr) Value: 6
  misc_feature: MA Experiment 20000169 PARAMETER Experiment Name: At_100uM_ABA_P Parameter: Tissue Value: Aerial
  misc_feature: MA Experiment 20000169 PARAMETER Experiment Name: At_100uM_ABA_P Parameter: Treatment Value: 100uM ABA vs. No Treatment
  misc_feature: MA Experiment ID: 20000179 Result: Down-regulated in Transcription
  misc_feature: MA Experiment 20000179 PARAMETER Experiment Name: At_Germinating_Seeds_P Parameter: Age (hr) Value: 6 vs. 0
  misc_feature: MA Experiment 20000179 PARAMETER Experiment Name: At_Germinating_Seeds_P Parameter: Tissue Value: Germinating Seeds
  misc_feature: MA Experiment ID: 20000180 Result: Down-regulated in Transcription
  misc_feature: MA Experiment 20000180 PARAMETER Experiment Name: At_Germinating_Seeds_P Parameter: Age (hr) Value: 24 vs. 0
  misc_feature: MA Experiment 20000180 PARAMETER Experiment Name: At_Germinating_Seeds_P Parameter: Tissue Value: Germinating Seeds
  misc_feature: MA Experiment ID: 20000227 Result: Up-regulated in Transcription
  misc_feature: MA Experiment 20000227 PARAMETER Experiment Name: At_Root-Tips-vs-Tops_P Parameter: Tissue Value: Root Tips vs. Root Tops
  misc_feature: MA Experiment ID: 20000437 Result: Up-regulated in Transcription
  misc_feature: MA Experiment 20000437 PARAMETER Experiment Name: At_Drought_P Parameter: Age (day) Value: 8
  misc_feature: MA Experiment 20000437 PARAMETER Experiment Name: At_Drought_P Parameter: Organism Value: A. thaliana
  misc_feature: MA Experiment 20000437 PARAMETER Experiment Name: At_Drought_P Parameter: Plant Line Value: WS
  misc_feature: MA Experiment 20000437 PARAMETER Experiment Name: At_Drought_P Parameter: Timepoint (hr) Value: 24
  misc_feature: MA Experiment 20000437 PARAMETER Experiment Name: At_Drought_P Parameter: Tissue Value: Whole Plant
  misc_feature: MA Experiment 20000437 PARAMETER Experiment Name: At_Drought_P Parameter: Treatment Value: Drought vs. No Drought
  misc_feature: MA Experiment ID: 20000794 Result: Up-regulated in Transcription
  misc_feature: MA Experiment 20000794 PARAMETER Experiment Name: At_Petals_P Parameter: Age (day) Value: 23-25 days
  misc_feature: MA Experiment 20000794 PARAMETER Experiment Name: At_Petals_P Parameter: Plant Line Value: WS
  misc_feature: MA Experiment 20000794 PARAMETER Experiment Name: At_Petals_P Parameter: Tissue Value: Petals vs. Whole plant
  misc_feature: MA Experiment ID: 20001560 Result: Up-regulated in Transcription
  misc_feature: MA Experiment 20001560 PARAMETER Experiment Name: At_Drought_Soil_Dry_P Parameter: Age (day) Value: 28
  misc_feature: MA Experiment 20001560 PARAMETER Experiment Name: At_Drought_Soil_Dry_P Parameter: Organism Value: A. thaliana
  misc_feature: MA Experiment 20001560 PARAMETER Experiment Name: At_Drought_Soil_Dry_P Parameter: Plant Line Value: WS
  misc_feature: MA Experiment 20001560 PARAMETER Experiment Name: At_Drought_Soil_Dry_P Parameter: Post Timepoint (hr) Value: None
  misc_feature: MA Experiment 20001560 PARAMETER Experiment Name: At_Drought_Soil_Dry_P Parameter: Post-Treatment Value: None
  misc_feature: MA Experiment 20001560 PARAMETER Experiment Name: At_Drought_Soil_Dry_P Parameter: Timepoint (day) Value: 14
  misc_feature: MA Experiment 20001560 PARAMETER Experiment Name: At_Drought_Soil_Dry_P Parameter: Treatment Value: Drought vs. No Drought
  misc_feature: MA Experiment ID: 20001905 Result: Up-regulated in Transcription
  misc_feature: MA Experiment 20001905 PARAMETER Experiment Name: At_Drought_Reproduction_P Parameter: Age (day) Value: 40
  misc_feature: MA Experiment 20001905 PARAMETER Experiment Name: At_Drought_Reproduction_P Parameter: Organism Value: A. thaliana
  misc_feature: MA Experiment 20001905 PARAMETER Experiment Name: At_Drought_Reproduction_P Parameter: Plant Line Value: WS
  misc_feature: MA Experiment 20001905 PARAMETER Experiment Name: At_Drought_Reproduction_P Parameter: Timepoint (day) Value: 10
  misc_feature: MA Experiment 20001905 PARAMETER Experiment Name: At_Drought_Reproduction_P Parameter: Tissue Value: Rosettes
  misc_feature: MA Experiment 20001905 PARAMETER Experiment Name: At_Drought_Reproduction_P Parameter: Treatment Value: Drought vs. No Drought
ccctgtgatctatctttgaatctcaaaagcatacttgagagagatctgtttcgataatttgcttcaatcaccgtgttaatggcggccgtaggagtggaggcgagacctcctgtgacagcgatggaggaaacctgcaacgttaagggagcggcggcgaaacaaggagaagggcttaacaagtactacctccagcatctcgatgagctccagcgcctgcaacgcgaaaagtcgtataaccttaatcgtcttgaagctcagaggaatgaactcaattctcgagtacgaatgctcagagaagagttacagctccttcaagaacctgggtcctatgtgggtgaagtggtaaaagtgatgggaaaaaacaaggtcttggttaaggttcatccagaggggaagtatgttgtcgatattgacaaaagtatagacataacgaaactcactccatcaacgagagttgctctccgtaatgatagctatgttctccacctggttctgccaagtaaagtagatcccttggttaaccttatgaaagttgagaaggttccagactccacatatgacatgattggtggtcttgaccagcaaatcaaggaaataaaggaggtcattgaactgccaatcaagcatcctgaattgtttgagtctcttggaattgcgcagccaaagggtgtgttgttgtacggtccacctggaactgggaagacactattggctcgggctgtggcacatcacactgactgtactttcatcagagtttctggttctgagctggtccagaaatacattggagaaggttctagaatggtcagagaactttttgtgatggcaagggagcatgcaccatcaatcatcttcatggatgaaatcgatagtatcgggtctgctcgtatggaatctggtagtggaaatggtgacagtgaggtgcaaaggactatgcttgagcttctcaatcaacttgacggattcgaggcgtcaaacaaaatcaaggttttgatggctacaaatcgtattgatattctggatcaagctcttctccggcctggaaggattgataggaaaattgaatttcctaatcctaatgaagagtcacgttttgatatcttgaagatacactcaaggaaaatgaatttgatgcgtggaatcgatctgaaaaagattgcagagaagatgaatggtgcttcaggtgctgagctgaaggctgtatgcacggaggcgggcatgtttgcacttcgtgagaggagagtacatgtgactcaggaagactttgagatggctgtggcgaaggtaatgaagaaagacacagagaagaacatgtctctgcgtaagctctggaagtaggaatttcagagtcacagattaatttcgattatttcttctctactgtctgtggttctttctgaaaccttttcggctagcgctttaagcttttctaaacaatgtttgtacactagtttctattcattcaaatggttgttcagcataacatcttcgattc

SEQ ID NO: 76909 - protein, 419 aa, Arabidopsis thaliana; identical to SEQ ID NO: 23314
  peptide (1)..(419): Ceres Seq. ID no. 12393083
  misc_feature (197)..(385): Pfam Name: ATPase family associated with various cellular Pfam Description: ATPase family associated with various cellular
  misc_feature (1)..(419): Homolog of NCBI NO: 15241241 NR Description: 26S proteasome AAA-ATPase subunit RPT6a; protein At5g20000.1, supported by cDNA: 36085., supported by cDNA:
  misc_feature (1)..(419): Homolog of NCBI NO: 18420092 NR Description: 26S proteasome AAA-ATPase subunit RPT6a; protein At5g19990.1, supported by cDNA: gi_13537114, supported by cDNA: supported by cDNA: gi_6652887 [Arabidopsis thaliana]
  misc_feature (15)..(419): Homolog of NCBI NO: 6652888 NR Description: 26S proteasome AAA-ATPase subunit RPT6a
  misc_feature (3)..(419): Homolog of NCBI NO: 11094194 NR Description: 26S proteasome regulatory particle triple-A
  misc_feature (17)..(419): Homolog of NCBI NO: 17385640 NR Description: TAT-binding protein homolog [Matricaria
  misc_feature (27)..(419): Homolog of NCBI NO: 6752880 NR Description: 26S proteasome regulatory subunit 8 [Pinus taeda]
  misc_feature (1)..(419): Homolog of NCBI NO: 11993907 NR Description: 26S proteasome RPT6a subunit [Dactylis glomerata]
  misc_feature (4)..(419): Homolog of NCBI NO: 6599051 NR Description: 26S proteasome subunit 8; Tat binding protein
  misc_feature (27)..(419): Homolog of NCBI NO: 1262435 NR Description: put. 26S protease subunit [Sus scrofa]
  misc_feature (27)..(419): Homolog of NCBI NO: 7110703 NR Description: protease (prosome, macropain) 26S subunit, ATPase [Mus musculus] >gi|13592141|ref|NP_112411.1| for proteasomal (SUG1) [Rattus norvegicus] >gi|24497435|ref|NP_002796.4|

SEQ ID NO: 76910 - protein, 405 aa, Arabidopsis thaliana; identical to SEQ ID NO: 23315
  peptide (1)..(405): Ceres Seq. ID no. 12393084
  misc_feature (183)..(371): Pfam Name: ATPase family associated with various cellular Pfam Description: ATPase family associated with various cellular
  misc_feature (1)..(405): Homolog of NCBI NO: 15241241 NR Description: 26S proteasome AAA-ATPase subunit RPT6a; protein At5g20000.1, supported by cDNA: 36085., supported by cDNA:
  misc_feature (1)..(405): Homolog of NCBI NO: 18420092 NR Description: 26S proteasome AAA-ATPase subunit RPT6a; protein At5g19990.1, supported by cDNA: gi_13537114, supported by cDNA: supported by cDNA: gi_6652887 [Arabidopsis thaliana]
  misc_feature (1)..(405): Homolog of NCBI NO: 6652888 NR Description: 26S proteasome AAA-ATPase subunit RPT6a
  misc_feature (1)..(405): Homolog of NCBI NO: 11094194 NR Description: 26S proteasome regulatory particle triple-A
  misc_feature (3)..(405): Homolog of NCBI NO: 17385640 NR Description: TAT-binding protein homolog [Matricaria
  misc_feature (13)..(405): Homolog of NCBI NO: 6752880 NR Description: 26S proteasome regulatory subunit 8 [Pinus taeda]
  misc_feature (1)..(405): Homolog of NCBI NO: 11993907 NR Description: 26S proteasome RPT6a subunit [Dactylis glomerata]
  misc_feature (1)..(405): Homolog of NCBI NO: 6599051 NR Description: 26S proteasome subunit 8; Tat binding protein
  misc_feature (13)..(405): Homolog of NCBI NO: 1262435 NR Description: put. 26S protease subunit [Sus scrofa]
  misc_feature (13)..(405): Homolog of NCBI NO: 7110703 NR Description: protease (prosome, macropain) 26S subunit, ATPase [Mus musculus] >gi|13592141|ref|NP_112411.1| for proteasomal (SUG1) [Rattus norvegicus] >gi|24497435|ref|NP_002796.4|

SEQ ID NO: 76911 - protein, 350 aa, Arabidopsis thaliana; identical to SEQ ID NO: 23316
  peptide (1)..(350): Ceres Seq. ID no. 12393085
  misc_feature (128)..(316): Pfam Name: ATPase family associated with various cellular Pfam Description: ATPase family associated with various cellular
  misc_feature (1)..(350): Homolog of NCBI NO: 15241241 NR Description: 26S proteasome AAA-ATPase subunit RPT6a; protein At5g20000.1, supported by cDNA: 36085., supported by cDNA:
  misc_feature (1)..(350): Homolog of NCBI NO: 18420092 NR Description: 26S proteasome AAA-ATPase subunit RPT6a; protein At5g19990.1, supported by cDNA: gi_13537114, supported by cDNA: supported by cDNA: gi_6652887 [Arabidopsis thaliana]
  misc_feature (1)..(350): Homolog of NCBI NO: 6652888 NR Description: 26S proteasome AAA-ATPase subunit RPT6a
  misc_feature (1)..(350): Homolog of NCBI NO: 11094194 NR Description: 26S proteasome regulatory particle triple-A
  misc_feature (1)..(350): Homolog of NCBI NO: 17385640 NR Description: TAT-binding protein homolog [Matricaria
  misc_feature (1)..(350): Homolog of NCBI NO: 6752880 NR Description: 26S proteasome regulatory subunit 8 [Pinus taeda]
  misc_feature (1)..(350): Homolog of NCBI NO: 11993907 NR Description: 26S proteasome RPT6a subunit [Dactylis glomerata]
  misc_feature (1)..(350): Homolog of NCBI NO: 6599051 NR Description: 26S proteasome subunit 8; Tat binding protein
  misc_feature (1)..(350): Homolog of NCBI NO: 1262435 NR Description: put. 26S protease subunit [Sus scrofa]
  misc_feature (1)..(350): Homolog of NCBI NO: 7110703 NR Description: protease (prosome, macropain) 26S subunit, ATPase [Mus musculus] >gi|13592141|ref|NP_112411.1| for proteasomal (SUG1) [Rattus norvegicus] >gi|24497435|ref|NP_002796.4|

SEQ ID NO: 76912 - DNA, 1718 bp, Arabidopsis thaliana
  misc_feature (1)..(1718): Ceres Seq. ID no. 12394443
  misc_feature: MA Experiment ID: 108434 Result: Down-regulated in Transcription
  misc_feature: MA Experiment 108434 PARAMETER Experiment Name: At_Root_Tips_cDNA_P Parameter: Tissue Value: Root Tips
  misc_feature: MA Experiment ID: 108573 Result: Up-regulated in Transcription
  misc_feature: MA Experiment 108573 PARAMETER Experiment Name: At_Drought_cDNA_P Parameter: Timepoint (hr) Value: 6
  misc_feature: MA Experiment 108573 PARAMETER Experiment Name: At_Drought_cDNA_P Parameter: Tissue Value: Aerial
  misc_feature: MA Experiment 108573 PARAMETER Experiment Name: At_Drought_cDNA_P Parameter: Treatment Value: Drought vs. No Drought
  misc_feature: MA Experiment ID: 108577 Result: Down-regulated in Transcription
  misc_feature: MA Experiment 108577 PARAMETER Experiment Name: At_42deg_Heat_cDNA_P Parameter: Temperature (deg C) Value: 42 vs. 22
  misc_feature: MA Experiment 108577 PARAMETER Experiment Name: At_42deg_Heat_cDNA_P Parameter: Timepoint (hr) Value: 6
  misc_feature: MA Experiment 108577 PARAMETER Experiment Name: At_42deg_Heat_cDNA_P Parameter: Tissue Value: Aerial
  misc_feature: MA Experiment ID: 108595 Result: Down-regulated in Transcription
  misc_feature: MA Experiment 108595 PARAMETER Experiment Name: At_Ler-pi_Ovule_cDNA_P Parameter: Plant Line Value: null
  misc_feature: MA Experiment ID: 20000087 Result: Down-regulated in Transcription
  misc_feature: MA Experiment 20000087 PARAMETER Experiment Name: At_100uM_ABA_Mutants_cDNA_P Parameter: Plant Line Value: WS
  misc_feature: MA Experiment 20000087 PARAMETER Experiment Name: At_100uM_ABA_Mutants_cDNA_P Parameter: Timepoint (hr) Value: 6
  misc_feature: MA Experiment 20000087 PARAMETER Experiment Name: At_100uM_ABA_Mutants_cDNA_P Parameter: Tissue Value: Aerial
  misc_feature: MA Experiment 20000087 PARAMETER Experiment Name: At_100uM_ABA_Mutants_cDNA_P Parameter: Treatment Value: 100uM ABA vs. No Treatment
  misc_feature: MA Experiment ID: 20000111 Result: Down-regulated in Transcription
  misc_feature: MA Experiment 20000111 PARAMETER Experiment Name: At_42deg_Heat_cDNA_P Parameter: Temperature (deg C) Value: 42 vs. 22
  misc_feature: MA Experiment 20000111 PARAMETER Experiment Name: At_42deg_Heat_cDNA_P Parameter: Timepoint (hr) Value: 6
  misc_feature: MA Experiment 20000111 PARAMETER Experiment Name: At_42deg_Heat_cDNA_P Parameter: Tissue Value: Aerial
aaagaaagagaaagagaagagctggattcacatggtcttgttctttctctctccttcttttctcatcttgcggcttccctttttctctctatcgccacaatgatcattaccaaccaaactgattgaaactcatttgttctctctctctcaaatccactctctctctttcttttctcttctcctctctgtgtctctatcgccatggctgatgataaggagatgcctgctgctgtagttgatggacatgatcaagtcactggtcatattatttccaccacaatcggtggcaaaaatggtgaaccaaaacagacaattagttacatggcggagcgagttgttggtacaggctcgttcgggatcgttttccaagcaaaatgtttggagactggagaaaccgtggcgataaagaaggttttgcaagatagaagatacaagaaccgagaacttcagttgatgcgtgtgatggatcatccgaatgtggtttgtttgaagcattgcttcttttcgactacaagtaaagacgagcttttcttgaacttggttatggagtatgtccctgagagcttgtatcgagttctgaaacattatagtagtgcaaaccaaagaatgcctcttgtctatgttaaactttacatgtatcagatcttccggggacttgcttacattcacaatgttgctggagtttgtcacagagatctaaagcctcaaaatcttctggttgatcctcttactcatcaagtcaaaatctgtgactttggcagtgcgaaacagctcgttaaaggtgaagccaacatttcttacatctgctcacgattctaccgtgcacccgagctcatatttggtgccactgagtacacaacttctattgatatctggtctgctggttgtgttcttgctgagcttcttcttggtcagccattatttcccggagaaaatgctgtggatcagctcgttgaaattataaaagttcttggtacaccaactcgagaagaaatccgttgtatgaatccacattacacagatttcaggtttccacagataaaggcacatccctggcacaagatcttccacaaaaggatgcccccagaagcgattgattttgcatcaaggctgcttcaatactctccaagtctaagatgcacagcgctcgaagcttgtgcacatccgttctttgatgaactcagagaaccaaacgctcgtttaccaaatggacggcctttcccgcctctcttcaacttcaaacaagaagtagctggatcatcacctgaactggtcaacaagttgattccagaccatatcaagagacaattgggtctaagcttcttgaatcaatctggaacttaaaagggatcctgcaaaagacaactacttttttatatataatgtaccattacacgagccacaaggtcgtagttgaaggcaaacgtggaggacacaattcaaagtttttcctcctcaaactcgttcagacaaagccagctgctagcaaaaccaactcccccaaatctgcgaaaacaaaaactctccagtgttgtatctgcttatttctcttctcttttcaagtttggtgaaaaacacagtctcctctttgcttcatttcttctttctttcccccttatgtaaatgagtttagtcagaagtttttttatatagtaaagtttgggcagaaggtgaagaatgtaatcaaagtgatactctttcaacgaggagcttctttc

SEQ ID NO: 76913 - protein, 380 aa, Arabidopsis thaliana; identical to SEQ ID NO: 36837
  peptide (1)..(380): Ceres Seq. ID no. 12394444
  misc_feature (40)..(324): Pfam Name: Protein kinase domain Pfam Description: Protein kinase domain
  misc_feature (1)..(380): Homolog of NCBI NO: 15233984 NR Description: shaggy-like protein kinase etha (EC 2.7.1.-); id: At4g18710.1, supported by cDNA: 256076., supported by cDNA:
  misc_feature (1)..(380): Homolog of NCBI NO: 18700188 NR Description: AT4g18710/F28A21_120 [Arabidopsis thaliana]
  misc_feature (1)..(380): Homolog of NCBI NO: 12643751 NR Description: Shaggy-related protein kinase eta (ASK-eta)
  misc_feature (3)..(379): Homolog of NCBI NO: 15224593 NR Description: putative shaggy-like protein kinase dzeta; id: At2g30980.1, supported by cDNA: 36479., supported by cDNA: supported by cDNA: gi_20453107, supported by cDNA: gi_20465726
  misc_feature (3)..(379): Homolog of NCBI NO: 21593135 NR Description: putative shaggy-like protein kinase dzeta
  misc_feature (3)..(379): Homolog of NCBI NO: 12643750 NR Description: Shaggy-related protein kinase delta (ASK-delta)
  misc_feature (4)..(376): Homolog of NCBI NO: 15221476 NR Description: shaggy-like kinase, putative; protein id: supported by cDNA: gi_14334749, supported by cDNA: gi_15293238, by cDNA: gi_2444276 [Arabidopsis thaliana]
  misc_feature (1)..(371): Homolog of NCBI NO: 7434281 NR Description: probable shaggy-like protein kinase etha (EC
  misc_feature (3)..(375): Homolog of NCBI NO: 22326813 NR Description: protein kinase MSK-3 - like; protein id: supported by cDNA: gi_18086449 [Arabidopsis thaliana]
  misc_feature (1)..(365): Homolog of NCBI NO: 15236918 NR Description: Shaggy related protein kinase tetha; protein id:

SEQ ID NO: 76914 - protein, 374 aa, Arabidopsis thaliana; identical to SEQ ID NO: 36838
  peptide (1)..(374): Ceres Seq. ID no. 12394445
  misc_feature (34)..(318): Pfam Name: Protein kinase domain Pfam Description: Protein kinase domain
  misc_feature (1)..(374): Homolog of NCBI NO: 15233984 NR Description: shaggy-like protein kinase etha (EC 2.7.1.-); id: At4g18710.1, supported by cDNA: 256076., supported by cDNA:
  misc_feature (1)..(374): Homolog of NCBI NO: 18700188 NR Description: AT4g18710/F28A21_120 [Arabidopsis thaliana]
  misc_feature (1)..(374): Homolog of NCBI NO: 12643751 NR Description: Shaggy-related protein kinase eta (ASK-eta)
  misc_feature (1)..(373): Homolog of NCBI NO: 15224593 NR Description: putative shaggy-like protein kinase dzeta; id: At2g30980.1, supported by cDNA: 36479., supported by cDNA: supported by cDNA: gi_20453107, supported by cDNA: gi_20465726
  misc_feature (1)..(373): Homolog of NCBI NO: 21593135 NR Description: putative shaggy-like protein kinase dzeta
  misc_feature (1)..(373): Homolog of NCBI NO: 12643750 NR Description: Shaggy-related protein kinase delta (ASK-delta)
  misc_feature (1)..(370): Homolog of NCBI NO: 15221476 NR Description: shaggy-like kinase, putative; protein id: supported by cDNA: gi_14334749, supported by cDNA: gi_15293238, by cDNA: gi_2444276 [Arabidopsis thaliana]
  misc_feature (1)..(365): Homolog of NCBI NO: 7434281 NR Description: probable shaggy-like protein kinase etha (EC
  misc_feature (1)..(369): Homolog of NCBI NO: 22326813 NR Description: protein kinase MSK-3 - like; protein id: supported by cDNA: gi_18086449 [Arabidopsis thaliana]
  misc_feature (1)..(359): Homolog of NCBI NO: 15236918 NR Description: Shaggy related protein kinase tetha; protein id:

SEQ ID NO: 76915 - protein, 340 aa, Arabidopsis thaliana; identical to SEQ ID NO: 36839
  peptide (1)..(340): Ceres Seq. ID no. 12394446
  misc_feature (1)..(284): Pfam Name: Protein kinase domain Pfam Description: Protein kinase domain
  misc_feature (1)..(340): Homolog of NCBI NO: 15233984 NR Description: shaggy-like protein kinase etha (EC 2.7.1.-); id: At4g18710.1, supported by cDNA: 256076., supported by cDNA:
  misc_feature (1)..(340): Homolog of NCBI NO: 18700188 NR Description: AT4g18710/F28A21_120 [Arabidopsis thaliana]
  misc_feature (1)..(340): Homolog of NCBI NO: 12643751 NR Description: Shaggy-related protein kinase eta (ASK-eta)
  misc_feature (1)..(339): Homolog of NCBI NO: 15224593 NR Description: putative shaggy-like protein kinase dzeta; id: At2g30980.1, supported by cDNA: 36479., supported by cDNA: supported by cDNA: gi_20453107, supported by cDNA: gi_20465726
  misc_feature (1)..(339): Homolog of NCBI NO: 21593135 NR Description: putative shaggy-like protein kinase dzeta
  misc_feature (1)..(339): Homolog of NCBI NO: 12643750 NR Description: Shaggy-related protein kinase delta (ASK-delta)
  misc_feature (1)..(336): Homolog of NCBI NO: 15221476 NR Description: shaggy-like kinase, putative; protein id: supported by cDNA: gi_14334749, supported by cDNA: gi_15293238, by cDNA: gi_2444276 [Arabidopsis thaliana]
  misc_feature (1)..(331): Homolog of NCBI NO: 7434281 NR Description: probable shaggy-like protein kinase etha (EC
  misc_feature (1)..(335): Homolog of NCBI NO: 22326813 NR Description: protein kinase MSK-3 - like; protein id: supported by cDNA: gi_18086449 [Arabidopsis thaliana]
  misc_feature (1)..(325): Homolog of NCBI NO: 15236918 NR Description: Shaggy related protein kinase tetha; protein id:

SEQ ID NO: 76916 - DNA, 1365 bp, Arabidopsis thaliana
  misc_feature (1)..(1365): Ceres Seq. ID no. 12396334
  misc_feature: MA Experiment ID: 108434 Result: Up-regulated in Transcription
  misc_feature: MA Experiment 108434 PARAMETER Experiment Name: At_Root_Tips_cDNA_P Parameter: Tissue Value: Root Tips
  misc_feature: MA Experiment ID: 108462 Result: Down-regulated in Transcription
  misc_feature: MA Experiment 108462 PARAMETER Experiment Name: At_Germinating_Seeds_cDNA_P Parameter: Age (day) Value: 2 vs. 0
  misc_feature: MA Experiment 108462 PARAMETER Experiment Name: At_Germinating_Seeds_cDNA_P Parameter: Tissue Value: Germinating Seeds
  misc_feature: MA Experiment ID: 108463 Result: Down-regulated in Transcription
  misc_feature: MA Experiment 108463 PARAMETER Experiment Name: At_Germinating_Seeds_cDNA_P Parameter: Age (day) Value: 3 vs. 0
  misc_feature: MA Experiment 108463 PARAMETER Experiment Name: At_Germinating_Seeds_cDNA_P Parameter: Tissue Value: Germinating Seeds
  misc_feature: MA Experiment ID: 108595 Result: Down-regulated in Transcription
  misc_feature: MA Experiment 108595 PARAMETER Experiment Name: At_Ler-pi_Ovule_cDNA_P Parameter: Plant Line Value: null
  misc_feature: MA Experiment ID: 20000224 Result: Down-regulated in Transcription
  misc_feature: MA Experiment ID: 20001911 Result: Down-regulated in Transcription
  misc_feature: MA Experiment 20001911 PARAMETER Experiment Name: At_Drought_Reproduction_P Parameter: Age (day) Value: 40
  misc_feature: MA Experiment 20001911 PARAMETER Experiment Name: At_Drought_Reproduction_P Parameter: Organism Value: A. thaliana
  misc_feature: MA Experiment 20001911 PARAMETER Experiment Name: At_Drought_Reproduction_P Parameter: Plant Line Value: WS
  misc_feature: MA Experiment 20001911 PARAMETER Experiment Name: At_Drought_Reproduction_P Parameter: Timepoint (day) Value: 10
  misc_feature: MA Experiment 20001911 PARAMETER Experiment Name: At_Drought_Reproduction_P Parameter: Tissue Value: Flowers
  misc_feature: MA Experiment 20001911 PARAMETER Experiment Name: At_Drought_Reproduction_P Parameter: Treatment Value: Drought vs. No Drought
ttacgtaaccctaagcggacggagcaatgctctgctagatctatctttctttcaattcttcaccagagatcgtcgagactcaccattgaaatcgaagaaacagcaccaatttccacttcaccaccgaaagagagagacagagaggataataaaaggccgccatggatttagatcaatggatttccaaggttaaagacggccaacatctctctgaggacgagcttcaacttctctgcgaatacgtgaaagaaattcttattgaggaatcaaatgtacaacctgtcaacagtcctgtcaccgtctgtggtgatatccatggccagtttcatgatcttatgaaacttttccagaccggaggtcatgttcccgagaccaattacatatttatgggggatttcgttgatagaggttacaacagtcttgaagttttcaccattcttttgcttcttaaagcaagacatccagccaatatcactcttttgcgtggaaatcatgaaagtagacagctaactcaggtgtatggtttctatgacgaatgccaaaggaagtatggtaatgctaatgcttggagatattgcacggatgtttttgactatcttacactttcagctattatagatggcactgttctatgtgttcatggtggcctttcacctgatgtacggacaattgaccagataagattgattgagcggaattgcgaaataccgcatgaaggacccttctgtgatcttatgtggagtgatcctgaagatattgaaacatgggctgtcagtccacgtggagctggttggcttttcgggtccagggttaccactgagtttaaccatattaacaatcttgatctagtatgtcgcgctcaccagcttgtacaagaaggtctcaagtacatgttccaagataaaggtcttgtaactgtgtggtctgcgcctaattactgctaccgttgtgggaatgtggcttctatattgagtttcaatgacaacatggaaagggaagtgaagttcttcacggagacagaagagaacaatcaaatgagagggccaaggacaggtgttccttatttcctgtgattcatgatgatgatcctacatcattattagtctcgtattgctcttatcaagttagccattatcatgattgccattggcttatgttctttcaaggtatatcttctgatgttgtttacacttccattgttttttttttcctttttccattttggaaacattttcttgtgaaagtgaatgtcactttggtaattttagtggttttgatgcactttaacctgaacctcttctggatgttattattatacgtgctttctttcttgttttgtttcatctttgttctgtaagcaagacc

SEQ ID NO: 76917 - protein, 303 aa, Arabidopsis thaliana; identical to SEQ ID NO: 71888
  peptide (1)..(303): Ceres Seq. ID no. 12396335
  misc_feature (43)..(238): Pfam Name: Calcineurin-like phosphoesterase Pfam Description: Calcineurin-like phosphoesterase
  misc_feature (1)..(303): Homolog of NCBI NO: 15222945 NR Description: serine/threonine protein phosphatase; protein id: supported by cDNA: 35230., supported by cDNA: gi_16226939 thaliana] >gi|25752349|pir||H96539 phosphoprotein phosphatase
  misc_feature (1)..(303): Homolog of NCBI NO: 15231006 NR Description: protein phosphatase; protein id: At3g19980.1, by cDNA: gi_14582205, supported by cDNA: gi_17381248, supported cDNA: gi_20453382 [Arabidopsis thaliana]
  misc_feature (1)..(303): Homolog of NCBI NO: 7488629 NR Description: phosphoprotein phosphatase (EC 3.1.3.16) - apple >gi|1143511|emb|CAA87385.1| Ser/Thr protein phosphatase to PPX [Malus x domestica] >gi|1586034|prf||2202340A Ser/Thr
  misc_feature (1)..(303): Homolog of NCBI NO: 20385063 NR Description: serine/threonine protein phosphatase 2A [Pisum
  misc_feature (1)..(303): Homolog of NCBI NO: 34911376 NR Description: putative Ser/Thr protein phosphatase [Oryza
  misc_feature (1)..(302): Homolog of NCBI NO: 5759301 NR Description: protein phosphatase 6 catalytic subunit
  misc_feature (1)..(302): Homolog of NCBI NO: 28829192 NR Description: similar to Dictyostelium discoideum (Slime mold). phosphatase 6 catalytic subunit (EC 3.1.3.16) (Serine/threonine
  misc_feature (1)..(303): Homolog of NCBI NO: 21312758 NR Description: RIKEN cDNA 2310003C10 [Mus musculus] Similar to protein phosphatase 6, catalytic subunit [Mus >gi|12832985|dbj|BAB22339.1| unnamed protein product [Mus
  misc_feature (1)..(303): Homolog of NCBI NO: 4506029 NR Description: protein phosphatase 6, catalytic subunit; protein phosphatase catalytic subunit [Homo sapiens] Serine/threonine protein phosphatase 6 (PP6)
  misc_feature (1)..(303): Homolog of NCBI NO: 1071868 NR Description: phosphoprotein phosphatase (EC 3.1.3.16) PPV - rat

SEQ ID NO: 76918 - protein, 245 aa, Arabidopsis thaliana; identical to SEQ ID NO: 71889
  peptide (1)..(245): Ceres Seq. ID no. 12396336
  misc_feature (1)..(180): Pfam Name: Calcineurin-like phosphoesterase Pfam Description: Calcineurin-like phosphoesterase
  misc_feature (1)..(245): Homolog of NCBI NO: 15222945 NR Description: serine/threonine protein phosphatase; protein id: supported by cDNA: 35230., supported by cDNA: gi_16226939 thaliana] >gi|25752349|pir||H96539 phosphoprotein phosphatase
  misc_feature (1)..(245): Homolog of NCBI NO: 15231006 NR Description: protein phosphatase; protein id: At3g19980.1, by cDNA: gi_14582205, supported by cDNA: gi_17381248, supported cDNA: gi_20453382 [Arabidopsis thaliana]
  misc_feature (1)..(245): Homolog of NCBI NO: 7488629 NR Description: phosphoprotein phosphatase (EC 3.1.3.16) - apple >gi|1143511|emb|CAA87385.1| Ser/Thr protein phosphatase to PPX [Malus x domestica] >gi|1586034|prf||2202340A Ser/Thr
  misc_feature (1)..(245): Homolog of NCBI NO: 20385063 NR Description: serine/threonine protein phosphatase 2A [Pisum
  misc_feature (1)..(245): Homolog of NCBI NO: 34911376 NR Description: putative Ser/Thr protein phosphatase [Oryza
  misc_feature (1)..(244): Homolog of NCBI NO: 5759301 NR Description: protein phosphatase 6 catalytic subunit
  misc_feature (1)..(244): Homolog of NCBI NO: 28829192 NR Description: similar to Dictyostelium discoideum (Slime mold). phosphatase 6 catalytic subunit (EC 3.1.3.16) (Serine/threonine
  misc_feature (1)..(245): Homolog of NCBI NO: 21312758 NR Description: RIKEN cDNA 2310003C10 [Mus musculus] Similar to protein phosphatase 6, catalytic subunit [Mus >gi|12832985|dbj|BAB22339.1| unnamed protein product [Mus
  misc_feature (1)..(245): Homolog of NCBI NO: 4506029 NR Description: protein phosphatase 6, catalytic subunit; protein phosphatase catalytic subunit [Homo sapiens] Serine/threonine protein phosphatase 6 (PP6)
  misc_feature (1)..(245): Homolog of NCBI NO: 1071868 NR Description: phosphoprotein phosphatase (EC 3.1.3.16) PPV - rat

SEQ ID NO: 76919 - protein, 228 aa, Arabidopsis thaliana; identical to SEQ ID NO: 23042
  peptide (1)..(228): Ceres Seq. ID no. 12396337
  misc_feature (1)..(163): Pfam Name: Calcineurin-like phosphoesterase Pfam Description: Calcineurin-like phosphoesterase
  misc_feature (1)..(228): Homolog of NCBI NO: 15222945 NR Description: serine/threonine protein phosphatase; protein id: supported by cDNA: 35230., supported by cDNA: gi_16226939 thaliana] >gi|25752349|pir||H96539 phosphoprotein phosphatase
  misc_feature (1)..(228): Homolog of NCBI NO: 15231006 NR Description: protein phosphatase; protein id: At3g19980.1, by cDNA: gi_14582205, supported by cDNA: gi_17381248, supported cDNA: gi_20453382 [Arabidopsis thaliana]
  misc_feature (1)..(228): Homolog of NCBI NO: 7488629 NR Description: phosphoprotein phosphatase (EC 3.1.3.16) - apple >gi|1143511|emb|CAA87385.1| Ser/Thr protein phosphatase to PPX [Malus x domestica] >gi|1586034|prf||2202340A Ser/Thr
  misc_feature (1)..(228): Homolog of NCBI NO: 20385063 NR Description: serine/threonine protein phosphatase 2A [Pisum
  misc_feature (1)..(228): Homolog of NCBI NO: 34911376 NR Description: putative Ser/Thr protein phosphatase [Oryza
  misc_feature (1)..(227): Homolog of NCBI NO: 5759301 NR Description: protein phosphatase 6 catalytic subunit
  misc_feature (1)..(227): Homolog of NCBI NO: 28829192 NR Description: similar to Dictyostelium discoideum (Slime mold). phosphatase 6 catalytic subunit (EC 3.1.3.16) (Serine/threonine
  misc_feature (1)..(228): Homolog of NCBI NO: 21312758 NR Description: RIKEN cDNA 2310003C10 [Mus musculus] Similar to protein phosphatase 6, catalytic subunit [Mus >gi|12832985|dbj|BAB22339.1| unnamed protein product [Mus
  misc_feature (1)..(228): Homolog of NCBI NO: 4506029 NR Description: protein phosphatase 6, catalytic subunit; protein phosphatase catalytic subunit [Homo sapiens] Serine/threonine protein phosphatase 6 (PP6)
  misc_feature (1)..(228): Homolog of NCBI NO: 1071868 NR Description: phosphoprotein phosphatase (EC 3.1.3.16) PPV - rat

SEQ ID NO: 76920 - DNA, 818 bp, Arabidopsis thaliana
  misc_feature (1)..(818): Ceres Seq. ID no. 12420656
  misc_feature: MA Experiment ID: 20000111 Result: Up-regulated in Transcription
  misc_feature: MA Experiment 20000111 PARAMETER Experiment Name: At_42deg_Heat_cDNA_P Parameter: Temperature (deg C) Value: 42 vs. 22
  misc_feature: MA Experiment 20000111 PARAMETER Experiment Name: At_42deg_Heat_cDNA_P Parameter: Timepoint (hr) Value: 6
  misc_feature: MA Experiment 20000111 PARAMETER Experiment Name: At_42deg_Heat_cDNA_P Parameter: Tissue Value: Aerial
  misc_feature: MA Experiment ID: 20000113 Result: Up-regulated in Transcription
  misc_feature: MA Experiment 20000113 PARAMETER Experiment Name: At_42deg_Heat_cDNA_P Parameter: Temperature (deg C) Value: 42 vs. 22
  misc_feature: MA Experiment 20000113 PARAMETER Experiment Name: At_42deg_Heat_cDNA_P Parameter: Timepoint (hr) Value: 8
  misc_feature: MA Experiment 20000113 PARAMETER Experiment Name: At_42deg_Heat_cDNA_P Parameter: Tissue Value: Aerial
  misc_feature: MA Experiment ID: 20000173 Result: Up-regulated in Transcription
  misc_feature: MA Experiment 20000173 PARAMETER Experiment Name: At_42deg_Heat_P Parameter: Age (day) Value: 14
  misc_feature: MA Experiment 20000173 PARAMETER Experiment Name: At_42deg_Heat_P Parameter: Organism Value: A. thaliana
  misc_feature: MA Experiment 20000173 PARAMETER Experiment Name: At_42deg_Heat_P Parameter: Plant Line Value: WS
  misc_feature: MA Experiment 20000173 PARAMETER Experiment Name: At_42deg_Heat_P Parameter: Temperature (deg C) Value: 42 vs. 22
  misc_feature: MA Experiment 20000173 PARAMETER Experiment Name: At_42deg_Heat_P Parameter: Timepoint (hr) Value: 6
  misc_feature: MA Experiment 20000173 PARAMETER Experiment Name: At_42deg_Heat_P Parameter: Tissue Value: Aerial
  misc_feature: MA Experiment ID: 20000227 Result: Down-regulated in Transcription
  misc_feature: MA Experiment 20000227 PARAMETER Experiment Name: At_Root-Tips-vs-Tops_P Parameter: Tissue Value: Root Tips vs. Root Tops
  misc_feature: MA Experiment ID: 20000234 Result: Down-regulated in Transcription
  misc_feature: MA Experiment 20000234 PARAMETER Experiment Name: At_Siliques_P Parameter: Age (day) Value: 21
  misc_feature: MA Experiment 20000234 PARAMETER Experiment Name: At_Siliques_P Parameter: Organism Value: A. thaliana
  misc_feature: MA Experiment 20000234 PARAMETER Experiment Name: At_Siliques_P Parameter: Plant Line Value: WS
  misc_feature: MA Experiment 20000234 PARAMETER Experiment Name: At_Siliques_P Parameter: Tissue Value: Less Than 5mm Siliques vs. Whole Plant
  misc_feature: MA Experiment ID: 20000264 Result: Down-regulated in Transcription
  misc_feature: MA Experiment 20000264 PARAMETER Experiment Name: At_Open_Flower_P Parameter: Age (day) Value: 21
  misc_feature: MA Experiment 20000264 PARAMETER Experiment Name: At_Open_Flower_P Parameter: Plant Line Value: WS
  misc_feature: MA Experiment 20000264 PARAMETER Experiment Name: At_Open_Flower_P Parameter: Tissue Value: Open Flower vs. Whole Plant
  misc_feature: MA Experiment ID: 20000265 Result: Down-regulated in Transcription
  misc_feature: MA Experiment 20000265 PARAMETER Experiment Name: At_Open_Flower_P Parameter: Age (day) Value: 21
  misc_feature: MA Experiment 20000265 PARAMETER Experiment Name: At_Open_Flower_P Parameter: Plant Line Value: WS
  misc_feature: MA Experiment 20000265 PARAMETER Experiment Name: At_Open_Flower_P Parameter: Tissue Value: Closed Flower vs. Whole Plant
  misc_feature: MA Experiment ID: 20000495 Result: Down-regulated in Transcription
  misc_feature: MA Experiment 20000495 PARAMETER Experiment Name: At_Guard_Cells_P Parameter: Harvest Date Value: 8/2/2002
  misc_feature: MA Experiment 20000495 PARAMETER Experiment Name: At_Guard_Cells_P Parameter: Organism Value: A. thaliana
  misc_feature: MA Experiment 20000495 PARAMETER Experiment Name: At_Guard_Cells_P Parameter: Tissue Value: Guard Cells vs. Leaves
  misc_feature: MA Experiment ID: 20000496 Result: Down-regulated in Transcription
  misc_feature: MA Experiment 20000496 PARAMETER Experiment Name: At_Guard_Cells_P Parameter: Harvest Date Value: 7/19/2002
  misc_feature: MA Experiment 20000496 PARAMETER Experiment Name: At_Guard_Cells_P Parameter: Organism Value: Canola
  misc_feature: MA Experiment 20000496 PARAMETER Experiment Name: At_Guard_Cells_P Parameter: Tissue Value: Guard Cells vs. Leaves
  misc_feature: MA Experiment ID: 20000794 Result: Down-regulated in Transcription
  misc_feature: MA Experiment 20000794 PARAMETER Experiment Name: At_Petals_P Parameter: Age (day) Value: 23-25 days
  misc_feature: MA Experiment 20000794 PARAMETER Experiment Name: At_Petals_P Parameter: Plant Line Value: WS
  misc_feature: MA Experiment 20000794 PARAMETER Experiment Name: At_Petals_P Parameter: Tissue Value: Petals vs. Whole plant
  misc_feature: MA Experiment ID: 20001560 Result: Down-regulated in Transcription
  misc_feature: MA Experiment 20001560 PARAMETER Experiment Name: At_Drought_Soil_Dry_P Parameter: Age (day) Value: 28
  misc_feature: MA Experiment 20001560 PARAMETER Experiment Name: At_Drought_Soil_Dry_P Parameter: Organism Value: A. thaliana
  misc_feature: MA Experiment 20001560 PARAMETER Experiment Name: At_Drought_Soil_Dry_P Parameter: Plant Line Value: WS
  misc_feature: MA Experiment 20001560 PARAMETER Experiment Name: At_Drought_Soil_Dry_P Parameter: Post Timepoint (hr) Value: None
  misc_feature: MA Experiment 20001560 PARAMETER Experiment Name: At_Drought_Soil_Dry_P Parameter: Post-Treatment Value: None
  misc_feature: MA Experiment 20001560 PARAMETER Experiment Name: At_Drought_Soil_Dry_P Parameter: Timepoint (day) Value: 14
  misc_feature: MA Experiment 20001560 PARAMETER Experiment Name: At_Drought_Soil_Dry_P Parameter: Treatment Value: Drought vs. No Drought
ccacgaattccccaccaccatctctattttcttcctttcccctaagtcttggttcttcttctctctaatacgagaagaaaaaggcgaaaacctcgccaatccgattacgcgaaaaatcaaaggtttttggatatggcgtcgaagcggatcttgaaggaattgaaggatctccagaaggatccacctacatcatgtagcgcaggtcctgttgctgaagacatgtttcactggcaggcaacgataatgggtccttcagagagtccttatgctggaggtgttttccttgtaaccatccatttccctccggattacccattcaagcctcctaaggtggcctttaggaccaaggtgttccatcccaacattaacagcaacggtagcatttgcctcgacatcttgaaggagcagtggagtcctgcgctcaccatttccaaggtgctgctatcgatctgttctttgttaaccgatccaaacccggatgatcctttggtgcccgagatagctcacatgtacaagactgacaagaacaagtacgagtccactgcacgaagctggactcagaagtatgccatgggctaaatggaaaatcccacctactaaattatctctttatgaagaaaaaaatctgccttaatttctatgtatgattcgatagacatctctttgtgtccttttaactttctgaagacaggaccaaatgaagtgggtcttgttttaaacgaaacaaaaaaaaacatcatctttgtgaaaactagaatctgatcatcttctgttgtttcttcttgtggtgaaattatgatttgatgttaaaggaattc

SEQ ID NO: 76921 - protein, 148 aa, Arabidopsis thaliana; identical to SEQ ID NO: 24844
  peptide (1)..(148): Ceres Seq. ID no. 12420657
  misc_feature (1)..(148): Homolog of NCBI NO: 18423494 NR Description: E2, ubiquitin-conjugating enzyme 10 (UBC10); id: At5g53300.1, supported by cDNA: 25162., supported by cDNA: supported by cDNA: gi_13265586, supported by cDNA: gi_13358197,
  misc_feature (1)..(148): Homolog of NCBI NO: 11762186 NR Description: AT4g27960 [Arabidopsis thaliana]
  misc_feature (1)..(148): Homolog of NCBI NO: 18417097 NR Description: E2, ubiquitin-conjugating enzyme 9 (UBC9); id: At4g27960.1, supported by cDNA: gi_13358210 [Arabidopsis
  misc_feature (1)..(148): Homolog of NCBI NO: 21554343 NR Description: E2, ubiquitin-conjugating enzyme 10 (UBC10)
  misc_feature (1)..(148): Homolog of NCBI NO: 30687803 NR Description: ubiquitin-conjugating enzyme 9 (UBC9)
  misc_feature (1)..(148): Homolog of NCBI NO: 40287554 NR Description: ubiquitin-conjugating enzyme 8 [Capsicum annuum]
  misc_feature (1)..(148): Homolog of NCBI NO: 5762457 NR Description: ubiquitin-conjugating enzyme UBC2
  misc_feature (1)..(148): Homolog of NCBI NO: 18408001 NR Description: E2, ubiquitin-conjugating enzyme, putative; id: At1g64230.1, supported by cDNA: gi_14326528 [Arabidopsis >gi|14326529|gb|AAK60309.1|AF385718_1 At1g64230/F22C12_17
  misc_feature (1)..(148): Homolog of NCBI NO: 19347859 NR Description: putative E2, ubiquitin-conjugating enzyme UBC9
  misc_feature (1)..(148): Homolog of NCBI NO: 456568 NR Description: ubiquitin conjugating enzyme

SEQ ID NO: 76922 - protein, 119 aa, Arabidopsis thaliana; identical to SEQ ID NO: 24845
  peptide (1)..(119): Ceres Seq. ID no. 12420658
  misc_feature (1)..(119): Homolog of NCBI NO: 18423494 NR Description: E2, ubiquitin-conjugating enzyme 10 (UBC10); id: At5g53300.1, supported by cDNA: 25162., supported by cDNA: supported by cDNA: gi_13265586, supported by cDNA: gi_13358197,
  misc_feature (1)..(119): Homolog of NCBI NO: 11762186 NR Description: AT4g27960 [Arabidopsis thaliana]
  misc_feature (1)..(119): Homolog of NCBI NO: 18417097 NR Description: E2, ubiquitin-conjugating enzyme 9 (UBC9); id: At4g27960.1, supported by cDNA: gi_13358210 [Arabidopsis
  misc_feature (1)..(119): Homolog of NCBI NO: 21554343 NR Description: E2, ubiquitin-conjugating enzyme 10 (UBC10)
  misc_feature (1)..(119): Homolog of NCBI NO: 30687803 NR Description: ubiquitin-conjugating enzyme 9 (UBC9)
  misc_feature (1)..(119): Homolog of NCBI NO: 40287554 NR Description: ubiquitin-conjugating enzyme 8 [Capsicum annuum]
  misc_feature (1)..(119): Homolog of NCBI NO: 5762457 NR Description: ubiquitin-conjugating enzyme UBC2
  misc_feature (1)..(119): Homolog of NCBI NO: 18408001 NR Description: E2, ubiquitin-conjugating enzyme, putative; id: At1g64230.1, supported by cDNA: gi_14326528 [Arabidopsis >gi|14326529|gb|AAK60309.1|AF385718_1 At1g64230/F22C12_17
  misc_feature (1)..(119): Homolog of NCBI NO: 19347859 NR Description: putative E2, ubiquitin-conjugating enzyme UBC9
  misc_feature (1)..(119): Homolog of NCBI NO: 456568 NR Description: ubiquitin conjugating enzyme

SEQ ID NO: 76923 - protein, 111 aa, Arabidopsis thaliana; identical to SEQ ID NO: 24846
  peptide (1)..(111): Ceres Seq. ID no. 12420659
  misc_feature (1)..(111): Homolog of NCBI NO: 18423494 NR Description: E2, ubiquitin-conjugating enzyme 10 (UBC10); id: At5g53300.1, supported by cDNA: 25162., supported by cDNA: supported by cDNA: gi_13265586, supported by cDNA: gi_13358197,
  misc_feature (1)..(111): Homolog of NCBI NO: 11762186 NR Description: AT4g27960 [Arabidopsis thaliana]
  misc_feature (1)..(111): Homolog of NCBI NO: 18417097 NR Description: E2, ubiquitin-conjugating enzyme 9 (UBC9); id: At4g27960.1, supported by cDNA: gi_13358210 [Arabidopsis
  misc_feature (1)..(111): Homolog of NCBI NO: 21554343 NR Description: E2, ubiquitin-conjugating enzyme 10 (UBC10)
  misc_feature (1)..(111): Homolog of NCBI NO: 30687803 NR Description: ubiquitin-conjugating enzyme 9 (UBC9)
  misc_feature (1)..(111): Homolog of NCBI NO: 40287554 NR Description: ubiquitin-conjugating enzyme 8 [Capsicum annuum]
  misc_feature (1)..(111): Homolog of NCBI NO: 5762457 NR Description: ubiquitin-conjugating enzyme UBC2
  misc_feature (1)..(111): Homolog of NCBI NO: 18408001 NR Description: E2, ubiquitin-conjugating enzyme, putative; id: At1g64230.1, supported by cDNA: gi_14326528 [Arabidopsis >gi|14326529|gb|AAK60309.1|AF385718_1 At1g64230/F22C12_17
  misc_feature (1)..(111): Homolog of NCBI NO: 19347859 NR Description: putative E2, ubiquitin-conjugating enzyme UBC9
  misc_feature (1)..(111): Homolog of NCBI NO: 456568 NR Description: ubiquitin conjugating enzyme

SEQ ID NO: 76924 - DNA, 911 bp, Arabidopsis thaliana
  misc_feature (1)..(911): Ceres Seq. ID no. 12420894
  misc_feature: MA Experiment ID: 108434 Result: Up-regulated in Transcription
  misc_feature: MA Experiment 108434 PARAMETER Experiment Name: At_Root_Tips_cDNA_P Parameter: Tissue Value: Root Tips
  misc_feature: MA Experiment ID: 108462 Result: Down-regulated in Transcription
  misc_feature: MA Experiment 108462 PARAMETER Experiment Name: At_Germinating_Seeds_cDNA_P Parameter: Age (day) Value: 2 vs. 0
  misc_feature: MA Experiment 108462 PARAMETER Experiment Name: At_Germinating_Seeds_cDNA_P Parameter: Tissue Value: Germinating Seeds
  misc_feature: MA Experiment ID: 108463 Result: Down-regulated in Transcription
  misc_feature: MA Experiment 108463 PARAMETER Experiment Name: At_Germinating_Seeds_cDNA_P Parameter: Age (day) Value: 3 vs. 0
  misc_feature: MA Experiment 108463 PARAMETER Experiment Name: At_Germinating_Seeds_cDNA_P Parameter: Tissue Value: Germinating Seeds
  misc_feature: MA Experiment ID: 20000111 Result: Up-regulated in Transcription
  misc_feature: MA Experiment 20000111 PARAMETER Experiment Name: At_42deg_Heat_cDNA_P Parameter: Temperature (deg C) Value: 42 vs. 22
  misc_feature: MA Experiment 20000111 PARAMETER Experiment Name: At_42deg_Heat_cDNA_P Parameter: Timepoint (hr) Value: 6
  misc_feature: MA Experiment 20000111 PARAMETER Experiment Name: At_42deg_Heat_cDNA_P Parameter: Tissue Value: Aerial
  misc_feature: MA Experiment ID: 20000173 Result: Up-regulated in Transcription
  misc_feature: MA Experiment 20000173 PARAMETER Experiment Name: At_42deg_Heat_P Parameter: Age (day) Value: 14
  misc_feature: MA Experiment 20000173 PARAMETER Experiment Name: At_42deg_Heat_P Parameter: Organism Value: A. thaliana
  misc_feature: MA Experiment 20000173 PARAMETER Experiment Name: At_42deg_Heat_P Parameter: Plant Line Value: WS
  misc_feature: MA Experiment 20000173 PARAMETER Experiment Name: At_42deg_Heat_P Parameter: Temperature (deg C) Value: 42 vs. 22
  misc_feature: MA Experiment 20000173 PARAMETER Experiment Name: At_42deg_Heat_P Parameter: Timepoint (hr) Value: 6
  misc_feature: MA Experiment 20000173 PARAMETER Experiment Name: At_42deg_Heat_P Parameter: Tissue Value: Aerial
  misc_feature: MA Experiment ID: 20000184 Result: Up-regulated in Transcription
  misc_feature: MA Experiment 20000184 PARAMETER Experiment Name: At_Shoots__P Parameter: Age (day) Value: 7
  misc_feature: MA Experiment 20000184 PARAMETER Experiment Name: At_Shoots__P Parameter: Tissue Value: Shoots vs. Whole Plant
  misc_feature: MA Experiment ID: 20000794 Result: Down-regulated in Transcription
  misc_feature: MA Experiment 20000794 PARAMETER Experiment Name: At_Petals_P Parameter: Age (day) Value: 23-25 days
  misc_feature: MA Experiment 20000794 PARAMETER Experiment Name: At_Petals_P Parameter: Plant Line Value: WS
  misc_feature: MA Experiment 20000794 PARAMETER Experiment Name: At_Petals_P Parameter: Tissue Value: Petals vs. Whole plant
  misc_feature: MA Experiment ID: 20001557 Result: Up-regulated in Transcription
  misc_feature: MA Experiment 20001557 PARAMETER Experiment Name: At_Drought_Soil_Dry_P Parameter: Age (day) Value: 27
  misc_feature: MA Experiment 20001557 PARAMETER Experiment Name: At_Drought_Soil_Dry_P Parameter: Organism Value: A. thaliana
  misc_feature: MA Experiment 20001557 PARAMETER Experiment Name: At_Drought_Soil_Dry_P Parameter: Plant Line Value: WS
  misc_feature: MA Experiment 20001557 PARAMETER Experiment Name: At_Drought_Soil_Dry_P Parameter: Post Timepoint (hr) Value: 3
  misc_feature: MA Experiment 20001557 PARAMETER Experiment Name: At_Drought_Soil_Dry_P Parameter: Post-Treatment Value: Re-Water vs. No Drought
  misc_feature: MA Experiment 20001557 PARAMETER Experiment Name: At_Drought_Soil_Dry_P Parameter: Timepoint (day) Value: 13
  misc_feature: MA Experiment 20001557 PARAMETER Experiment Name: At_Drought_Soil_Dry_P Parameter: Treatment Value: Drought vs. No Drought
  misc_feature: MA Experiment ID: 20001558 Result: Up-regulated in Transcription
  misc_feature: MA Experiment 20001558 PARAMETER Experiment Name: At_Drought_Soil_Dry_P Parameter: Age (day) Value: 27
  misc_feature: MA Experiment 20001558 PARAMETER Experiment Name: At_Drought_Soil_Dry_P Parameter: Organism Value: A. thaliana
  misc_feature: MA Experiment 20001558 PARAMETER Experiment Name: At_Drought_Soil_Dry_P Parameter: Plant Line Value: WS
  misc_feature: MA Experiment 20001558 PARAMETER Experiment Name: At_Drought_Soil_Dry_P Parameter: Post Timepoint (hr) Value: 6
  misc_feature: MA Experiment 20001558 PARAMETER Experiment Name: At_Drought_Soil_Dry_P Parameter: Post-Treatment Value: Re-Water vs. No Drought
  misc_feature: MA Experiment 20001558 PARAMETER Experiment Name: At_Drought_Soil_Dry_P Parameter: Timepoint (day) Value: 13
  misc_feature: MA Experiment 20001558 PARAMETER Experiment Name: At_Drought_Soil_Dry_P Parameter: Treatment Value: Drought vs. No Drought
  misc_feature: MA Experiment ID: 20001560 Result: Up-regulated in Transcription
  misc_feature: MA Experiment 20001560 PARAMETER Experiment Name: At_Drought_Soil_Dry_P Parameter: Age (day) Value: 28
  misc_feature: MA Experiment 20001560 PARAMETER Experiment Name: At_Drought_Soil_Dry_P Parameter: Organism Value: A. thaliana
  misc_feature: MA Experiment 20001560 PARAMETER Experiment Name: At_Drought_Soil_Dry_P Parameter: Plant Line Value: WS
  misc_feature: MA Experiment 20001560 PARAMETER Experiment Name: At_Drought_Soil_Dry_P Parameter: Post Timepoint (hr) Value: None
  misc_feature: MA Experiment 20001560 PARAMETER Experiment Name: At_Drought_Soil_Dry_P Parameter: Post-Treatment Value: None
  misc_feature: MA Experiment 20001560 PARAMETER Experiment Name: At_Drought_Soil_Dry_P Parameter: Timepoint (day) Value: 14
  misc_feature: MA Experiment 20001560 PARAMETER Experiment Name: At_Drought_Soil_Dry_P Parameter: Treatment Value: Drought vs. No Drought
  misc_feature: MA Experiment ID: 20001757 Result: Up-regulated in Transcription
  misc_feature: MA Experiment 20001757 PARAMETER Experiment Name: At_50mM_NH4NO3_L-to-H_P Parameter: Timepoint (hr) Value: 6
  misc_feature: MA Experiment 20001757 PARAMETER Experiment Name: At_50mM_NH4NO3_L-to-H_P Parameter: Tissue Value: Leaf
  misc_feature: MA Experiment 20001757 PARAMETER Experiment Name: At_50mM_NH4NO3_L-to-H_P Parameter: Treatment Value: 50mM NH4NO3 vs 100mM Mannitol
  misc_feature: Phenotype: ROSETTE LEAVES Shape-Oval
  misc_feature: Phenotype: ROSETTE LEAVES Shape-Serrate
  misc_feature: Phenotype: ROSETTE LEAVES Shape-Oval
  misc_feature: Phenotype: WHOLE PLANT Color-Dark Green
  misc_feature: Phenotype: WHOLE PLANT Color-High Anthocyanin
  misc_feature: Phenotype: WHOLE PLANT Size-Small
  misc_feature: Phenotype: INFLORESCENCE Height-Short
  misc_feature: Phenotype: WHOLE PLANT Color-Yellow-Green Viable 1
  misc_feature: Phenotype: WHOLE PLANT Size-Small
  misc_feature: Phenotype: ROSETTE LEAVES Shape-Oval
  misc_feature: Phenotype: WHOLE PLANT Color-Dark Green
  misc_feature: Phenotype: WHOLE PLANT Color-High Anthocyanin
  misc_feature: Phenotype: WHOLE PLANT Size-Small
  misc_feature: Phenotype: INFLORESCENCE Height-Short
  misc_feature: Phenotype: WHOLE PLANT Color-Dark Green
  misc_feature: Phenotype: WHOLE PLANT Size-Small
  misc_feature: Phenotype: WHOLE PLANT Size-Small
  misc_feature: Phenotype: INFLORESCENCE Flowering Time-Late Flowering
  misc_feature: Phenotype: ROSETTE LEAVES Shape-Oval
  misc_feature: Phenotype: WHOLE PLANT Color-High Anthocyanin
  misc_feature: Phenotype: WHOLE PLANT Size-Small
  misc_feature: Phenotype: INFLORESCENCE Height-Short
  misc_feature: Phenotype: WHOLE PLANT Color-Dark Green
  misc_feature: Phenotype: WHOLE PLANT Color-High Anthocyanin
  misc_feature: Phenotype: WHOLE PLANT Size-Small
  misc_feature: Phenotype: WHOLE PLANT Size-Small
  misc_feature: Phenotype: INFLORESCENCE Flowering Time-Late Flowering
  misc_feature: Phenotype: WHOLE PLANT Color-Dark Green
  misc_feature: Phenotype: WHOLE PLANT Color-High Anthocyanin
  misc_feature: Phenotype: WHOLE PLANT Size-Small
  misc_feature: Phenotype: WHOLE PLANT Size-Small
  misc_feature: Phenotype: INFLORESCENCE Flowering Time-Late Flowering
ctcttaaagcttctcgttttctctgccgtctctctcattcgcgcgacgcaaacgatcttcagccatggccaccgccgcagatgttgacgctgagattcagcaggcgctcactaacgaagtcaagctcttcaaccgctggacctatgacgacgttacggtcacagacatcagtcttgttgactacattggagttcaggcagctaaacatgctacctttgttccccacaccgctggaagatactctgtgaagagattcaggaaggctcagtgccccattgttgagaggctcaccaactctctcatgatgcacgggaggaacaacggtaagaaattgatggctgtcaggatcgtcaagcacgccatggagattatccacctcttgtctgacttgaacccaattcaggtcatcattgacgccattgtcaacagtggtccacgtgaagatgctaccagaattggatctgctggtgttgttaggagacaagctgttgatatctctcctctaagacgtgttaaccaggctatcttcttgattaccactggtgctcgtgaagctgctttcagaaacatcaagactatagctgagtgccttgctgatgaattgatcaacgcagccaagggctcttccaacagctatgccatcaagaagaaggatgagattgaaagagttgccaaggctaatcgttaaggattttccctttgccctgtgcgttacaatctcgtatcaatgagtttaatgttttatcttcatttagattgaaatatgtatctcagatgtttgctcttttgttttatgaagtttatttcgtctgaactactttgaatagataaatttttgatgctttaagctgtttcgcatcagtttattgtcaatttttgaacttatctaggccacctgaagctagaaattt

SEQ ID NO: 76925 - protein, 207 aa, Arabidopsis thaliana [sequence omitted]

SEQ ID NO: 76926 - protein, 128 aa, Arabidopsis thaliana; identical to SEQ ID NO: 21374
  peptide (1)..(128): Ceres Seq. ID no. 12420896
  misc_feature (1)..(128): Homolog of NCBI NO: 15229897 NR Description: 40S ribosomal protein S5, putative; protein id: supported by cDNA: 29782., supported by cDNA: gi_15027978, by cDNA: gi_20259198 [Arabidopsis thaliana]
  misc_feature (1)..(128): Homolog of NCBI NO: 15228111 NR Description: 40S ribosomal protein S5; protein id: supported by cDNA: 8397., supported by cDNA: gi_16648958, by cDNA: gi_20148680 [Arabidopsis thaliana]
  misc_feature (1)..(128): Homolog of NCBI NO: 21617886 NR Description: 40S ribosomal protein S5 [Arabidopsis thaliana]
  misc_feature (1)..(128): Homolog of NCBI NO: 6831665 NR Description: 40S RIBOSOMAL PROTEIN S5
  misc_feature (1)..(128): Homolog of NCBI NO: 34893994 NR Description: putative 40S ribosomal protein S5 [Oryza sativa
  misc_feature (1)..(128): Homolog of NCBI NO: 40748265 NR Description: 40S ribosomal protein S5 [Capsicum annuum]
  misc_feature (1)..(128): Homolog of NCBI NO: 15294021 NR Description: 40S ribosomal protein S5 [Ictalurus punctatus]
  misc_feature (1)..(128): Homolog of NCBI NO: 34854534 NR Description: similar to ribosomal protein S5; 40S ribosomal
  misc_feature (1)..(128): Homolog of NCBI NO: 3717978 NR Description: 5S ribosomal protein [Mus musculus] unnamed protein product [Mus musculus] unnamed protein product [Mus musculus]
  misc_feature (1)..(128): Homolog of NCBI NO: 13904870 NR Description: ribosomal protein S5; 40S ribosomal protein S5 sapiens] >gi|22002064|sp|P46782|RS5_HUMAN 40S ribosomal protein >gi|15929961|gb|AAH15405.1|AAH15405 ribosomal protein S5 [Homo

SEQ ID NO: 76927 - protein, 127 aa, Arabidopsis thaliana
  peptide (1)..(127): Ceres Seq. ID no. 12420897
  misc_feature (1)..(127): Homolog of NCBI NO: 15229897 NR Description: 40S ribosomal protein S5, putative; protein id: supported by cDNA: 29782., supported by cDNA: gi_15027978, by cDNA: gi_20259198 [Arabidopsis thaliana]
  misc_feature (1)..(127): Homolog of NCBI NO: 15228111 NR Description: 40S ribosomal protein S5; protein id: supported by cDNA: 8397., supported by cDNA: gi_16648958, by cDNA: gi_20148680 [Arabidopsis thaliana]
  misc_feature (1)..(127): Homolog of NCBI NO: 21617886 NR Description: 40S ribosomal protein S5 [Arabidopsis thaliana]
  misc_feature (1)..(127): Homolog of NCBI NO: 6831665 NR Description: 40S RIBOSOMAL PROTEIN S5
  misc_feature (1)..(127): Homolog of NCBI NO: 34893994 NR Description: putative 40S ribosomal protein S5 [Oryza sativa
  misc_feature (1)..(127): Homolog of NCBI NO: 40748265 NR Description: 40S ribosomal protein S5 [Capsicum annuum]
  misc_feature (1)..(127): Homolog of NCBI NO: 15294021 NR Description: 40S ribosomal protein S5 [Ictalurus punctatus]
  misc_feature (1)..(127): Homolog of NCBI NO: 34854534 NR Description: similar to ribosomal protein S5; 40S ribosomal
  misc_feature (1)..(127): Homolog of NCBI NO: 3717978 NR Description: 5S ribosomal protein [Mus musculus] unnamed protein product [Mus musculus] unnamed protein product [Mus musculus]
  misc_feature (1)..(127): Homolog of NCBI NO: 13904870 NR Description: ribosomal protein S5; 40S ribosomal protein S5 sapiens] >gi|22002064|sp|P46782|RS5_HUMAN 40S ribosomal protein >gi|15929961|gb|AAH15405.1|AAH15405 ribosomal protein S5 [Homo
MHGRNNGKKLMAVRIVKHAMEIIHLLSDLNPIQVIIDAIVNSGPREDATRIGSAGVVRRQAVDISPLRRVNQAIFLITTGAREAAFRNIKTIAECLADELINAAKGSSNSYAIKKKDEIERVAKANR

SEQ ID NO: 76928 - DNA, 1338 bp, Arabidopsis thaliana
  misc_feature (1)..(1338): Ceres Seq. ID no. 12422548
  misc_feature: MA Experiment ID: 108461 Result: Up-regulated in Transcription
  misc_feature: MA Experiment 108461 PARAMETER Experiment Name: At_Germinating_Seeds_cDNA_P Parameter: Age (day) Value: 1 vs. 0
  misc_feature: MA Experiment 108461 PARAMETER Experiment Name: At_Germinating_Seeds_cDNA_P Parameter: Tissue Value: Germinating Seeds
  misc_feature: MA Experiment ID: 108462 Result: Up-regulated in Transcription
  misc_feature: MA Experiment 108462 PARAMETER Experiment Name: At_Germinating_Seeds_cDNA_P Parameter: Age (day) Value: 2 vs. 0
  misc_feature: MA Experiment 108462 PARAMETER Experiment Name: At_Germinating_Seeds_cDNA_P Parameter: Tissue Value: Germinating Seeds
  misc_feature: MA Experiment ID: 108463 Result: Up-regulated in Transcription
  misc_feature: MA Experiment 108463 PARAMETER Experiment Name: At_Germinating_Seeds_cDNA_P Parameter: Age (day) Value: 3 vs. 0
  misc_feature: MA Experiment 108463 PARAMETER Experiment Name: At_Germinating_Seeds_cDNA_P Parameter: Tissue Value: Germinating Seeds
  misc_feature: MA Experiment ID: 108464 Result: Up-regulated in Transcription
  misc_feature: MA Experiment 108464 PARAMETER Experiment Name: At_Germinating_Seeds_cDNA_P Parameter: Age (day) Value: 4 vs. 0
  misc_feature: MA Experiment 108464 PARAMETER Experiment Name: At_Germinating_Seeds_cDNA_P Parameter: Tissue Value: Germinating Seeds
  misc_feature: MA Experiment ID: 108572 Result: Up-regulated in Transcription
  misc_feature: MA Experiment 108572 PARAMETER Experiment Name: At_Drought_cDNA_P Parameter: Timepoint (hr) Value: 1
  misc_feature: MA Experiment 108572 PARAMETER Experiment Name: At_Drought_cDNA_P Parameter: Tissue Value: Aerial
  misc_feature: MA Experiment 108572 PARAMETER Experiment Name: At_Drought_cDNA_P Parameter: Treatment Value: Drought vs. No Drought
  misc_feature: MA Experiment ID: 108573 Result: Up-regulated in Transcription
  misc_feature: MA Experiment 108573 PARAMETER Experiment Name: At_Drought_cDNA_P Parameter: Timepoint (hr) Value: 6
  misc_feature: MA Experiment 108573 PARAMETER Experiment Name: At_Drought_cDNA_P Parameter: Tissue Value: Aerial
  misc_feature: MA Experiment 108573 PARAMETER Experiment Name: At_Drought_cDNA_P Parameter: Treatment Value: Drought vs. No Drought
  misc_feature: MA Experiment ID: 108576 Result: Down-regulated in Transcription
  misc_feature: MA Experiment 108576 PARAMETER Experiment Name: At_42deg_Heat_cDNA_P Parameter: Temperature (deg C) Value: 42 vs. 22
  misc_feature: MA Experiment 108576 PARAMETER Experiment Name: At_42deg_Heat_cDNA_P Parameter: Timepoint (hr) Value: 1
  misc_feature: MA Experiment 108576 PARAMETER Experiment Name: At_42deg_Heat_cDNA_P Parameter: Tissue Value: Aerial
  misc_feature: MA Experiment ID: 108577 Result: Down-regulated in Transcription
  misc_feature: MA Experiment 108577 PARAMETER Experiment Name: At_42deg_Heat_cDNA_P Parameter: Temperature (deg C) Value: 42 vs. 22
  misc_feature: MA Experiment 108577 PARAMETER Experiment Name: At_42deg_Heat_cDNA_P Parameter: Timepoint (hr) Value: 6
  misc_feature: MA Experiment 108577 PARAMETER Experiment Name: At_42deg_Heat_cDNA_P Parameter: Tissue Value: Aerial
  misc_feature: MA Experiment ID: 108595 Result: Down-regulated in Transcription
  misc_feature: MA Experiment 108595 PARAMETER Experiment Name: At_Ler-pi_Ovule_cDNA_P Parameter: Plant Line Value: null
  misc_feature: MA Experiment ID: 108668 Result: Down-regulated in Transcription
  misc_feature: MA Experiment 108668 PARAMETER Experiment Name: At_2mM_SA_cDNA_P Parameter: Plant Line Value: WS
  misc_feature: MA Experiment 108668 PARAMETER Experiment Name: At_2mM_SA_cDNA_P Parameter: Timepoint (hr) Value: 6
  misc_feature: MA Experiment 108668 PARAMETER Experiment Name: At_2mM_SA_cDNA_P Parameter: Treatment Value: 2mM SA vs. No Treatment
  misc_feature: MA Experiment ID: 20000089 Result: Down-regulated in Transcription
  misc_feature: MA Experiment ID: 20000090 Result: Down-regulated in Transcription
  misc_feature: MA Experiment ID: 20000113 Result: Down-regulated in Transcription
  misc_feature: MA Experiment 20000113 PARAMETER Experiment Name: At_42deg_Heat_cDNA_P Parameter: Temperature (deg C) Value: 42 vs. 22
  misc_feature: MA Experiment 20000113 PARAMETER Experiment Name: At_42deg_Heat_cDNA_P Parameter: Timepoint (hr) Value: 8
  misc_feature: MA Experiment 20000113 PARAMETER Experiment Name: At_42deg_Heat_cDNA_P Parameter: Tissue Value: Aerial
  misc_feature: MA Experiment ID: 20000180 Result: Up-regulated in Transcription
  misc_feature: MA Experiment 20000180 PARAMETER Experiment Name: At_Germinating_Seeds_P Parameter: Age (hr) Value: 24 vs. 0
  misc_feature: MA Experiment 20000180 PARAMETER Experiment Name: At_Germinating_Seeds_P Parameter: Tissue Value: Germinating Seeds
  misc_feature: MA Experiment ID: 20000182 Result: Down-regulated in Transcription
  misc_feature: MA Experiment 20000182 PARAMETER Experiment Name: At_2mM_SA_P Parameter: Age (day) Value: 14
  misc_feature: MA Experiment 20000182 PARAMETER Experiment Name: At_2mM_SA_P Parameter: Organism Value: A. thaliana
  misc_feature: MA Experiment 20000182 PARAMETER Experiment Name: At_2mM_SA_P Parameter: Plant Line Value: WS
  misc_feature: MA Experiment 20000182 PARAMETER Experiment Name: At_2mM_SA_P Parameter: Timepoint (hr) Value: 6
  misc_feature: MA Experiment 20000182 PARAMETER Experiment Name: At_2mM_SA_P Parameter: Tissue Value: Aerial
  misc_feature: MA Experiment 20000182 PARAMETER Experiment Name: At_2mM_SA_P Parameter: Treatment Value: 2mM SA vs. No Treatment
  misc_feature: MA Experiment ID: 20000185 Result: Down-regulated in Transcription
  misc_feature: MA Experiment 20000185 PARAMETER Experiment Name: At_Roots__P Parameter: Age (day) Value: 7 vs. 21
  misc_feature: MA Experiment 20000185 PARAMETER Experiment Name: At_Roots__P Parameter: Organism Value: A. thaliana
  misc_feature: MA Experiment 20000185 PARAMETER Experiment Name: At_Roots__P Parameter: Tissue Value: Roots vs. Whole Plant
  misc_feature: MA Experiment ID: 20000437 Result: Down-regulated in Transcription
  misc_feature: MA Experiment 20000437 PARAMETER Experiment Name: At_Drought_P Parameter: Age (day) Value: 8
  misc_feature: MA Experiment 20000437 PARAMETER Experiment Name: At_Drought_P Parameter: Organism Value: A. thaliana
  misc_feature: MA Experiment 20000437 PARAMETER Experiment Name: At_Drought_P Parameter: Plant Line Value: WS
  misc_feature: MA Experiment 20000437 PARAMETER Experiment Name: At_Drought_P Parameter: Timepoint (hr) Value: 24
  misc_feature: MA Experiment 20000437 PARAMETER Experiment Name: At_Drought_P Parameter: Tissue Value: Whole Plant
  misc_feature: MA Experiment 20000437 PARAMETER Experiment Name: At_Drought_P Parameter: Treatment Value: Drought vs. No Drought
  misc_feature: MA Experiment ID: 20000438 Result: Up-regulated in Transcription
  misc_feature: MA Experiment 20000438 PARAMETER Experiment Name: At_Shoots__P Parameter: Age (day) Value: 14
  misc_feature: MA Experiment 20000438 PARAMETER Experiment Name: At_Shoots__P Parameter: Tissue Value: Shoots vs. Whole Plant
  misc_feature: MA Experiment ID: 20000439 Result: Down-regulated in Transcription
  misc_feature: MA Experiment 20000439 PARAMETER Experiment Name: At_Roots__P Parameter: Age (day) Value: 14 vs. 21
  misc_feature: MA Experiment 20000439 PARAMETER Experiment Name: At_Roots__P Parameter: Organism Value: A. thaliana
  misc_feature: MA Experiment 20000439 PARAMETER Experiment Name: At_Roots__P Parameter: Tissue Value: Roots vs. Whole Plant
agcgaagaagaaagaaaaaaaaaagcgtattcctcgtgagcactaacttctcactcattcttcttcttcagctgaatccaaatacccatttccatttttaaccgtggttggattgttttgagagttgaaggaagaagatgacgtctgacggagcaacgtcgacgtcagctgcagctgcagcagcagcgatggcgacgaggaggaaaccgtcgtggagagagagggagaacaatcggagaagagagcggcggagaagagctgttgcggcgaagatttatactggtcttagagctcaaggtaactacaatcttccaaaacattgtgacaacaatgaggttcttaaggctctttgttctgaagctggttgggttgttgaagaagacggaactacttatcgcaagggacacaagcctctacctggtgacatggctggatcatcttctcgagcaactccttactcttcccataaccaaagtcctctttcttccacttttgatagccccatcttatcttaccaagtcagtccttcctcttcttcattcccgagtccttctcgagttggtgatccacacaatatctccacaatcttccctttcctcaggaatggtggtattccttcatcgcttcctccacttagaatctcaaacagtgctcctgtcactccaccagtgtcatccccaacttctagaaaccccaaaccattgcctacttgggaatcttttaccaaacaatccatgtccatggctgctaaacagtcaatgacttctttgaactacccgttttatgcggtgtctgcacctgccagtcctactcatcatcgccagttccatgctccggctactatacctgaatgtgatgagtctgactcttccactgttgattctggtcattggataagctttcaaaagtttgcacaacaacagccattctctgcctctatggtgccaacctcgcctaccttcaatctcgtgaaacctgcaccacagcaattgtctccaaacacagcagcaatccaagagattggtcaaagctccgagtttaagtttgagaacagccaagttaagccatgggaaggggagaggatccatgatgtggctatggaggatctagagctcacgcttggaaatggtaaagctcatagttgagatgaagtatacatgaacctgttatgtcatgtcggaaggaaggattggagaatgagaattagtgtgttgttcattcagttcatggttttggttcttgttctagaatcgatattcattgtaccagtgagtttgtttcacaacgcattatttgtagatagaatgtttaagatgtatgtttctattatcattcctt

SEQ ID NO: 76929 - protein, 335 aa, Arabidopsis thaliana; identical to SEQ ID NO: 21341
  peptide (1)..(335): Ceres Seq. ID no. 12422549
  misc_feature (1)..(335): Homolog of NCBI NO: 18394728 NR Description: expressed protein; protein id: At1g19350.1, by cDNA: 24157., supported by cDNA: gi_18086445, supported by
  misc_feature (1)..(335): Homolog of NCBI NO: 6651069 NR Description: 107 protein [Arabidopsis thaliana]
  misc_feature (1)..(335): Homolog of NCBI NO: 21592457 NR Description: unknown [Arabidopsis thaliana]
  misc_feature (1)..(333): Homolog of NCBI NO: 18410764 NR Description: expressed protein; protein id: At1g75080.1, by cDNA: 33367., supported by cDNA: gi_18086460, supported by gi_20147314 [Arabidopsis thaliana]
  misc_feature (1)..(333): Homolog of NCBI NO: 18086461 NR Description: At1g75080/F9E10_7 [Arabidopsis thaliana]
  misc_feature (1)..(333): Homolog of NCBI NO: 25352558 NR Description: unknown protein F9E10.7 [imported] - Arabidopsis
  misc_feature (22)..(333): Homolog of NCBI NO: 15215731 NR Description: AT4g36780/C7A10_580 [Arabidopsis thaliana]
  misc_feature (21)..(280): Homolog of NCBI NO: 14626761 NR Description: mature anther-specific protein LAT61
  misc_feature (9)..(273): Homolog of NCBI NO: 33146833 NR Description: putative mature anther-specific protein LAT61
  misc_feature (200)..(335): Homolog of NCBI NO: 13937167 NR Description: At1g19350/F18O14_4 [Arabidopsis thaliana]

SEQ ID NO: 76930 - protein, 318 aa, Arabidopsis thaliana; identical to SEQ ID NO: 21342
  peptide (1)..(318): Ceres Seq. ID no. 12422550
  misc_feature (1)..(318): Homolog of NCBI NO: 18394728 NR Description: expressed protein; protein id: At1g19350.1, by cDNA: 24157., supported by cDNA: gi_18086445, supported by
  misc_feature (1)..(318): Homolog of NCBI NO: 6651069 NR Description: 107 protein [Arabidopsis thaliana]
  misc_feature (1)..(318): Homolog of NCBI NO: 21592457 NR Description: unknown [Arabidopsis thaliana]
  misc_feature (1)..(316): Homolog of NCBI NO: 18410764 NR Description: expressed protein; protein id: At1g75080.1, by cDNA: 33367., supported by cDNA: gi_18086460, supported by gi_20147314 [Arabidopsis thaliana]
  misc_feature (1)..(316): Homolog of NCBI NO: 18086461 NR Description: At1g75080/F9E10_7 [Arabidopsis thaliana]
  misc_feature (1)..(316): Homolog of NCBI NO: 25352558 NR Description: unknown protein F9E10.7 [imported] - Arabidopsis
  misc_feature (5)..(316): Homolog of NCBI NO: 15215731 NR Description: AT4g36780/C7A10_580 [Arabidopsis thaliana]
  misc_feature (4)..(263): Homolog of NCBI NO: 14626761 NR Description: mature anther-specific protein LAT61
  misc_feature (1)..(256): Homolog of NCBI NO: 33146833 NR Description: putative mature anther-specific protein LAT61
  misc_feature (183)..(318): Homolog of NCBI NO: 13937167 NR Description: At1g19350/F18O14_4 [Arabidopsis thaliana]

SEQ ID NO: 76931 - protein, 239 aa, Arabidopsis thaliana; identical to SEQ ID NO: 21343
  peptide (1)..(239): Ceres Seq. ID no. 12422551
  misc_feature (1)..(239): Homolog of NCBI NO: 18394728 NR Description: expressed protein; protein id: At1g19350.1, by cDNA: 24157., supported by cDNA: gi_18086445, supported by
  misc_feature (1)..(239): Homolog of NCBI NO: 6651069 NR Description: 107 protein [Arabidopsis thaliana]
  misc_feature (1)..(239): Homolog of NCBI NO: 21592457 NR Description: unknown [Arabidopsis thaliana]
  misc_feature (1)..(237): Homolog of NCBI NO: 18410764 NR Description: expressed protein; protein id: At1g75080.1, by cDNA: 33367., supported by cDNA: gi_18086460, supported by gi_20147314 [Arabidopsis thaliana]
  misc_feature (1)..(237): Homolog of NCBI NO: 18086461 NR Description: At1g75080/F9E10_7 [Arabidopsis thaliana]
  misc_feature (1)..(237): Homolog of NCBI NO: 25352558 NR Description: unknown protein F9E10.7 [imported] - Arabidopsis
  misc_feature (1)..(237): Homolog of NCBI NO: 15215731 NR Description: AT4g36780/C7A10_580 [Arabidopsis thaliana]
  misc_feature (1)..(184): Homolog of NCBI NO: 14626761 NR Description: mature anther-specific protein LAT61
  misc_feature (1)..(177): Homolog of NCBI NO: 33146833 NR Description: putative mature anther-specific protein LAT61
  misc_feature (104)..(239): Homolog of NCBI NO: 13937167 NR Description: At1g19350/F18O14_4 [Arabidopsis thaliana]

SEQ ID NO: 76932 - DNA, 719 bp, Arabidopsis thaliana
  misc_feature (1)..(719): Ceres Seq. ID no. 12422869
  misc_feature: MA Experiment ID: 108595 Result: Down-regulated in Transcription
  misc_feature: MA Experiment 108595 PARAMETER Experiment Name: At_Ler-pi_Ovule_cDNA_P Parameter: Plant Line Value: null
atttttcatttcatttcatttctgattgtctttctcagaatccctagaacacacactgattaacgaatcaaagatcgatttggggatcaatcgaggaagaagatgacggaggcgatgataaggaagaagccaggaatggcgagtgtgaaggatatgccgttgcttcaggatggtccaccacctggtggattcgcgccggtccgatatgctcgccggatctccaacacgggacctagcgccatggctattttccttaccgtttccggtgcttttgcttggggcatgtaccaagttggtcagggcaacaaaatccgcagggcgttgaaggaagagaagtacgctgcacgtagagcaattctaccgattcttcaagctgaagaagatgaaaggtttgtgtctgagtggaagaagtatctagaatacgaggcggatgtgatgaaggatgttcctggatggaaagtcggtgaaaacgtgtacaattctggtcgttggatgcctccagctaccggagagcttcgtcctgatgtctggtaaaatttcaatggctccttttgatgatgatgaatgaatgtttgtttaagcattttagaaccttgatgtttgttgtctctatatttccatcgtataataagagaaatgatacatacacagttcatgtattgctggtacggtacggaggaatgttttcggtatttttccctcattcacttatttctgtc

SEQ ID NO: 76933 - protein, 143 aa, Arabidopsis thaliana; identical to SEQ ID NO: 25880
  peptide (1)..(143): Ceres Seq. ID no. 12422870
  misc_feature (16)..(141): Pfam Name: GRIM-19 protein Pfam Description: GRIM-19 protein
  misc_feature (1)..(143): Homolog of NCBI NO: 18403216 NR Description: expressed protein; protein id: At2g33220.1, by cDNA: 954., supported by cDNA: gi_17529029, supported by cDNA: [Arabidopsis thaliana] >gi|25408250|pir||G84742
  misc_feature (1)..(143): Homolog of NCBI NO: 20260652 NR Description: unknown protein [Arabidopsis thaliana]
  misc_feature (1)..(143): Homolog of NCBI NO: 15219769 NR Description: unknown protein; protein id: At1g04630.1
  misc_feature (1)..(139): Homolog of NCBI NO: 16973316 NR Description: F6 [Gossypium hirsutum]
  misc_feature (1)..(141): Homolog of NCBI NO: 25406799 NR Description: hypothetical protein [imported] - Arabidopsis >gi|2494128|gb|AAB80637.1| EST gb|T43244 comes from this gene.
  misc_feature (1)..(72): Homolog of NCBI NO: 26451954 NR Description: unknown protein [Arabidopsis thaliana]
  misc_feature (1)..(140): Homolog of NCBI NO: 34334020 NR Description: NADH:ubiquinone oxidoreductase B16.6 subunit
  misc_feature (13)..(138): Homolog of NCBI NO: 21361822 NR Description: cell death-regulatory protein GRIM19; CGI-39 [Homo sapiens] >gi|12005918|gb|AAG44670.1|AF261134_1 CDA016 [Homo
  misc_feature (22)..(138): Homolog of NCBI NO: 28603804 NR Description: cell death-regulatory protein GRIM19 [Bos taurus]
  misc_feature (13)..(138): Homolog of NCBI NO: 34809544 NR Description: GRIM19 protein [Homo sapiens]

SEQ ID NO: 76934 - protein, 139 aa, Arabidopsis thaliana; identical to SEQ ID NO: 25881
  peptide (1)..(139): Ceres Seq. ID no. 12422871
  misc_feature (12)..(137): Pfam Name: GRIM-19 protein Pfam Description: GRIM-19 protein
  misc_feature (1)..(139): Homolog of NCBI NO: 18403216 NR Description: expressed protein; protein id: At2g33220.1, by cDNA: 954., supported by cDNA: gi_17529029, supported by cDNA: [Arabidopsis thaliana] >gi|25408250|pir||G84742
  misc_feature (1)..(139): Homolog of NCBI NO: 20260652 NR Description: unknown protein [Arabidopsis thaliana]
  misc_feature (1)..(139): Homolog of NCBI NO: 15219769 NR Description: unknown protein; protein id: At1g04630.1
  misc_feature (1)..(135): Homolog of NCBI NO: 16973316 NR Description: F6 [Gossypium hirsutum]
  misc_feature (1)..(137): Homolog of NCBI NO: 25406799 NR Description: hypothetical protein [imported] - Arabidopsis >gi|2494128|gb|AAB80637.1| EST gb|T43244 comes from this gene.
  misc_feature (1)..(68): Homolog of NCBI NO: 26451954 NR Description: unknown protein [Arabidopsis thaliana]
  misc_feature (1)..(136): Homolog of NCBI NO: 34334020 NR Description: NADH:ubiquinone oxidoreductase B16.6 subunit
  misc_feature (9)..(134): Homolog of NCBI NO: 21361822 NR Description: cell death-regulatory protein GRIM19; CGI-39 [Homo sapiens] >gi|12005918|gb|AAG44670.1|AF261134_1 CDA016 [Homo
  misc_feature (18)..(134): Homolog of NCBI NO: 28603804 NR Description: cell death-regulatory protein GRIM19 [Bos taurus]
  misc_feature (9)..(134): Homolog of NCBI NO: 34809544 NR Description: GRIM19 protein [Homo sapiens]

SEQ ID NO: 76935 - protein, 132 aa, Arabidopsis thaliana; identical to SEQ ID NO: 25882
  peptide (1)..(132): Ceres Seq. ID no. 12422872
  misc_feature (5)..(130): Pfam Name: GRIM-19 protein Pfam Description: GRIM-19 protein
  misc_feature (1)..(132): Homolog of NCBI NO: 18403216 NR Description: expressed protein; protein id: At2g33220.1, by cDNA: 954., supported by cDNA: gi_17529029, supported by cDNA: [Arabidopsis thaliana] >gi|25408250|pir||G84742
  misc_feature (1)..(132): Homolog of NCBI NO: 20260652 NR Description: unknown protein [Arabidopsis thaliana]
  misc_feature (1)..(132): Homolog of NCBI NO: 15219769 NR Description: unknown protein; protein id: At1g04630.1
  misc_feature (1)..(128): Homolog of NCBI NO: 16973316 NR Description: F6 [Gossypium hirsutum]
  misc_feature (1)..(130): Homolog of NCBI NO: 25406799 NR Description: hypothetical protein [imported] - Arabidopsis >gi|2494128|gb|AAB80637.1| EST gb|T43244 comes from this gene.
  misc_feature (1)..(61): Homolog of NCBI NO: 26451954 NR Description: unknown protein [Arabidopsis thaliana]
  misc_feature (1)..(129): Homolog of NCBI NO: 34334020 NR Description: NADH:ubiquinone oxidoreductase B16.6 subunit
  misc_feature (2)..(127): Homolog of NCBI NO: 21361822 NR Description: cell death-regulatory protein GRIM19; CGI-39 [Homo sapiens] >gi|12005918|gb|AAG44670.1|AF261134_1 CDA016 [Homo
  misc_feature (11)..(127): Homolog of NCBI NO: 28603804 NR Description: cell death-regulatory protein GRIM19 [Bos taurus]
  misc_feature (2)..(127): Homolog of NCBI NO: 34809544 NR Description: GRIM19 protein [Homo sapiens]

SEQ ID NO: 76936 - DNA, 763 bp, Arabidopsis thaliana
  misc_feature (1)..(763): Ceres Seq. ID no. 12422873
  misc_feature: MA Experiment ID: 108434 Result: Up-regulated in Transcription
  misc_feature: MA Experiment 108434 PARAMETER Experiment Name: At_Root_Tips_cDNA_P Parameter: Tissue Value: Root Tips
  misc_feature: MA Experiment ID: 108461 Result: Down-regulated in Transcription
  misc_feature: MA Experiment 108461 PARAMETER Experiment Name: At_Germinating_Seeds_cDNA_P Parameter: Age (day) Value: 1 vs. 0
  misc_feature: MA Experiment 108461 PARAMETER Experiment Name: At_Germinating_Seeds_cDNA_P Parameter: Tissue Value: Germinating Seeds
  misc_feature: MA Experiment ID: 108462 Result: Down-regulated in Transcription
  misc_feature: MA Experiment 108462 PARAMETER Experiment Name: At_Germinating_Seeds_cDNA_P Parameter: Age (day) Value: 2 vs. 0
  misc_feature: MA Experiment 108462 PARAMETER Experiment Name: At_Germinating_Seeds_cDNA_P Parameter: Tissue Value: Germinating Seeds
  misc_feature: MA Experiment ID: 108463 Result: Down-regulated in Transcription
  misc_feature: MA Experiment 108463 PARAMETER Experiment Name: At_Germinating_Seeds_cDNA_P Parameter: Age (day) Value: 3 vs. 0
  misc_feature: MA Experiment 108463 PARAMETER Experiment Name: At_Germinating_Seeds_cDNA_P Parameter: Tissue Value: Germinating Seeds
  misc_feature: MA Experiment ID: 108464 Result: Down-regulated in Transcription
  misc_feature: MA Experiment 108464 PARAMETER Experiment Name: At_Germinating_Seeds_cDNA_P Parameter: Age (day) Value: 4 vs. 0
  misc_feature: MA Experiment 108464 PARAMETER Experiment Name: At_Germinating_Seeds_cDNA_P Parameter: Tissue Value: Germinating Seeds
  misc_feature: MA Experiment ID: 108488 Result: Up-regulated in Transcription
  misc_feature: MA Experiment ID: 108489 Result: Up-regulated in Transcription
  misc_feature: MA Experiment ID: 108572 Result: Down-regulated in Transcription
  misc_feature: MA Experiment 108572 PARAMETER Experiment Name: At_Drought_cDNA_P Parameter: Timepoint (hr) Value: 1
  misc_feature: MA Experiment 108572 PARAMETER Experiment Name: At_Drought_cDNA_P Parameter: Tissue Value: Aerial
  misc_feature: MA Experiment 108572 PARAMETER Experiment Name: At_Drought_cDNA_P Parameter: Treatment Value: Drought vs. No Drought
  misc_feature: MA Experiment ID: 108573 Result: Down-regulated in Transcription
  misc_feature: MA Experiment 108573 PARAMETER Experiment Name: At_Drought_cDNA_P Parameter: Timepoint (hr) Value: 6
  misc_feature: MA Experiment 108573 PARAMETER Experiment Name: At_Drought_cDNA_P Parameter: Tissue Value: Aerial
  misc_feature: MA Experiment 108573 PARAMETER Experiment Name: At_Drought_cDNA_P Parameter: Treatment Value: Drought vs. No Drought
  misc_feature: MA Experiment ID: 20000111 Result: Up-regulated in Transcription
  misc_feature: MA Experiment 20000111 PARAMETER Experiment Name: At_42deg_Heat_cDNA_P Parameter: Temperature (deg C) Value: 42 vs. 22
  misc_feature: MA Experiment 20000111 PARAMETER Experiment Name: At_42deg_Heat_cDNA_P Parameter: Timepoint (hr) Value: 6
  misc_feature: MA Experiment 20000111 PARAMETER Experiment Name: At_42deg_Heat_cDNA_P Parameter: Tissue Value: Aerial
  misc_feature: MA Experiment ID: 20000113 Result: Up-regulated in Transcription
  misc_feature: MA Experiment 20000113 PARAMETER Experiment Name: At_42deg_Heat_cDNA_P Parameter: Temperature (deg C) Value: 42 vs. 22
  misc_feature: MA Experiment 20000113 PARAMETER Experiment Name: At_42deg_Heat_cDNA_P Parameter: Timepoint (hr) Value: 8
  misc_feature: MA Experiment 20000113 PARAMETER Experiment Name: At_42deg_Heat_cDNA_P Parameter: Tissue Value: Aerial
  misc_feature: MA Experiment ID: 20000180 Result: Down-regulated in Transcription
  misc_feature: MA Experiment 20000180 PARAMETER Experiment Name: At_Germinating_Seeds_P Parameter: Age (hr) Value: 24 vs. 0
  misc_feature: MA Experiment 20000180 PARAMETER Experiment Name: At_Germinating_Seeds_P Parameter: Tissue Value: Germinating Seeds
  misc_feature: MA Experiment ID: 20000437 Result: Down-regulated in Transcription
  misc_feature: MA Experiment 20000437 PARAMETER Experiment Name: At_Drought_P Parameter: Age (day) Value: 8
  misc_feature: MA Experiment 20000437 PARAMETER Experiment Name: At_Drought_P Parameter: Organism Value: A. thaliana
  misc_feature: MA Experiment 20000437 PARAMETER Experiment Name: At_Drought_P Parameter: Plant Line Value: WS
  misc_feature: MA Experiment 20000437 PARAMETER Experiment Name: At_Drought_P Parameter: Timepoint (hr) Value: 24
  misc_feature: MA Experiment 20000437 PARAMETER Experiment Name: At_Drought_P Parameter: Tissue Value: Whole Plant
  misc_feature: MA Experiment 20000437 PARAMETER Experiment Name: At_Drought_P Parameter: Treatment Value: Drought vs. No Drought
  misc_feature: MA Experiment ID: 20000794 Result: Down-regulated in Transcription
  misc_feature: MA Experiment 20000794 PARAMETER Experiment Name: At_Petals_P Parameter: Age (day) Value: 23-25 days
  misc_feature: MA Experiment 20000794 PARAMETER Experiment Name: At_Petals_P Parameter: Plant Line Value: WS
  misc_feature: MA Experiment 20000794 PARAMETER Experiment Name: At_Petals_P Parameter: Tissue Value: Petals vs. Whole plant
  misc_feature: MA Experiment ID: 20001458 Result: Up-regulated in Transcription
  misc_feature: MA Experiment 20001458 PARAMETER Experiment Name: At_50mM_NH4NO3_L-to-H_P Parameter: Age (day) Value: Undefined
  misc_feature: MA Experiment 20001458 PARAMETER Experiment Name: At_50mM_NH4NO3_L-to-H_P Parameter: Organism Value: Undefined
  misc_feature: MA Experiment 20001458 PARAMETER Experiment Name: At_50mM_NH4NO3_L-to-H_P Parameter: Plant Line Value: Undefined
  misc_feature: MA Experiment 20001458 PARAMETER Experiment Name: At_50mM_NH4NO3_L-to-H_P Parameter: Timepoint (hr) Value: 2
  misc_feature: MA Experiment 20001458 PARAMETER Experiment Name: At_50mM_NH4NO3_L-to-H_P Parameter: Tissue Value: Siliques
  misc_feature: MA Experiment 20001458 PARAMETER Experiment Name: At_50mM_NH4NO3_L-to-H_P Parameter: Treatment Value: 50mM NH4NO3 vs. 100mM Manitol
  misc_feature: MA Experiment ID: 20001557 Result: Up-regulated in Transcription
  misc_feature: MA Experiment 20001557 PARAMETER Experiment Name: At_Drought_Soil_Dry_P Parameter: Age (day) Value: 27
  misc_feature: MA Experiment 20001557 PARAMETER Experiment Name: At_Drought_Soil_Dry_P Parameter: Organism Value: A. thaliana
  misc_feature: MA Experiment 20001557 PARAMETER Experiment Name: At_Drought_Soil_Dry_P Parameter: Plant Line Value: WS
  misc_feature: MA Experiment 20001557 PARAMETER Experiment Name: At_Drought_Soil_Dry_P Parameter: Post Timepoint (hr) Value: 3
  misc_feature: MA Experiment 20001557 PARAMETER Experiment Name: At_Drought_Soil_Dry_P Parameter: Post-Treatment Value: Re-Water vs. No Drought
  misc_feature: MA Experiment 20001557 PARAMETER Experiment Name: At_Drought_Soil_Dry_P Parameter: Timepoint (day) Value: 13
  misc_feature: MA Experiment 20001557 PARAMETER Experiment Name: At_Drought_Soil_Dry_P Parameter: Treatment Value: Drought vs. No Drought
  misc_feature: MA Experiment ID: 20001558 Result: Up-regulated in Transcription
  misc_feature: MA Experiment 20001558 PARAMETER Experiment Name: At_Drought_Soil_Dry_P Parameter: Age (day) Value: 27
  misc_feature: MA Experiment 20001558 PARAMETER Experiment Name: At_Drought_Soil_Dry_P Parameter: Organism Value: A. thaliana
  misc_feature: MA Experiment 20001558 PARAMETER Experiment Name: At_Drought_Soil_Dry_P Parameter: Plant Line Value: WS
  misc_feature: MA Experiment 20001558 PARAMETER Experiment Name: At_Drought_Soil_Dry_P Parameter: Post Timepoint (hr) Value: 6
  misc_feature: MA Experiment 20001558 PARAMETER Experiment Name: At_Drought_Soil_Dry_P Parameter: Post-Treatment Value: Re-Water vs. No Drought
  misc_feature: MA Experiment 20001558 PARAMETER Experiment Name: At_Drought_Soil_Dry_P Parameter: Timepoint (day) Value: 13
  misc_feature: MA Experiment 20001558 PARAMETER Experiment Name: At_Drought_Soil_Dry_P Parameter: Treatment Value: Drought vs. No Drought
  misc_feature: MA Experiment ID: 20001560 Result: Up-regulated in Transcription
  misc_feature: MA Experiment 20001560 PARAMETER Experiment Name: At_Drought_Soil_Dry_P Parameter: Age (day) Value: 28
  misc_feature: MA Experiment 20001560 PARAMETER Experiment Name: At_Drought_Soil_Dry_P Parameter: Organism Value: A. thaliana
  misc_feature: MA Experiment 20001560 PARAMETER Experiment Name: At_Drought_Soil_Dry_P Parameter: Plant Line Value: WS
  misc_feature: MA Experiment 20001560 PARAMETER Experiment Name: At_Drought_Soil_Dry_P Parameter: Post Timepoint (hr) Value: None
  misc_feature: MA Experiment 20001560 PARAMETER Experiment Name: At_Drought_Soil_Dry_P Parameter: Post-Treatment Value: None
  misc_feature: MA Experiment 20001560 PARAMETER Experiment Name: At_Drought_Soil_Dry_P Parameter: Timepoint (day) Value: 14
  misc_feature: MA Experiment 20001560 PARAMETER Experiment Name: At_Drought_Soil_Dry_P Parameter: Treatment Value: Drought vs. No Drought
  misc_feature: MA Experiment ID: 20001757 Result: Up-regulated in Transcription
  misc_feature: MA Experiment 20001757 PARAMETER Experiment Name: At_50mM_NH4NO3_L-to-H_P Parameter: Timepoint (hr) Value: 6
  misc_feature: MA Experiment 20001757 PARAMETER Experiment Name: At_50mM_NH4NO3_L-to-H_P Parameter: Tissue Value: Leaf
  misc_feature: MA Experiment 20001757 PARAMETER Experiment Name: At_50mM_NH4NO3_L-to-H_P Parameter: Treatment Value: 50mM NH4NO3 vs 100mM Mannitol
  misc_feature: Phenotype: WHOLE PLANT Color-Dark Green
  misc_feature: Phenotype: WHOLE PLANT Dwarf-Misc. Dwarf
  misc_feature: Phenotype: FERTILITY Fertility-Reduced
  misc_feature: Phenotype: WHOLE PLANT Dwarf-Misc. Dwarf
  misc_feature: Phenotype: FERTILITY Fertility-Reduced
  misc_feature: Phenotype: WHOLE PLANT Color-Dark Green
  misc_feature: Phenotype: WHOLE PLANT Dwarf-Misc. Dwarf
  misc_feature: Phenotype: WHOLE PLANT Dwarf-Misc. Dwarf
  misc_feature: Phenotype: FERTILITY Fertility-Reduced
  misc_feature: Phenotype: WHOLE PLANT Dwarf-Misc. Dwarf
  misc_feature: Phenotype: FERTILITY Fertility-Reduced
  misc_feature: Phenotype: WHOLE PLANT Dwarf-Misc. Dwarf
  misc_feature: Phenotype: FERTILITY Fertility-Reduced
aaaaaaacacaatccctcttagaaacagagagcttctcttctttctccattattcatcactttcttccccgaagatgcgtcctttagacgagaccgagacaaccgtcgtcttcgagaagctcttcaaattcgtcggcaacaacctcaagaagatcgtcgagaacccatcagacgaaggacccgaatctacacccggcagctactgcttccgcctccagaaaaacagagtctactacgtcagcgaagccctcgtgaagcgagccacaaacatctccaggaaaaacctagtctccttcggaacctgcatcgggaaatacactcacgccggtagtttccatctgacgattatgtcactcaatatcttggcggcgaatgctaaacacaaggtatggcttaaacccacttcggagatgtcgtttctttatgggaaccatgtcttgaaaggtggattagggaggattactgatagtattgttcctggagatggtgttgttgtgttctcgatgtctgatgttccgttagggtttgggattgctgcgaagagtacacaggattgtaggaaattggatcctaatggtattgttgtgcttcatcaggctgatattggagagtatttgaggggtgaagatgacctttgaaagtttaaaggttttgtctttgttgtgtcttagtttgattctgcttgttgctttgagttttaaagtatgtagctgttacaagtttcgtggaacttggttctggatctatgaaagtctcgattttt

SEQ ID NO: 76937 - protein, 211 aa, Arabidopsis thaliana
  peptide (1)..(211): Ceres Seq. ID no. 12422874
  misc_feature (25)..(206): Pfam Name: Uncharacterised protein family (UPF0113) Pfam Description: Uncharacterised protein family (UPF0113)
  misc_feature (25)..(211): Homolog of NCBI NO: 22831121 NR Description: putative 60S ribosome subunit biogenesis protein
  misc_feature (25)..(211): Homolog of NCBI NO: 20301988 NR Description: Saccharomyces cerevisiae Nip7p homolog [Rattus
  misc_feature (25)..(211): Homolog of NCBI NO: 7705437 NR Description: hypothetical protein HSPC031 [Homo sapiens]
  misc_feature (25)..(211): Homolog of NCBI NO: 12852038 NR Description: unnamed protein product [Mus musculus]
  misc_feature (25)..(211): Homolog of NCBI NO: 13928674 NR Description: RIKEN cDNA 1110017C15 [Mus musculus]
  misc_feature (25)..(211): Homolog of NCBI NO: 34876605 NR Description: similar to Saccharomyces cerevisiae Nip7p homolog
  misc_feature (25)..(211): Homolog of NCBI NO: 6325045 NR Description: Nip7p is required for 60S ribosome subunit Nip7p [Saccharomyces cerevisiae]
  misc_feature (25)..(211): Homolog of NCBI NO: 17506003 NR Description: 60S ribosome biogenesis (20.1 kD) [Caenorhabditis
  misc_feature (25)..(211): Homolog of NCBI NO: 19075218 NR Description: putative protein involved in 60S ribosome subunit [Schizosaccharomyces pombe] >gi|7492919|pir||T41300 protein
  misc_feature (25)..(211): Homolog of NCBI NO: 39589582 NR Description: Hypothetical protein CBG12182 [Caenorhabditis
KNTIPLRNRELLFFLHYSSLSSPKMRPLDETETTVVFEKLFKFVGNNLKKIVENPSDEGPESTPGSYCFRLQKNRVYYVSEALVKRATNISRKNLVSFGTCIGKYTHAGSFHLTIMSLNILAANAKHKVWLKPTSEMSFLYGNHVLKGGLGRITDSIVPGDGVVVFSMSDVPLGFGIAAKSTQDCRKLDPNGIVVLHQADIGEYLRGEDDL

SEQ ID NO: 76938 - protein, 187 aa, Arabidopsis thaliana
  peptide (1)..(187): Ceres Seq. ID no. 12422875
  misc_feature (1)..(182): Pfam Name: Uncharacterised protein family (UPF0113) Pfam Description: Uncharacterised protein family (UPF0113)
  misc_feature (1)..(187): Homolog of NCBI NO: 22831121 NR Description: putative 60S ribosome subunit biogenesis protein
  misc_feature (1)..(187): Homolog of NCBI NO: 20301988 NR Description: Saccharomyces cerevisiae Nip7p homolog [Rattus
  misc_feature (1)..(187): Homolog of NCBI NO: 7705437 NR Description: hypothetical protein HSPC031 [Homo sapiens]
  misc_feature (1)..(187): Homolog of NCBI NO: 12852038 NR Description: unnamed protein product [Mus musculus]
  misc_feature (1)..(187): Homolog of NCBI NO: 13928674 NR Description: RIKEN cDNA 1110017C15 [Mus musculus]
  misc_feature (1)..(187): Homolog of NCBI NO: 34876605 NR Description: similar to Saccharomyces cerevisiae Nip7p homolog
  misc_feature (1)..(187): Homolog of NCBI NO: 6325045 NR Description: Nip7p is required for 60S ribosome subunit Nip7p [Saccharomyces cerevisiae]
  misc_feature (1)..(187): Homolog of NCBI NO: 17506003 NR Description: 60S ribosome biogenesis (20.1 kD) [Caenorhabditis
  misc_feature (1)..(187): Homolog of NCBI NO: 19075218 NR Description: putative protein involved in 60S ribosome subunit [Schizosaccharomyces pombe] >gi|7492919|pir||T41300 protein
  misc_feature (1)..(187): Homolog of NCBI NO: 39589582 NR Description: Hypothetical protein CBG12182 [Caenorhabditis
MRPLDETETTVVFEKLFKFVGNNLKKIVENPSDEGPESTPGSYCFRLQKNRVYYVSEALVKRATNISRKNLVSFGTCIGKYTHAGSFHLTIMSLNILAANAKHKVWLKPTSEMSFLYGNHVLKGGLGRITDSIVPGDGVVVFSMSDVPLGFGIAAKSTQDCRKLDPNGIVVLHQADIGEYLRGEDDL

SEQ ID NO: 76939 - DNA, 677 bp, Arabidopsis thaliana
  misc_feature (1)..(677): Ceres Seq. ID no. 12466044
  misc_feature: MA Experiment ID: 108434 Result: Down-regulated in Transcription
  misc_feature: MA Experiment 108434 PARAMETER Experiment Name: At_Root_Tips_cDNA_P Parameter: Tissue Value: Root Tips
  misc_feature: MA Experiment ID: 108435 Result: Down-regulated in Transcription
  misc_feature: MA Experiment 108435 PARAMETER Experiment Name: At_stm_Mutants_cDNA_P Parameter: Plant Line Value: wt Landsburg vs stm
  misc_feature: MA Experiment 108435 PARAMETER Experiment Name: At_stm_Mutants_cDNA_P Parameter: Tissue Value: Shoot Apical Meristem Region
  misc_feature: MA Experiment ID: 108461 Result: Up-regulated in Transcription
  misc_feature: MA Experiment 108461 PARAMETER Experiment Name: At_Germinating_Seeds_cDNA_P Parameter: Age (day) Value: 1 vs. 0
  misc_feature: MA Experiment 108461 PARAMETER Experiment Name: At_Germinating_Seeds_cDNA_P Parameter: Tissue Value: Germinating Seeds
  misc_feature: MA Experiment ID: 108462 Result: Up-regulated in Transcription
  misc_feature: MA Experiment 108462 PARAMETER Experiment Name: At_Germinating_Seeds_cDNA_P Parameter: Age (day) Value: 2 vs. 0
  misc_feature: MA Experiment 108462 PARAMETER Experiment Name: At_Germinating_Seeds_cDNA_P Parameter: Tissue Value: Germinating Seeds
  misc_feature: MA Experiment ID: 108464 Result: Up-regulated in Transcription
  misc_feature: MA Experiment 108464 PARAMETER Experiment Name: At_Germinating_Seeds_cDNA_P Parameter: Age (day) Value: 4 vs. 0
  misc_feature: MA Experiment 108464 PARAMETER Experiment Name: At_Germinating_Seeds_cDNA_P Parameter: Tissue Value: Germinating Seeds
  misc_feature: MA Experiment ID: 108488 Result: Up-regulated in Transcription
  misc_feature: MA Experiment ID: 20000180 Result: Up-regulated in Transcription
  misc_feature: MA Experiment 20000180 PARAMETER Experiment Name: At_Germinating_Seeds_P Parameter: Age (hr) Value: 24 vs. 0
  misc_feature: MA Experiment 20000180 PARAMETER Experiment Name: At_Germinating_Seeds_P Parameter: Tissue Value: Germinating Seeds
  misc_feature: MA Experiment ID: 20000185 Result: Down-regulated in Transcription
  misc_feature: MA Experiment 20000185 PARAMETER Experiment Name: At_Roots__P Parameter: Age (day) Value: 7 vs. 21
  misc_feature: MA Experiment 20000185 PARAMETER Experiment Name: At_Roots__P Parameter: Organism Value: A. thaliana
  misc_feature: MA Experiment 20000185 PARAMETER Experiment Name: At_Roots__P Parameter: Tissue Value: Roots vs. Whole Plant
  misc_feature: MA Experiment ID: 20000264 Result: Down-regulated in Transcription
  misc_feature: MA Experiment 20000264 PARAMETER Experiment Name: At_Open_Flower_P Parameter: Age (day) Value: 21
  misc_feature: MA Experiment 20000264 PARAMETER Experiment Name: At_Open_Flower_P Parameter: Plant Line Value: WS
  misc_feature: MA Experiment 20000264 PARAMETER Experiment Name: At_Open_Flower_P Parameter: Tissue Value: Open Flower vs. Whole Plant
  misc_feature: MA Experiment ID: 20000265 Result: Down-regulated in Transcription
  misc_feature: MA Experiment 20000265 PARAMETER Experiment Name: At_Open_Flower_P Parameter: Age (day) Value: 21
  misc_feature: MA Experiment 20000265 PARAMETER Experiment Name: At_Open_Flower_P Parameter: Plant Line Value: WS
  misc_feature: MA Experiment 20000265 PARAMETER Experiment Name: At_Open_Flower_P Parameter: Tissue Value: Closed Flower vs. Whole Plant
  misc_feature: MA Experiment ID: 20000286 Result: Down-regulated in Transcription
  misc_feature: MA Experiment 20000286 PARAMETER Experiment Name: At_Open_Flower_P Parameter: Age (day) Value: 21
  misc_feature: MA Experiment 20000286 PARAMETER Experiment Name: At_Open_Flower_P Parameter: Plant Line Value: WS
  misc_feature: MA Experiment 20000286 PARAMETER Experiment Name: At_Open_Flower_P Parameter: Tissue Value: Half Open vs. Whole Plant
  misc_feature: MA Experiment ID: 20000437 Result: Down-regulated in Transcription
  misc_feature: MA Experiment 20000437 PARAMETER Experiment Name: At_Drought_P Parameter: Age (day) Value: 8
  misc_feature: MA Experiment 20000437 PARAMETER Experiment Name: At_Drought_P Parameter: Organism Value: A. thaliana
  misc_feature: MA Experiment 20000437 PARAMETER Experiment Name: At_Drought_P Parameter: Plant Line Value: WS
  misc_feature: MA Experiment 20000437 PARAMETER Experiment Name: At_Drought_P Parameter: Timepoint (hr) Value: 24
  misc_feature: MA Experiment 20000437 PARAMETER Experiment Name: At_Drought_P Parameter: Tissue Value: Whole Plant
  misc_feature: MA Experiment 20000437 PARAMETER Experiment Name: At_Drought_P Parameter: Treatment Value: Drought vs. No Drought
  misc_feature: MA Experiment ID: 20000438 Result: Up-regulated in Transcription
  misc_feature: MA Experiment 20000438 PARAMETER Experiment Name: At_Shoots__P Parameter: Age (day) Value: 14
  misc_feature: MA Experiment 20000438 PARAMETER Experiment Name: At_Shoots__P Parameter: Tissue Value: Shoots vs. Whole Plant
  misc_feature: MA Experiment ID: 20000439 Result: Down-regulated in Transcription
  misc_feature: MA Experiment 20000439 PARAMETER Experiment Name: At_Roots__P Parameter: Age (day) Value: 14 vs. 21
  misc_feature: MA Experiment 20000439 PARAMETER Experiment Name: At_Roots__P Parameter: Organism Value: A. thaliana
  misc_feature: MA Experiment 20000439 PARAMETER Experiment Name: At_Roots__P Parameter: Tissue Value: Roots vs. Whole Plant
  misc_feature: MA Experiment ID: 20000794 Result: Down-regulated in Transcription
  misc_feature: MA Experiment 20000794 PARAMETER Experiment Name: At_Petals_P Parameter: Age (day) Value: 23-25 days
  misc_feature: MA Experiment 20000794 PARAMETER Experiment Name: At_Petals_P Parameter: Plant Line Value: WS
  misc_feature: MA Experiment 20000794 PARAMETER Experiment Name: At_Petals_P Parameter: Tissue Value: Petals vs. Whole plant
  misc_feature: MA Experiment ID: 20001557 Result: Down-regulated in Transcription
  misc_feature: MA Experiment 20001557 PARAMETER Experiment Name: At_Drought_Soil_Dry_P Parameter: Age (day) Value: 27
  misc_feature: MA Experiment 20001557 PARAMETER Experiment Name: At_Drought_Soil_Dry_P Parameter: Organism Value: A. thaliana
  misc_feature: MA Experiment 20001557 PARAMETER Experiment Name: At_Drought_Soil_Dry_P Parameter: Plant Line Value: WS
  misc_feature: MA Experiment 20001557 PARAMETER Experiment Name: At_Drought_Soil_Dry_P Parameter: Post Timepoint (hr) Value: 3
  misc_feature: MA Experiment 20001557 PARAMETER Experiment Name: At_Drought_Soil_Dry_P Parameter: Post-Treatment Value: Re-Water vs. No Drought
  misc_feature: MA Experiment 20001557 PARAMETER Experiment Name: At_Drought_Soil_Dry_P Parameter: Timepoint (day) Value: 13
  misc_feature: MA Experiment 20001557 PARAMETER Experiment Name: At_Drought_Soil_Dry_P Parameter: Treatment Value: Drought vs. No Drought
  misc_feature: MA Experiment ID: 20001558 Result: Down-regulated in Transcription
  misc_feature: MA Experiment 20001558 PARAMETER Experiment Name: At_Drought_Soil_Dry_P Parameter: Age (day) Value: 27
  misc_feature: MA Experiment 20001558 PARAMETER Experiment Name: At_Drought_Soil_Dry_P Parameter: Organism Value: A. thaliana
  misc_feature: MA Experiment 20001558 PARAMETER Experiment Name: At_Drought_Soil_Dry_P Parameter: Plant Line Value: WS
  misc_feature: MA Experiment 20001558 PARAMETER Experiment Name: At_Drought_Soil_Dry_P Parameter: Post Timepoint (hr) Value: 6
  misc_feature: MA Experiment 20001558 PARAMETER Experiment Name: At_Drought_Soil_Dry_P Parameter: Post-Treatment Value: Re-Water vs. No Drought
  misc_feature: MA Experiment 20001558 PARAMETER Experiment Name: At_Drought_Soil_Dry_P Parameter: Timepoint (day) Value: 13
  misc_feature: MA Experiment 20001558 PARAMETER Experiment Name: At_Drought_Soil_Dry_P Parameter: Treatment Value: Drought vs. No Drought
  misc_feature: MA Experiment ID: 20001757 Result: Up-regulated in Transcription
  misc_feature: MA Experiment 20001757 PARAMETER Experiment Name: At_50mM_NH4NO3_L-to-H_P Parameter: Timepoint (hr) Value: 6
  misc_feature: MA Experiment 20001757 PARAMETER Experiment Name: At_50mM_NH4NO3_L-to-H_P Parameter: Tissue Value: Leaf
  misc_feature: MA Experiment 20001757 PARAMETER Experiment Name: At_50mM_NH4NO3_L-to-H_P Parameter: Treatment Value: 50mM NH4NO3 vs 100mM Mannitol
  misc_feature: MA Experiment ID: 20001904 Result: Down-regulated in Transcription
  misc_feature: MA Experiment 20001904 PARAMETER Experiment Name: At_Drought_Reproduction_P Parameter: Age (day) Value: 37
  misc_feature: MA Experiment 20001904 PARAMETER Experiment Name: At_Drought_Reproduction_P Parameter: Organism Value: A. thaliana
  misc_feature: MA Experiment 20001904 PARAMETER Experiment Name: At_Drought_Reproduction_P Parameter: Plant Line Value: WS
  misc_feature: MA Experiment 20001904 PARAMETER Experiment Name: At_Drought_Reproduction_P Parameter: Timepoint (day) Value: 7
  misc_feature: MA Experiment 20001904 PARAMETER Experiment Name: At_Drought_Reproduction_P Parameter: Tissue Value: Rosettes
  misc_feature: MA Experiment 20001904 PARAMETER Experiment Name: At_Drought_Reproduction_P Parameter: Treatment Value: Drought vs. No Drought
  misc_feature: MA Experiment ID: 20001905 Result: Down-regulated in Transcription
  misc_feature: MA Experiment 20001905 PARAMETER Experiment Name: At_Drought_Reproduction_P Parameter: Age (day) Value: 40
  misc_feature: MA Experiment 20001905 PARAMETER Experiment Name: At_Drought_Reproduction_P Parameter: Organism Value: A. thaliana
  misc_feature: MA Experiment 20001905 PARAMETER Experiment Name: At_Drought_Reproduction_P Parameter: Plant Line Value: WS
  misc_feature: MA Experiment 20001905 PARAMETER Experiment Name: At_Drought_Reproduction_P Parameter: Timepoint (day) Value: 10
  misc_feature: MA Experiment 20001905 PARAMETER Experiment Name: At_Drought_Reproduction_P Parameter: Tissue Value: Rosettes
  misc_feature: MA Experiment 20001905 PARAMETER Experiment Name: At_Drought_Reproduction_P Parameter: Treatment Value: Drought vs. No Drought
  misc_feature: MA Experiment ID: 20001908 Result: Down-regulated in Transcription
  misc_feature: MA Experiment 20001908 PARAMETER Experiment Name: At_Drought_Reproduction_P Parameter: Age (day) Value: 40
  misc_feature: MA Experiment 20001908 PARAMETER Experiment Name: At_Drought_Reproduction_P Parameter: Organism Value: A. thaliana
  misc_feature: MA Experiment 20001908 PARAMETER Experiment Name: At_Drought_Reproduction_P Parameter: Plant Line Value: WS
  misc_feature: MA Experiment 20001908 PARAMETER Experiment Name: At_Drought_Reproduction_P Parameter: Timepoint (day) Value: 10
  misc_feature: MA Experiment 20001908 PARAMETER Experiment Name: At_Drought_Reproduction_P Parameter: Tissue Value: Siliques
  misc_feature: MA Experiment 20001908 PARAMETER Experiment Name: At_Drought_Reproduction_P Parameter: Treatment Value: Drought vs. No Drought
aaaacaatcaagaaccactctttcgtgtcgcaataacaataagaaagaaagaaaaagaaaaccagagatggcgatgacgacagcatctacggtatttgttctaccggccaatgtcacctcggtcgccggcgcttcgtcgtccaggagctccgtgtctttcttgccgatgagaaacgccggttctaggctcgtagtcagggcagccgaagatcctgctccggcttcctcttcttcaaaagattctccggcagctgccgctgctccggatggagctactgccaccaaacccaagccaccaccgattggtcctaagagagggtctaaggtcaagattctaaggagagaatcctattggttcaagaacgttggatcagttgttgccgttgatcaggaccctaagactcgatacccggttgtggtccggttcgcaaaagtcaattacgccaacatatcgaccaacaactatgcattggatgaggtcgaagaagttgcagcttaaatgggagaattcaaaaactctgtgtattctataccggtttatccgtttgtaacttgacccaaaccgtatgtaccgcaaaagtttaccaattatttctcctcatctgaatctcgagccggttttcttattctttcacagaatgtgtttggaaaattcagttaaaagtctctttctactc

SEQ ID NO: 76940 - protein, 165 aa, Arabidopsis thaliana; identical to SEQ ID NO: 43772
  peptide (1)..(165): Ceres Seq. ID no. 12466045
  misc_feature (103)..(164): Pfam Name: Photosystem I reaction centre subunit IV / PsaE Pfam Description: Photosystem I reaction centre subunit IV / PsaE
  misc_feature (23)..(165): Homolog of NCBI NO: 30688100 NR Description: photosystem I subunit PSI-E - like protein thaliana] >gi|18203441|sp|Q9S831|PSE1_ARATH Photosystem I
  misc_feature (25)..(165): Homolog of NCBI NO: 24030202 NR Description: putative photosystem I subunit PSI-E protein
  misc_feature (51)..(165): Homolog of NCBI NO: 22091414 NR Description: putative photosystem I subunit PSI-E [Arabidopsis
  misc_feature (56)..(165): Homolog of NCBI NO: 11692884 NR Description: AT4g28750 [Arabidopsis thaliana]
  misc_feature (23)..(163): Homolog of NCBI NO: 15225331 NR Description: putative photosystem I reaction center subunit protein id: At2g20260.1, supported by cDNA: 27629., supported by gi_14596070 [Arabidopsis thaliana]
  misc_feature (25)..(163): Homolog of NCBI NO: 21555308 NR Description: Photosystem I reaction center subunit IV B,
  misc_feature (25)..(165): Homolog of NCBI NO: 131176 NR Description: Photosystem I reaction center subunit IV,
  misc_feature (26)..(163): Homolog of NCBI NO: 2499966 NR Description: Photosystem I reaction center subunit IV A,
  misc_feature (25)..(163): Homolog of NCBI NO: 26986114 NR Description: putative photosystem I reaction centre subunit IV
  misc_feature (38)..(164): Homolog of NCBI NO: 131178 NR Description: Photosystem I reaction center subunit IV,

SEQ ID NO: 76941 - protein, 143 aa, Arabidopsis thaliana; identical to SEQ ID NO: 43773
  peptide (1)..(143): Ceres Seq. ID no. 12466046
  misc_feature (81)..(142): Pfam Name: Photosystem I reaction centre subunit IV / PsaE Pfam Description: Photosystem I reaction centre subunit IV / PsaE
  misc_feature (1)..(143): Homolog of NCBI NO: 30688100 NR Description: photosystem I subunit PSI-E - like protein thaliana] >gi|18203441|sp|Q9S831|PSE1_ARATH Photosystem I
  misc_feature (3)..(143): Homolog of NCBI NO: 24030202 NR Description: putative photosystem I subunit PSI-E protein
  misc_feature (29)..(143): Homolog of NCBI NO: 22091414 NR Description: putative photosystem I subunit PSI-E [Arabidopsis
  misc_feature (34)..(143): Homolog of NCBI NO: 11692884 NR Description: AT4g28750 [Arabidopsis thaliana]
  misc_feature (1)..(141): Homolog of NCBI NO: 15225331 NR Description: putative photosystem I reaction center subunit protein id: At2g20260.1, supported by cDNA: 27629., supported by gi_14596070 [Arabidopsis thaliana]
  misc_feature (3)..(141): Homolog of NCBI NO: 21555308 NR Description: Photosystem I reaction center subunit IV B,
  misc_feature (3)..(143): Homolog of NCBI NO: 131176 NR Description: Photosystem I reaction center subunit IV,
  misc_feature (4)..(141): Homolog of NCBI NO: 2499966 NR Description: Photosystem I reaction center subunit IV A,
  misc_feature (3)..(141): Homolog of NCBI NO: 26986114 NR Description: putative photosystem I reaction centre subunit IV
  misc_feature (16)..(142): Homolog of NCBI NO: 131178 NR Description: Photosystem I reaction center subunit IV,

SEQ ID NO: 76942 - protein, 141 aa, Arabidopsis thaliana; identical to SEQ ID NO: 43774
  peptide (1)..(141): Ceres Seq. ID no. 12466047
  misc_feature (79)..(140): Pfam Name: Photosystem I reaction centre subunit IV / PsaE Pfam Description: Photosystem I reaction centre subunit IV / PsaE
  misc_feature (1)..(141): Homolog of NCBI NO: 30688100 NR Description: photosystem I subunit PSI-E - like protein thaliana] >gi|18203441|sp|Q9S831|PSE1_ARATH Photosystem I
  misc_feature (1)..(141): Homolog of NCBI NO: 24030202 NR Description: putative photosystem I subunit PSI-E protein
  misc_feature (27)..(141): Homolog of NCBI NO: 22091414 NR Description: putative photosystem I subunit PSI-E [Arabidopsis
  misc_feature (32)..(141): Homolog of NCBI NO: 11692884 NR Description: AT4g28750 [Arabidopsis thaliana]
  misc_feature (1)..(139): Homolog of NCBI NO: 15225331 NR Description: putative photosystem I reaction center subunit protein id: At2g20260.1, supported by cDNA: 27629., supported by gi_14596070 [Arabidopsis thaliana]
  misc_feature (1)..(139): Homolog of NCBI NO: 21555308 NR Description: Photosystem I reaction center subunit IV B,
  misc_feature (1)..(141): Homolog of NCBI NO: 131176 NR Description: Photosystem I reaction center subunit IV,
  misc_feature (2)..(139): Homolog of NCBI NO: 2499966 NR Description: Photosystem I reaction center subunit IV A,
  misc_feature (1)..(139): Homolog of NCBI NO: 26986114 NR Description: putative photosystem I reaction centre subunit IV
  misc_feature (14)..(140): Homolog of NCBI NO: 131178 NR Description: Photosystem I reaction center subunit IV,

SEQ ID NO: 76943 - DNA, 605 bp, Arabidopsis thaliana
  misc_feature (1)..(605): Ceres Seq. ID no. 12481828
  misc_feature: MA Experiment ID: 20000185 Result: Down-regulated in Transcription
  misc_feature: MA Experiment 20000185 PARAMETER Experiment Name: At_Roots__P Parameter: Age (day) Value: 7 vs. 21
  misc_feature: MA Experiment 20000185 PARAMETER Experiment Name: At_Roots__P Parameter: Organism Value: A. thaliana
  misc_feature: MA Experiment 20000185 PARAMETER Experiment Name: At_Roots__P Parameter: Tissue Value: Roots vs. Whole Plant
  misc_feature: MA Experiment ID: 20000436 Result: Down-regulated in Transcription
  misc_feature: MA Experiment 20000436 PARAMETER Experiment Name: At_Drought_P Parameter: Age (day) Value: 7
  misc_feature: MA Experiment 20000436 PARAMETER Experiment Name: At_Drought_P Parameter: Organism Value: A. thaliana
  misc_feature: MA Experiment 20000436 PARAMETER Experiment Name: At_Drought_P Parameter: Plant Line Value: WS
  misc_feature: MA Experiment 20000436 PARAMETER Experiment Name: At_Drought_P Parameter: Timepoint (hr) Value: 12
  misc_feature: MA Experiment 20000436 PARAMETER Experiment Name: At_Drought_P Parameter: Tissue Value: Whole Plant
  misc_feature: MA Experiment 20000436 PARAMETER Experiment Name: At_Drought_P Parameter: Treatment Value: Drought vs. No Drought
  misc_feature: MA Experiment ID: 20000437 Result: Down-regulated in Transcription
  misc_feature: MA Experiment 20000437 PARAMETER Experiment Name: At_Drought_P Parameter: Age (day) Value: 8
  misc_feature: MA Experiment 20000437 PARAMETER Experiment Name: At_Drought_P Parameter: Organism Value: A. thaliana
  misc_feature: MA Experiment 20000437 PARAMETER Experiment Name: At_Drought_P Parameter: Plant Line Value: WS
  misc_feature: MA Experiment 20000437 PARAMETER Experiment Name: At_Drought_P Parameter: Timepoint (hr) Value: 24
  misc_feature: MA Experiment 20000437 PARAMETER Experiment Name: At_Drought_P Parameter: Tissue Value: Whole Plant
  misc_feature: MA Experiment 20000437 PARAMETER Experiment Name: At_Drought_P Parameter: Treatment Value: Drought vs. No Drought
  misc_feature: MA Experiment ID: 20000439 Result: Down-regulated in Transcription
  misc_feature: MA Experiment 20000439 PARAMETER Experiment Name: At_Roots__P Parameter: Age (day) Value: 14 vs. 21
  misc_feature: MA Experiment 20000439 PARAMETER Experiment Name: At_Roots__P Parameter: Organism Value: A. thaliana
  misc_feature: MA Experiment 20000439 PARAMETER Experiment Name: At_Roots__P Parameter: Tissue Value: Roots vs. Whole Plant
  misc_feature: MA Experiment ID: 20001757 Result: Up-regulated in Transcription
  misc_feature: MA Experiment 20001757 PARAMETER Experiment Name: At_50mM_NH4NO3_L-to-H_P Parameter: Timepoint (hr) Value: 6
  misc_feature: MA Experiment 20001757 PARAMETER Experiment Name: At_50mM_NH4NO3_L-to-H_P Parameter: Tissue Value: Leaf
  misc_feature: MA Experiment 20001757 PARAMETER Experiment Name: At_50mM_NH4NO3_L-to-H_P Parameter: Treatment Value: 50mM NH4NO3 vs 100mM Mannitol
  misc_feature: MA Experiment ID: 20001905 Result: Down-regulated in Transcription
  misc_feature: MA Experiment 20001905 PARAMETER Experiment Name: At_Drought_Reproduction_P Parameter: Age (day) Value: 40
  misc_feature: MA Experiment 20001905 PARAMETER Experiment Name: At_Drought_Reproduction_P Parameter: Organism Value: A. thaliana
  misc_feature: MA Experiment 20001905 PARAMETER Experiment Name: At_Drought_Reproduction_P Parameter: Plant Line Value: WS
  misc_feature: MA Experiment 20001905 PARAMETER Experiment Name: At_Drought_Reproduction_P Parameter: Timepoint (day) Value: 10
  misc_feature: MA Experiment 20001905 PARAMETER Experiment Name: At_Drought_Reproduction_P Parameter: Tissue Value: Rosettes
  misc_feature: MA Experiment 20001905 PARAMETER Experiment Name: At_Drought_Reproduction_P Parameter: Treatment Value: Drought vs. No Drought
  misc_feature: MA Experiment ID: 20001906 Result: Down-regulated in Transcription
  misc_feature: MA Experiment 20001906 PARAMETER Experiment Name: At_Drought_Reproduction_P Parameter: Age (day) Value: 35
  misc_feature: MA Experiment 20001906 PARAMETER Experiment Name: At_Drought_Reproduction_P Parameter: Organism Value: A. thaliana
  misc_feature: MA Experiment 20001906 PARAMETER Experiment Name: At_Drought_Reproduction_P Parameter: Plant Line Value: WS
  misc_feature: MA Experiment 20001906 PARAMETER Experiment Name: At_Drought_Reproduction_P Parameter: Timepoint (day) Value: 5
  misc_feature: MA Experiment 20001906 PARAMETER Experiment Name: At_Drought_Reproduction_P Parameter: Tissue Value: Siliques
  misc_feature: MA Experiment 20001906 PARAMETER Experiment Name: At_Drought_Reproduction_P Parameter: Treatment Value: Drought vs. No Drought
  misc_feature: MA Experiment ID: 20001911 Result: Down-regulated in Transcription
  misc_feature: MA Experiment 20001911 PARAMETER Experiment Name: At_Drought_Reproduction_P Parameter: Age (day) Value: 40
  misc_feature: MA Experiment 20001911 PARAMETER Experiment Name: At_Drought_Reproduction_P Parameter: Organism Value: A. thaliana
  misc_feature: MA Experiment 20001911 PARAMETER Experiment Name: At_Drought_Reproduction_P Parameter: Plant Line Value: WS
  misc_feature: MA Experiment 20001911 PARAMETER Experiment Name: At_Drought_Reproduction_P Parameter: Timepoint (day) Value: 10
  misc_feature: MA Experiment 20001911 PARAMETER Experiment Name: At_Drought_Reproduction_P Parameter: Tissue Value: Flowers
  misc_feature: MA Experiment 20001911 PARAMETER Experiment Name: At_Drought_Reproduction_P Parameter: Treatment Value: Drought vs. No Drought
gctcttcttgtcaaaggttgaggagaaattcccaaaagactcagagctgattgttgcttgccaaaaaggattgagatccttagctgcttgcgagctactatataatgcagggtatgagaatctgttctgggtacaaggtggtttagaatctgctcaagacgaggatctagtgacagaaggtgtccaacccttgaagcttgctggtattggaggtttttcagagttcctcggttggacagaccagcaaagagctcaagctgcgaaagaaggttgggggtaccgtttggtatatactgctcgtctgtttggagttgttctggctgctgatgctttgttcgttggggctcagcaactaggccattatgttcaggagttaagaggccattaggatctctctttaaccacgctccaagtggctatatttctcttcaacaaaaaaaaaaatgtaaattctgttgaaaagttttggaaggtagagtagttgaaatagatcaaaaatacatctttgaatcctgaaattccaatggcaaacttaccctttgctttataccaagatccgtattatccaaagaataatttgcttatataaaaaagaaaattcgttg

SEQ ID NO: 76944 - protein, 128 aa, Arabidopsis thaliana
  peptide (1)..(128): Ceres Seq. ID no. 12481829
  misc_feature (38)..(128): Homolog of NCBI NO: 15233950 NR Description: putative protein; protein id: At4g24750.1
  misc_feature (2)..(76): Homolog of NCBI NO: 18491227 NR Description: putative rhodanese family protein [Arabidopsis
  misc_feature (2)..(76): Homolog of NCBI NO: 18398296 NR Description: rhodanese-like domain protein; protein id: supported by cDNA: 30880. [Arabidopsis thaliana] unknown protein [Arabidopsis thaliana]
  misc_feature (2)..(76): Homolog of NCBI NO: 21592651 NR Description: rhodanese-like family protein [Arabidopsis
  misc_feature (2)..(77): Homolog of NCBI NO: 15010630 NR Description: At2g42220/T24P15.13 [Arabidopsis thaliana]
  misc_feature (2)..(77): Homolog of NCBI NO: 18405912 NR Description: rhodanese-like domain protein; protein id: supported by cDNA: 1382. [Arabidopsis thaliana]
LFLSKVEEKFPKDSELIVACQKGLRSLAACELLYNAGYENLFWVQGGLESAQDEDLVTEGVQPLKLAGIGGFSEFLGWTDQQRAQAAKEGWGYRLVYTARLFGVVLAADALFVGAQQLGHYVQELRGH

SEQ ID NO: 76945 - DNA, 937 bp, Arabidopsis thaliana
  misc_feature (1)..(937): Ceres Seq. ID no. 12481904
  misc_feature: MA Experiment ID: 20000173 Result: Up-regulated in Transcription
  misc_feature: MA Experiment 20000173 PARAMETER Experiment Name: At_42deg_Heat_P Parameter: Age (day) Value: 14
  misc_feature: MA Experiment 20000173 PARAMETER Experiment Name: At_42deg_Heat_P Parameter: Organism Value: A. thaliana
  misc_feature: MA Experiment 20000173 PARAMETER Experiment Name: At_42deg_Heat_P Parameter: Plant Line Value: WS
  misc_feature: MA Experiment 20000173 PARAMETER Experiment Name: At_42deg_Heat_P Parameter: Temperature (deg C) Value: 42 vs. 22
  misc_feature: MA Experiment 20000173 PARAMETER Experiment Name: At_42deg_Heat_P Parameter: Timepoint (hr) Value: 6
  misc_feature: MA Experiment 20000173 PARAMETER Experiment Name: At_42deg_Heat_P Parameter: Tissue Value: Aerial
  misc_feature: MA Experiment ID: 20000185 Result: Up-regulated in Transcription
  misc_feature: MA Experiment 20000185 PARAMETER Experiment Name: At_Roots__P Parameter: Age (day) Value: 7 vs. 21
  misc_feature: MA Experiment 20000185 PARAMETER Experiment Name: At_Roots__P Parameter: Organism Value: A. thaliana
  misc_feature: MA Experiment 20000185 PARAMETER Experiment Name: At_Roots__P Parameter: Tissue Value: Roots vs. Whole Plant
  misc_feature: MA Experiment ID: 20000264 Result: Up-regulated in Transcription
  misc_feature: MA Experiment 20000264 PARAMETER Experiment Name: At_Open_Flower_P Parameter: Age (day) Value: 21
  misc_feature: MA Experiment 20000264 PARAMETER Experiment Name: At_Open_Flower_P Parameter: Plant Line Value: WS
  misc_feature: MA Experiment 20000264 PARAMETER Experiment Name: At_Open_Flower_P Parameter: Tissue Value: Open Flower vs. Whole Plant
  misc_feature: MA Experiment ID: 20000439 Result: Up-regulated in Transcription
  misc_feature: MA Experiment 20000439 PARAMETER Experiment Name: At_Roots__P Parameter: Age (day) Value: 14 vs. 21
  misc_feature: MA Experiment 20000439 PARAMETER Experiment Name: At_Roots__P Parameter: Organism Value: A. thaliana
  misc_feature: MA Experiment 20000439 PARAMETER Experiment Name: At_Roots__P Parameter: Tissue Value: Roots vs. Whole Plant
  misc_feature: MA Experiment ID: 20000527 Result: Down-regulated in Transcription
  misc_feature: MA Experiment 20000527 PARAMETER Experiment Name: At_10percent_PEG_P Parameter: Age (day) Value: 20
  misc_feature: MA Experiment 20000527 PARAMETER Experiment Name: At_10percent_PEG_P Parameter: Organism Value: A. thaliana
  misc_feature: MA Experiment 20000527 PARAMETER Experiment Name: At_10percent_PEG_P Parameter: Plant Line Value: WS
  misc_feature: MA Experiment 20000527 PARAMETER Experiment Name: At_10percent_PEG_P Parameter: Timepoint (day) Value: 20
  misc_feature: MA Experiment 20000527 PARAMETER Experiment Name: At_10percent_PEG_P Parameter: Tissue Value: Whole Plant
  misc_feature: MA Experiment 20000527 PARAMETER Experiment Name: At_10percent_PEG_P Parameter: Treatment Value: 10percent PEG vs. No Treatment
  misc_feature: MA Experiment ID: 20000794 Result: Up-regulated in Transcription
  misc_feature: MA Experiment 20000794 PARAMETER Experiment Name: At_Petals_P Parameter: Age (day) Value: 23-25 days
  misc_feature: MA Experiment 20000794 PARAMETER Experiment Name: At_Petals_P Parameter: Plant Line Value: WS
  misc_feature: MA Experiment 20000794 PARAMETER Experiment Name: At_Petals_P Parameter: Tissue Value: Petals vs. Whole plant
  misc_feature: MA Experiment ID: 20001554 Result: Up-regulated in Transcription
  misc_feature: MA Experiment 20001554 PARAMETER Experiment Name: At_Drought_Soil_Dry_P Parameter: Age (day) Value: 21
  misc_feature: MA Experiment 20001554 PARAMETER Experiment Name: At_Drought_Soil_Dry_P Parameter: Organism Value: A. thaliana
  misc_feature: MA Experiment 20001554 PARAMETER Experiment Name: At_Drought_Soil_Dry_P Parameter: Plant Line Value: WS
  misc_feature: MA Experiment 20001554 PARAMETER Experiment Name: At_Drought_Soil_Dry_P Parameter: Post Timepoint (hr) Value: None
  misc_feature: MA Experiment 20001554 PARAMETER Experiment Name: At_Drought_Soil_Dry_P Parameter: Post-Treatment Value: None
  misc_feature: MA Experiment 20001554 PARAMETER Experiment Name: At_Drought_Soil_Dry_P Parameter: Timepoint (day) Value: 7
  misc_feature: MA Experiment 20001554 PARAMETER Experiment Name: At_Drought_Soil_Dry_P Parameter: Treatment Value: Drought vs. No Drought
  misc_feature: MA Experiment ID: 20001555 Result: Up-regulated in Transcription
  misc_feature: MA Experiment 20001555 PARAMETER Experiment Name: At_Drought_Soil_Dry_P Parameter: Age (day) Value: 24
  misc_feature: MA Experiment 20001555 PARAMETER Experiment Name: At_Drought_Soil_Dry_P Parameter: Organism Value: A. thaliana
  misc_feature: MA Experiment 20001555 PARAMETER Experiment Name: At_Drought_Soil_Dry_P Parameter: Plant Line Value: WS
  misc_feature: MA Experiment 20001555 PARAMETER Experiment Name: At_Drought_Soil_Dry_P Parameter: Post Timepoint (hr) Value: None
  misc_feature: MA Experiment 20001555 PARAMETER Experiment Name: At_Drought_Soil_Dry_P Parameter: Post-Treatment Value: None
  misc_feature: MA Experiment 20001555 PARAMETER Experiment Name: At_Drought_Soil_Dry_P Parameter: Timepoint (day) Value: 10
  misc_feature: MA Experiment 20001555 PARAMETER Experiment Name: At_Drought_Soil_Dry_P Parameter: Treatment Value: Drought vs. No Drought
  misc_feature: MA Experiment ID: 20001558 Result: Down-regulated in Transcription
  misc_feature: MA Experiment 20001558 PARAMETER Experiment Name: At_Drought_Soil_Dry_P Parameter: Age (day) Value: 27
  misc_feature: MA Experiment 20001558 PARAMETER Experiment Name: At_Drought_Soil_Dry_P Parameter: Organism Value: A. thaliana
  misc_feature: MA Experiment 20001558 PARAMETER Experiment Name: At_Drought_Soil_Dry_P Parameter: Plant Line Value: WS
  misc_feature: MA Experiment 20001558 PARAMETER Experiment Name: At_Drought_Soil_Dry_P Parameter: Post Timepoint (hr) Value: 6
  misc_feature: MA Experiment 20001558 PARAMETER Experiment Name: At_Drought_Soil_Dry_P Parameter: Post-Treatment Value: Re-Water vs. No Drought
  misc_feature: MA Experiment 20001558 PARAMETER Experiment Name: At_Drought_Soil_Dry_P Parameter: Timepoint (day) Value: 13
  misc_feature: MA Experiment 20001558 PARAMETER Experiment Name: At_Drought_Soil_Dry_P Parameter: Treatment Value: Drought vs. No Drought
  misc_feature: MA Experiment ID: 20001904 Result: Up-regulated in Transcription
  misc_feature: MA Experiment 20001904 PARAMETER Experiment Name: At_Drought_Reproduction_P Parameter: Age (day) Value: 37
  misc_feature: MA Experiment 20001904 PARAMETER Experiment Name: At_Drought_Reproduction_P Parameter: Organism Value: A. thaliana
  misc_feature: MA Experiment 20001904 PARAMETER Experiment Name: At_Drought_Reproduction_P Parameter: Plant Line Value: WS
  misc_feature: MA Experiment 20001904 PARAMETER Experiment Name: At_Drought_Reproduction_P Parameter: Timepoint (day) Value: 7
  misc_feature: MA Experiment 20001904 PARAMETER Experiment Name: At_Drought_Reproduction_P Parameter: Tissue Value: Rosettes
  misc_feature: MA Experiment 20001904 PARAMETER Experiment Name: At_Drought_Reproduction_P Parameter: Treatment Value: Drought vs. No Drought
  misc_feature: MA Experiment ID: 20001906 Result: Up-regulated in Transcription
  misc_feature: MA Experiment 20001906 PARAMETER Experiment Name: At_Drought_Reproduction_P Parameter: Age (day) Value: 35
  misc_feature: MA Experiment 20001906 PARAMETER Experiment Name: At_Drought_Reproduction_P Parameter: Organism Value: A. thaliana
  misc_feature: MA Experiment 20001906 PARAMETER Experiment Name: At_Drought_Reproduction_P Parameter: Plant Line Value: WS
  misc_feature: MA Experiment 20001906 PARAMETER Experiment Name: At_Drought_Reproduction_P Parameter: Timepoint (day) Value: 5
  misc_feature: MA Experiment 20001906 PARAMETER Experiment Name: At_Drought_Reproduction_P Parameter: Tissue Value: Siliques
  misc_feature: MA Experiment 20001906 PARAMETER Experiment Name: At_Drought_Reproduction_P Parameter: Treatment Value: Drought vs. No Drought
  misc_feature: Pfam Name: Pkinase Pfam Description: Protein kinase domain
atgaccagagaattcgaactggaaaataactaccagctttgcgacgagatcggcagaggtagattcggaacaatcactcgctgtttctcaccggcgactaaagaattctacgcctgcaaaaccatcgacaagcgcgtgctcaccgacgcgttagatcgcgagtgtatagagacggagccgaggatcatggcgatgttaccgccgcatccgaatatcatcaggatcttcgatctctacgaaacagaggattctcttgcgatcgtcatggaattagtcgatccgccgatgacgatttacgatcggttaatctccgccggggggaggttatcagaatcagaatccgcctcatacgcgaaacagatcctccgtgcgcttgctcattgtcatcggtgcgacgtcgttcatcgggatgtgaaacctgacaacgtcttagtcgatctcgtaagcggcggtgttaagctctgtgatttcggatcagcggtgtggttaggcggagaaacggcggagggagttgtgggaacaccgtattacgtggcgccggaggtagtgatggggaggaagtacgacgagaaggttgatatatggagcgctggtgtagtgatatacacgatgctagctggagaaccgccgtttaacggtgagacggcggaagatatatttgaatcgatattgagagggaatttgaggtttccgccgaagaagtttgggtctgtatcatcggaagcgaaggatttgttgaggaaaatgatatgtcgcgatgtttctcgacgattttctgcagaggatgctcttcgacattcatggatgatgaacgttggaaacctccaaagcaattagtcgaagcttttcagatatgtgattagagaagtcgtaatatagatgtgagtgtgtaattgcttgattcgaatagtcaaacgtagttgtgtgtttcagcaat

SEQ ID NO: 76946 - protein, 278 aa, Arabidopsis thaliana
  peptide (1)..(278): Ceres Seq. ID no. 12481905
  misc_feature: Pfam Name: Pkinase Pfam Description: Protein kinase domain
  misc_feature (1)..(278): Homolog of NCBI NO: 13877128 NR Description: phosphoenolpyruvate carboxylase kinase 2 thaliana] >gi|15192724|gb|AAK84668.1| phosphoenolpyruvate
  misc_feature (1)..(278): Homolog of NCBI NO: 18396914 NR Description: phosphoenolpyruvate carboxylase kinase, putative; id: At3g04530.1, supported by cDNA: gi_13877127 [Arabidopsis
  misc_feature (1)..(267): Homolog of NCBI NO: 7547112 NR Description: phosphoenolpyruvate carboxylase kinase, putative
  misc_feature (35)..(264): Homolog of NCBI NO: 6175181 NR Description: putative calmodulin-domain protein kinase, 5'
  misc_feature (9)..(276): Homolog of NCBI NO: 15223870 NR Description: putative calcium-dependent protein kinase protein id: At1g08650.1, supported by cDNA: gi_17644150, by cDNA: gi_6318612 [Arabidopsis thaliana]
  misc_feature (9)..(264): Homolog of NCBI NO: 7434322 NR Description: calcium-dependent protein kinase homolog - Arabidopsis thaliana >gi|9802556|gb|AAF99758.1|AC003981_8
MTREFELENNYQLCDEIGRGRFGTITRCFSPATKEFYACKTIDKRVLTDALDRECIETEPRIMAMLPPHPNIIRIFDLYETEDSLAIVMELVDPPMTIYDRLISAGGRLSESESASYAKQILRALAHCHRCDVVHRDVKPDNVLVDLVSGGVKLCDFGSAVWLGGETAEGVVGTPYYVAPEVVMGRKYDEKVDIWSAGVVIYTMLAGEPPFNGETAEDIFESILRGNLRFPPKKFGSVSSEAKDLLRKMICRDVSRRFSAEDALRHSWMMNVGNLQSN

SEQ ID NO: 76947 - protein, 216 aa, Arabidopsis thaliana
  peptide (1)..(216): Ceres Seq. ID no. 12481906
  misc_feature: Pfam Name: Pkinase Pfam Description: Protein kinase domain
  misc_feature (1)..(216): Homolog of NCBI NO: 13877128 NR Description: phosphoenolpyruvate carboxylase kinase 2 thaliana] >gi|15192724|gb|AAK84668.1| phosphoenolpyruvate
  misc_feature (1)..(216): Homolog of NCBI NO: 18396914 NR Description: phosphoenolpyruvate carboxylase kinase, putative; id: At3g04530.1, supported by cDNA: gi_13877127 [Arabidopsis
  misc_feature (1)..(205): Homolog of NCBI NO: 7547112 NR Description: phosphoenolpyruvate carboxylase kinase, putative
  misc_feature (1)..(202): Homolog of NCBI NO: 6175181 NR Description: putative calmodulin-domain protein kinase, 5'
  misc_feature (1)..(214): Homolog of NCBI NO: 15223870 NR Description: putative calcium-dependent protein kinase protein id: At1g08650.1, supported by cDNA: gi_17644150, by cDNA: gi_6318612 [Arabidopsis thaliana]
  misc_feature (1)..(202): Homolog of NCBI NO: 7434322 NR Description: calcium-dependent protein kinase homolog - Arabidopsis thaliana >gi|9802556|gb|AAF99758.1|AC003981_8
MAMLPPHPNIIRIFDLYETEDSLAIVMELVDPPMTIYDRLISAGGRLSESESASYAKQILRALAHCHRCDVVHRDVKPDNVLVDLVSGGVKLCDFGSAVWLGGETAEGVVGTPYYVAPEVVMGRKYDEKVDIWSAGVVIYTMLAGEPPFNGETAEDIFESILRGNLRFPPKKFGSVSSEAKDLLRKMICRDVSRRFSAEDALRHSWMMNVGNLQSN

SEQ ID NO: 76948 - protein, 214 aa, Arabidopsis thaliana
  peptide (1)..(214): Ceres Seq. ID no. 12481907
  misc_feature: Pfam Name: Pkinase Pfam Description: Protein kinase domain
  misc_feature (1)..(214): Homolog of NCBI NO: 13877128 NR Description: phosphoenolpyruvate carboxylase kinase 2 thaliana] >gi|15192724|gb|AAK84668.1| phosphoenolpyruvate
  misc_feature (1)..(214): Homolog of NCBI NO: 18396914 NR Description: phosphoenolpyruvate carboxylase kinase, putative; id: At3g04530.1, supported by cDNA: gi_13877127 [Arabidopsis
  misc_feature (1)..(203): Homolog of NCBI NO: 7547112 NR Description: phosphoenolpyruvate carboxylase kinase, putative
  misc_feature (1)..(200): Homolog of NCBI NO: 6175181 NR Description: putative calmodulin-domain protein kinase, 5'
  misc_feature (1)..(212): Homolog of NCBI NO: 15223870 NR Description: putative calcium-dependent protein kinase protein id: At1g08650.1, supported by cDNA: gi_17644150, by cDNA: gi_6318612 [Arabidopsis thaliana]
  misc_feature (1)..(200): Homolog of NCBI NO: 7434322 NR Description: calcium-dependent protein kinase homolog - Arabidopsis thaliana >gi|9802556|gb|AAF99758.1|AC003981_8
MLPPHPNIIRIFDLYETEDSLAIVMELVDPPMTIYDRLISAGGRLSESESASYAKQILRALAHCHRCDVVHRDVKPDNVLVDLVSGGVKLCDFGSAVWLGGETAEGVVGTPYYVAPEVVMGRKYDEKVDIWSAGVVIYTMLAGEPPFNGETAEDIFESILRGNLRFPPKKFGSVSSEAKDLLRKMICRDVSRRFSAEDALRHSWMMNVGNLQSN

SEQ ID NO: 76949 - DNA, 2244 bp, Arabidopsis thaliana
  misc_feature (1)..(2244): Ceres Seq. ID no. 12482026
  misc_feature: MA Experiment ID: 20000307 Result: Up-regulated in Transcription
  misc_feature: MA Experiment 20000307 PARAMETER Experiment Name: At_Germinating_Seeds_Sub_P Parameter: Age (hr) Value: 24 vs. 0
  misc_feature: MA Experiment 20000307 PARAMETER Experiment Name: At_Germinating_Seeds_Sub_P Parameter: Organism Value: A. thaliana
  misc_feature: MA Experiment 20000307 PARAMETER Experiment Name: At_Germinating_Seeds_Sub_P Parameter: Plant Line Value: WS
  misc_feature: MA Experiment 20000307 PARAMETER Experiment Name: At_Germinating_Seeds_Sub_P Parameter: Tissue Value: Germinating Seeds
actggtcgtctctccacgtgtaccggaaaatgaatgaagatccttaaaaacacgccggagtgaaaccgagccaccattgtttttttccaaatctgccagagtccgtaccatgtccaccatgcctccacaatttcccttggagatccgctcagctcttcgccgggcttcctccaccgtctatctccaccgttccatcagcaccgtcactactactccttcgtttcgtcaccgaacgacgttgttacgaccgagagctttctcttcttcctctgttaagctccccacgaaaccttctctttgcaccgccgacgagcttcattacgtctccgttcctaacaccgattggcgtctcgctctctggcgctacttgcctcctcctcaggctccgacgaggaatcatccattgttactgttgtctggagtaggaactaatgccatcggatatgatttatctcctggttgctcttttgcaaggcatatgtctggacagggatttgagacttggattctcgaggttcgtggagctggattgagtacacgagtatctgatcttaaggacgttgaggaatctgctcatgaattgtcgaatcagatagaatctactgctagagctgctgcaggtaaagaaacttgttctgatgaaaagcagactactgatattatggacagtagtgcacctgcaccagcgtcggatgtttcagttgttggcgaagcatcggcttgggacgagtcacagcttgtggcgagattgacatcaactttcatgagtttgtcagaaagactttctggctttctcagtgaaggtcagtctgtgttcatgtctgctaagttgtttgacaaaattgcaatgcttgtagatgatacacagctgtacgagcgctttaatgatataagatcgaagcttttgagtttgatagagtcaaagcaaaactcaggacttgttaaccaagtcagagatttggctcagcgccttgtgaatcttttcgacgatggtcaaaggtctgtctcgcctccgctgattgatttacaagagcgcctcactgcgaccatagaagattttcagaagcaactggatttgatagttaaatatgactgggattttgatcactacctggaagaggatgtccctgctgcgattgagtatgtaagagcacaaagcaagcccaaggacggcaaactattcgcaattgggcactccatggggggtatcctactctatgcaatgctatcacgttgtgcttttgaaggacgagaaccttccgtggcagctgtggcaactctggcatcatcggttgattacacaacctcaaattctgcactcaaattgctcatacctcttgccaatcctgcagaagctctgagtgttccagttgttcctctgggtgctttgttggctgccgcttttcctctttcgacacgtcctccatatgtattatcttggcttaatgatttgatatcatcaacagatatgatgcaccctgaaatgttagaaaagcttgtcttgaataacttctgtaccatacctgcaaaactacttattcagctgacaacggcctttcgagagggaggcttacgtgatcgtagtggtaaattttactataaggatcatcttcccagaaccagtgtccctgtcttagctcttgcaggtgatcgggacttgatctgcccccctgcggctgtggaagacactgttaagctgtttccggagaacttggtcacttataagttacttggagaaccagatggaccacattatgcacactatgatttggttggaggacgactggcagtggagcaagtctatccttgcataactgaatttcttagccaccatgattccgcataagtgaaacatttcgggagtttctgttccttgcatgctatagcacatgtagattgtagacgtcgcactaaggtggtgtcgaagaagtgtgtttcagaagcgcctgttaaaaaggatgccatttccgtttaagacacgtacatttagtatctgggcaaactgtacatgagcttaggatgcagttttttcaagtcatacacctgtaaattaggaaaagcatcgaatgagatgctggaagctcttgtctactgtgatgatttcccttgttttgttatggcaacgagctttttatttgaacatttatctttagaagaactggtgtgttctcttgtactgctttgcttcttttggaggacttgagttatccatgagagcaattgtatagacatggatttatgtgt

SEQ ID NO: 76950 - protein, 578 aa, Arabidopsis thaliana
  peptide (1)..(578): Ceres Seq. ID no. 12482027
  misc_feature (1)..(578): Homolog of NCBI NO: 19699290 NR Description: At1g15070/F9L1_1 [Arabidopsis thaliana]
  misc_feature (1)..(570): Homolog of NCBI NO: 15220945 NR Description: hypothetical protein; protein id: At1g15060.1, by cDNA: gi_19699289, supported by cDNA: gi_19699289 [Arabidopsis
  misc_feature (4)..(525): Homolog of NCBI NO: 25372839 NR Description: F9L1.1 protein - Arabidopsis thaliana
  misc_feature (91)..(376): Homolog of NCBI NO: 34911394 NR Description: similar to Arabidopsis thaliana chromosome 1,
  misc_feature (425)..(558): Homolog of NCBI NO: 34911394 NR Description: similar to Arabidopsis thaliana chromosome 1,
  misc_feature (46)..(91): Homolog of NCBI NO: 34911394 NR Description: similar to Arabidopsis thaliana chromosome 1,
  misc_feature (275)..(578): Homolog of NCBI NO: 25372838 NR Description: unknown protein F25P22.17 [imported] -
  misc_feature (53)..(143): Homolog of NCBI NO: 25372838 NR Description: unknown protein F25P22.17 [imported] -
  misc_feature (275)..(578): Homolog of NCBI NO: 18410446 NR Description: expressed protein; protein id: At1g73750.1, by cDNA: gi_16930504 [Arabidopsis thaliana] At1g73750/F25P22_17 [Arabidopsis thaliana]
  misc_feature (53)..(143): Homolog of NCBI NO: 18410446 NR Description: expressed protein; protein id: At1g73750.1, by cDNA: gi_16930504 [Arabidopsis thaliana] At1g73750/F25P22_17 [Arabidopsis thaliana]
MSTMPPQFPLEIRSALRRASSTVYLHRSISTVTTTPSFRHRTTLLRPRAFSSSSVKLPTKPSLCTADELHYVSVPNTDWRLALWRYLPPPQAPTRNHPLLLLSGVGTNAIGYDLSPGCSFARHMSGQGFETWILEVRGAGLSTRVSDLKDVEESAHELSNQIESTARAAAGKETCSDEKQTTDIMDSSAPAPASDVSVVGEASAWDESQLVARLTSTFMSLSERLSGFLSEGQSVFMSAKLFDKIAMLVDDTQLYERFNDIRSKLLSLIESKQNSGLVNQVRDLAQRLVNLFDDGQRSVSPPLIDLQERLTATIEDFQKQLDLIVKYDWDFDHYLEEDVPAAIEYVRAQSKPKDGKLFAIGHSMGGILLYAMLSRCAFEGREPSVAAVATLASSVDYTTSNSALKLLIPLANPAEALSVPVVPLGALLAAAFPLSTRPPYVLSWLNDLISSTDMMHPEMLEKLVLNNFCTIPAKLLIQLTTAFREGGLRDRSGKFYYKDHLPRTSVPVLALAGDRDLICPPAAVEDTVKLFPENLVTYKLLGEPDGPHYAHYDLVGGRLAVEQVYPCITEFLSHHDSA

SEQ ID NO: 76951 - protein, 575 aa, Arabidopsis thaliana
  peptide (1)..(575): Ceres Seq. ID no. 12482028
  misc_feature (1)..(575): Homolog of NCBI NO: 19699290 NR Description: At1g15070/F9L1_1 [Arabidopsis thaliana]
  misc_feature (1)..(567): Homolog of NCBI NO: 15220945 NR Description: hypothetical protein; protein id: At1g15060.1, by cDNA: gi_19699289, supported by cDNA: gi_19699289 [Arabidopsis
  misc_feature (1)..(522): Homolog of NCBI NO: 25372839 NR Description: F9L1.1 protein - Arabidopsis thaliana
  misc_feature (88)..(373): Homolog of NCBI NO: 34911394 NR Description: similar to Arabidopsis thaliana chromosome 1,
  misc_feature (422)..(555): Homolog of NCBI NO: 34911394 NR Description: similar to Arabidopsis thaliana chromosome 1,
  misc_feature (43)..(88): Homolog of NCBI NO: 34911394 NR Description: similar to Arabidopsis thaliana chromosome 1,
  misc_feature (272)..(575): Homolog of NCBI NO: 25372838 NR Description: unknown protein F25P22.17 [imported] -
  misc_feature (50)..(140): Homolog of NCBI NO: 25372838 NR Description: unknown protein F25P22.17 [imported] -
  misc_feature (272)..(575): Homolog of NCBI NO: 18410446 NR Description: expressed protein; protein id: At1g73750.1, by cDNA: gi_16930504 [Arabidopsis thaliana] At1g73750/F25P22_17 [Arabidopsis thaliana]
  misc_feature (50)..(140): Homolog of NCBI NO: 18410446 NR Description: expressed protein; protein id: At1g73750.1, by cDNA: gi_16930504 [Arabidopsis thaliana] At1g73750/F25P22_17 [Arabidopsis thaliana]
MPPQFPLEIRSALRRASSTVYLHRSISTVTTTPSFRHRTTLLRPRAFSSSSVKLPTKPSLCTADELHYVSVPNTDWRLALWRYLPPPQAPTRNHPLLLLSGVGTNAIGYDLSPGCSFARHMSGQGFETWILEVRGAGLSTRVSDLKDVEESAHELSNQIESTARAAAGKETCSDEKQTTDIMDSSAPAPASDVSVVGEASAWDESQLVARLTSTFMSLSERLSGFLSEGQSVFMSAKLFDKIAMLVDDTQLYERFNDIRSKLLSLIESKQNSGLVNQVRDLAQRLVNLFDDGQRSVSPPLIDLQERLTATIEDFQKQLDLIVKYDWDFDHYLEEDVPAAIEYVRAQSKPKDGKLFAIGHSMGGILLYAMLSRCAFEGREPSVAAVATLASSVDYTTSNSALKLLIPLANPAEALSVPVVPLGALLAAAFPLSTRPPYVLSWLNDLISSTDMMHPEMLEKLVLNNFCTIPAKLLIQLTTAFREGGLRDRSGKFYYKDHLPRTSVPVLALAGDRDLICPPAAVEDTVKLFPENLVTYKLLGEPDGPHYAHYDLVGGRLAVEQVYPCITEFLSHHDSA

SEQ ID NO: 76952 - protein, 455 aa, Arabidopsis thaliana
  peptide (1)..(455): Ceres Seq. ID no. 12482029
  misc_feature (1)..(455): Homolog of NCBI NO: 19699290 NR Description: At1g15070/F9L1_1 [Arabidopsis thaliana]
  misc_feature (1)..(447): Homolog of NCBI NO: 15220945 NR Description: hypothetical protein; protein id: At1g15060.1, by cDNA: gi_19699289, supported by cDNA: gi_19699289 [Arabidopsis
  misc_feature (1)..(402): Homolog of NCBI NO: 25372839 NR Description: F9L1.1 protein - Arabidopsis thaliana
  misc_feature (1)..(253): Homolog of NCBI NO: 34911394 NR Description: similar to Arabidopsis thaliana chromosome 1,
  misc_feature (302)..(435): Homolog of NCBI NO: 34911394 NR Description: similar to Arabidopsis thaliana chromosome 1,
  misc_feature (152)..(455): Homolog of NCBI NO: 25372838 NR Description: unknown protein F25P22.17 [imported] -
  misc_feature (1)..(20): Homolog of NCBI NO: 25372838 NR Description: unknown protein F25P22.17 [imported] -
  misc_feature (152)..(455): Homolog of NCBI NO: 18410446 NR Description: expressed protein; protein id: At1g73750.1, by cDNA: gi_16930504 [Arabidopsis thaliana] At1g73750/F25P22_17 [Arabidopsis thaliana]
  misc_feature (1)..(20): Homolog of NCBI NO: 18410446 NR Description: expressed protein; protein id: At1g73750.1, by cDNA: gi_16930504 [Arabidopsis thaliana] At1g73750/F25P22_17 [Arabidopsis thaliana]
  misc_feature (63)..(453): Homolog of NCBI NO: 38637529 NR Description: unknown protein [Oryza sativa (japonica
MSGQGFETWILEVRGAGLSTRVSDLKDVEESAHELSNQIESTARAAAGKETCSDEKQTTDIMDSSAPAPASDVSVVGEASAWDESQLVARLTSTFMSLSERLSGFLSEGQSVFMSAKLFDKIAMLVDDTQLYERFNDIRSKLLSLIESKQNSGLVNQVRDLAQRLVNLFDDGQRSVSPPLIDLQERLTATIEDFQKQLDLIVKYDWDFDHYLEEDVPAAIEYVRAQSKPKDGKLFAIGHSMGGILLYAMLSRCAFEGREPSVAAVATLASSVDYTTSNSALKLLIPLANPAEALSVPVVPLGALLAAAFPLSTRPPYVLSWLNDLISSTDMMHPEMLEKLVLNNFCTIPAKLLIQLTTAFREGGLRDRSGKFYYKDHLPRTSVPVLALAGDRDLICPPAAVEDTVKLFPENLVTYKLLGEPDGPHYAHYDLVGGRLAVEQVYPCITEFLSHHDSA

SEQ ID NO: 76953 - DNA, 1703 bp, Arabidopsis thaliana
  misc_feature (1)..(1703): Ceres Seq. ID no. 12482154
  misc_feature: MA Experiment ID: 20000185 Result: Up-regulated in Transcription
  misc_feature: MA Experiment 20000185 PARAMETER Experiment Name: At_Roots__P Parameter: Age (day) Value: 7 vs. 21
  misc_feature: MA Experiment 20000185 PARAMETER Experiment Name: At_Roots__P Parameter: Organism Value: A. thaliana
  misc_feature: MA Experiment 20000185 PARAMETER Experiment Name: At_Roots__P Parameter: Tissue Value: Roots vs. Whole Plant
  misc_feature: MA Experiment ID: 20000436 Result: Down-regulated in Transcription
  misc_feature: MA Experiment 20000436 PARAMETER Experiment Name: At_Drought_P Parameter: Age (day) Value: 7
  misc_feature: MA Experiment 20000436 PARAMETER Experiment Name: At_Drought_P Parameter: Organism Value: A. thaliana
  misc_feature: MA Experiment 20000436 PARAMETER Experiment Name: At_Drought_P Parameter: Plant Line Value: WS
  misc_feature: MA Experiment 20000436 PARAMETER Experiment Name: At_Drought_P Parameter: Timepoint (hr) Value: 12
  misc_feature: MA Experiment 20000436 PARAMETER Experiment Name: At_Drought_P Parameter: Tissue Value: Whole Plant
  misc_feature: MA Experiment 20000436 PARAMETER Experiment Name: At_Drought_P Parameter: Treatment Value: Drought vs. No Drought
  misc_feature: MA Experiment ID: 20000437 Result: Down-regulated in Transcription
  misc_feature: MA Experiment 20000437 PARAMETER Experiment Name: At_Drought_P Parameter: Age (day) Value: 8
  misc_feature: MA Experiment 20000437 PARAMETER Experiment Name: At_Drought_P Parameter: Organism Value: A. thaliana
  misc_feature: MA Experiment 20000437 PARAMETER Experiment Name: At_Drought_P Parameter: Plant Line Value: WS
  misc_feature: MA Experiment 20000437 PARAMETER Experiment Name: At_Drought_P Parameter: Timepoint (hr) Value: 24
  misc_feature: MA Experiment 20000437 PARAMETER Experiment Name: At_Drought_P Parameter: Tissue Value: Whole Plant
  misc_feature: MA Experiment 20000437 PARAMETER Experiment Name: At_Drought_P Parameter: Treatment Value: Drought vs. No Drought
  misc_feature: MA Experiment ID: 20000451 Result: Up-regulated in Transcription
  misc_feature: MA Experiment 20000451 PARAMETER Experiment Name: At_CS6879_Shoots-Roots_P Parameter: Age (day) Value: 14
  misc_feature: MA Experiment 20000451 PARAMETER Experiment Name: At_CS6879_Shoots-Roots_P Parameter: Organism Value: A. thaliana
  misc_feature: MA Experiment 20000451 PARAMETER Experiment Name: At_CS6879_Shoots-Roots_P Parameter: Plant Line Value: CS6879 vs. WS
  misc_feature: MA Experiment 20000451 PARAMETER Experiment Name: At_CS6879_Shoots-Roots_P Parameter: Tissue Value: Roots
  misc_feature: MA Experiment ID: 20001248 Result: Down-regulated in Transcription
  misc_feature: MA Experiment 20001248 PARAMETER Experiment Name: At_Far-red-induction_P Parameter: Age (day) Value: 7
  misc_feature: MA Experiment 20001248 PARAMETER Experiment Name: At_Far-red-induction_P Parameter: Light Value: Far-red vs. White
  misc_feature: MA Experiment 20001248 PARAMETER Experiment Name: At_Far-red-induction_P Parameter: Organism Value: A. thaliana
  misc_feature: MA Experiment 20001248 PARAMETER Experiment Name: At_Far-red-induction_P Parameter: Plant Line Value: Columbia
  misc_feature: MA Experiment 20001248 PARAMETER Experiment Name: At_Far-red-induction_P Parameter: Timepoint (hr) Value: 4
  misc_feature: MA Experiment 20001248 PARAMETER Experiment Name: At_Far-red-induction_P Parameter: Tissue Value: Whole Plant
  misc_feature: MA Experiment ID: 20001554 Result: Down-regulated in Transcription
  misc_feature: MA Experiment 20001554 PARAMETER Experiment Name: At_Drought_Soil_Dry_P Parameter: Age (day) Value: 21
  misc_feature: MA Experiment 20001554 PARAMETER Experiment Name: At_Drought_Soil_Dry_P Parameter: Organism Value: A. thaliana
  misc_feature: MA Experiment 20001554 PARAMETER Experiment Name: At_Drought_Soil_Dry_P Parameter: Plant Line Value: WS
  misc_feature: MA Experiment 20001554 PARAMETER Experiment Name: At_Drought_Soil_Dry_P Parameter: Post Timepoint (hr) Value: None
  misc_feature: MA Experiment 20001554 PARAMETER Experiment Name: At_Drought_Soil_Dry_P Parameter: Post-Treatment Value: None
  misc_feature: MA Experiment 20001554 PARAMETER Experiment Name: At_Drought_Soil_Dry_P Parameter: Timepoint (day) Value: 7
  misc_feature: MA Experiment 20001554 PARAMETER Experiment Name: At_Drought_Soil_Dry_P Parameter: Treatment Value: Drought vs. No Drought
  misc_feature: MA Experiment ID: 20001556 Result: Down-regulated in Transcription
  misc_feature: MA Experiment 20001556 PARAMETER Experiment Name: At_Drought_Soil_Dry_P Parameter: Age (day) Value: 26
  misc_feature: MA Experiment 20001556 PARAMETER Experiment Name: At_Drought_Soil_Dry_P Parameter: Organism Value: A. thaliana
  misc_feature: MA Experiment 20001556 PARAMETER Experiment Name: At_Drought_Soil_Dry_P Parameter: Plant Line Value: WS
  misc_feature: MA Experiment 20001556 PARAMETER Experiment Name: At_Drought_Soil_Dry_P Parameter: Post Timepoint (hr) Value: None
  misc_feature: MA Experiment 20001556 PARAMETER Experiment Name: At_Drought_Soil_Dry_P Parameter: Post-Treatment Value: None
  misc_feature: MA Experiment 20001556 PARAMETER Experiment Name: At_Drought_Soil_Dry_P Parameter: Timepoint (day) Value: 12
  misc_feature: MA Experiment 20001556 PARAMETER Experiment Name: At_Drought_Soil_Dry_P Parameter: Treatment Value: Drought vs. No Drought
  misc_feature: MA Experiment ID: 20001557 Result: Up-regulated in Transcription
  misc_feature: MA Experiment 20001557 PARAMETER Experiment Name: At_Drought_Soil_Dry_P Parameter: Age (day) Value: 27
  misc_feature: MA Experiment 20001557 PARAMETER Experiment Name: At_Drought_Soil_Dry_P Parameter: Organism Value: A. thaliana
  misc_feature: MA Experiment 20001557 PARAMETER Experiment Name: At_Drought_Soil_Dry_P Parameter: Plant Line Value: WS
  misc_feature: MA Experiment 20001557 PARAMETER Experiment Name: At_Drought_Soil_Dry_P Parameter: Post Timepoint (hr) Value: 3
  misc_feature: MA Experiment 20001557 PARAMETER Experiment Name: At_Drought_Soil_Dry_P Parameter: Post-Treatment Value: Re-Water vs. No Drought
  misc_feature: MA Experiment 20001557 PARAMETER Experiment Name: At_Drought_Soil_Dry_P Parameter: Timepoint (day) Value: 13
  misc_feature: MA Experiment 20001557 PARAMETER Experiment Name: At_Drought_Soil_Dry_P Parameter: Treatment Value: Drought vs. No Drought
  misc_feature: MA Experiment ID: 20001558 Result: Up-regulated in Transcription
  misc_feature: MA Experiment 20001558 PARAMETER Experiment Name: At_Drought_Soil_Dry_P Parameter: Age (day) Value: 27
  misc_feature: MA Experiment 20001558 PARAMETER Experiment Name: At_Drought_Soil_Dry_P Parameter: Organism Value: A. thaliana
  misc_feature: MA Experiment 20001558 PARAMETER Experiment Name: At_Drought_Soil_Dry_P Parameter: Plant Line Value: WS
  misc_feature: MA Experiment 20001558 PARAMETER Experiment Name: At_Drought_Soil_Dry_P Parameter: Post Timepoint (hr) Value: 6
  misc_feature: MA Experiment 20001558 PARAMETER Experiment Name: At_Drought_Soil_Dry_P Parameter: Post-Treatment Value: Re-Water vs. No Drought
  misc_feature: MA Experiment 20001558 PARAMETER Experiment Name: At_Drought_Soil_Dry_P Parameter: Timepoint (day) Value: 13
  misc_feature: MA Experiment 20001558 PARAMETER Experiment Name: At_Drought_Soil_Dry_P Parameter: Treatment Value: Drought vs. No Drought
  misc_feature: MA Experiment ID: 20001560 Result: Up-regulated in Transcription
  misc_feature: MA Experiment 20001560 PARAMETER Experiment Name: At_Drought_Soil_Dry_P Parameter: Age (day) Value: 28
  misc_feature: MA Experiment 20001560 PARAMETER Experiment Name: At_Drought_Soil_Dry_P Parameter: Organism Value: A. thaliana
  misc_feature: MA Experiment 20001560 PARAMETER Experiment Name: At_Drought_Soil_Dry_P Parameter: Plant Line Value: WS
  misc_feature: MA Experiment 20001560 PARAMETER Experiment Name: At_Drought_Soil_Dry_P Parameter: Post Timepoint (hr) Value: None
  misc_feature: MA Experiment 20001560 PARAMETER Experiment Name: At_Drought_Soil_Dry_P Parameter: Post-Treatment Value: None
  misc_feature: MA Experiment 20001560 PARAMETER Experiment Name: At_Drought_Soil_Dry_P Parameter: Timepoint (day) Value: 14
  misc_feature: MA Experiment 20001560 PARAMETER Experiment Name: At_Drought_Soil_Dry_P Parameter: Treatment Value: Drought vs. No Drought
ggcaaatctctccgtttcttatttttcttctcctttcccatttattttctgtgtcccttgtttggttccagagaaaccgcgagaaacaaaaaaatcagagaagaagaagagaaaacaaaaaaaaaaatctgtcttcttcccgtcgtttaacgctttcagtttcgaaagttgtatctgcatttttctcagggtctatatttctctgaggaattggattcttatagaagttaaaccgcagagcttcttctatccaatagtcctctgagaatcgtcgatatagtttgctgatatagttgttatggacatgaaatctggtcactcgtctcctgtaatgactgattctccaccaataagcaactcaagattaaccattcgtcagaatagacttccttactcatcagcagcagccacggctatctcacagaacaacaatctcttactaaccgttccaagaaagaaaactgggatccttgatgatgttaagtctaatggttggcttgatgcgatgaaatcttcttctcctcctcctacaatacttaacaaagataacttaagcaatgatgctacggatatgacttatcgcgaatggatgcagctcaagtatccatcagctcttacctcttttgagaaaatcatgagttttgcaaaaggcaaaagaatagcattgtttcttgattatgacgggacactttcgcctattgttgaggaacctgattgtgcatacatgtcaagtgctatgcgtagtgcagtgcaaaatgttgccaagtatttccctaccgcgatcattagtggaagaagccgggataaggtgtatgagtttgttaatttgagtgaactttattacgccggaagccatggaatggacatcatgagtcccgcaggagaatctttaaaccatgaacatagccgtactgtatcagtttacgaacaggggaaagatgtaaatctattccagcctgctagcgagtttctcccgatgatcgataaggtgctttgttctcttatagagagtacaaaagatatcaaaggggtaaaagtagaagacaacaagttctgcatctctgtgcattaccgcaatgtagaagaaaagaactggacattggttgcacagtgtgtagatgatgtcatcagaacatatccaaaactacggctaacacatggccggaaggttttagagatccgtcctgtgattgactgggacaaagggaaagctgtgacatttctacttgaatcactcggcctaaacaactgtgaggatgttcttccaatctatgttggggatgatcgaacagacgaagatgcatttaaggtactacgagatggaccaaaccacggttatggtatattagtctctgctgtgcctaaagacagcaatgccttttactcgcttcgtgacccgtctgaggtgatggagtttctgaagtcattggtgacatggaagagatcaatgggttaaagtagaagaagaagatgtagaagaaaagtggttaacgttaatatatattacaaatatgcaagttagaggtttattgttacttttcggctttatacaaaaactaccgttgagatttaacttaacggtatcggaggagagatcacatgatggcttaaaacatgccggagatactttttccgaccaatctctttatcttctacaactgtaaattcctccatctccggattaattcaagacatttttgttt

SEQ ID NO: 76954 - protein, 385 aa, Arabidopsis thaliana
  peptide (1)..(385): Ceres Seq. ID no. 12482155
  misc_feature (124)..(368): Pfam Name: Trehalose-phosphatase Pfam Description: Trehalose-phosphatase
  misc_feature (1)..(385): Homolog of NCBI NO: 30696054 NR Description: trehalose-6-phosphate phosphatase (TPPA)
  misc_feature (1)..(385): Homolog of NCBI NO: 30696058 NR Description: trehalose-6-phosphate phosphatase (TPPA)
  misc_feature (1)..(380): Homolog of NCBI NO: 15235713 NR Description: trehalose-6-phosphate phosphatase - like protein;
  misc_feature (19)..(382): Homolog of NCBI NO: 15234552 NR Description: putative trehalose-6-phosphate phosphatase protein id: At4g12430.1, supported by cDNA: gi_16648940
  misc_feature (1)..(381): Homolog of NCBI NO: 37536726 NR Description: putative trehalose-6-phosphate phosphatase [Oryza
  misc_feature (48)..(382): Homolog of NCBI NO: 18399940 NR Description: trehalose-phosphatase, putative; protein id:
  misc_feature (48)..(382): Homolog of NCBI NO: 21554408 NR Description: trehalose-phosphatase, putative [Arabidopsis
  misc_feature (48)..(382): Homolog of NCBI NO: 25354597 NR Description: probable trehalose-phosphatase [imported] -
  misc_feature (11)..(382): Homolog of NCBI NO: 25354595 NR Description: trehalose-phosphatase (EC 3.1.3.12) B [imported] -
  misc_feature (11)..(382): Homolog of NCBI NO: 15218205 NR Description: trehalose-6-phosphate phosphatase (AtTPPB); id: At1g78090.1, supported by cDNA: gi_2944179 [Arabidopsis
MDMKSGHSSPVMTDSPPISNSRLTIRQNRLPYSSAAATAISQNNNLLLTVPRKKTGILDDVKSNGWLDAMKSSSPPPTILNKDNLSNDATDMTYREWMQLKYPSALTSFEKIMSFAKGKRIALFLDYDGTLSPIVEEPDCAYMSSAMRSAVQNVAKYFPTAIISGRSRDKVYEFVNLSELYYAGSHGMDIMSPAGESLNHEHSRTVSVYEQGKDVNLFQPASEFLPMIDKVLCSLIESTKDIKGVKVEDNKFCISVHYRNVEEKNWTLVAQCVDDVIRTYPKLRLTHGRKVLEIRPVIDWDKGKAVTFLLESLGLNNCEDVLPIYVGDDRTDEDAFKVLRDGPNHGYGILVSAVPKDSNAFYSLRDPSEVMEFLKSLVTWKRSMG

SEQ ID NO: 76955 - protein, 383 aa, Arabidopsis thaliana
  peptide (1)..(383): Ceres Seq. ID no. 12482156
  misc_feature (122)..(366): Pfam Name: Trehalose-phosphatase Pfam Description: Trehalose-phosphatase
  misc_feature (1)..(383): Homolog of NCBI NO: 30696054 NR Description: trehalose-6-phosphate phosphatase (TPPA)
  misc_feature (1)..(383): Homolog of NCBI NO: 30696058 NR Description: trehalose-6-phosphate phosphatase (TPPA)
  misc_feature (1)..(378): Homolog of NCBI NO: 15235713 NR Description: trehalose-6-phosphate phosphatase - like protein;
  misc_feature (17)..(380): Homolog of NCBI NO: 15234552 NR Description: putative trehalose-6-phosphate phosphatase protein id: At4g12430.1, supported by cDNA: gi_16648940
  misc_feature (1)..(379): Homolog of NCBI NO: 37536726 NR Description: putative trehalose-6-phosphate phosphatase [Oryza
  misc_feature (46)..(380): Homolog of NCBI NO: 18399940 NR Description: trehalose-phosphatase, putative; protein id:
  misc_feature (46)..(380): Homolog of NCBI NO: 21554408 NR Description: trehalose-phosphatase, putative [Arabidopsis
  misc_feature (46)..(380): Homolog of NCBI NO: 25354597 NR Description: probable trehalose-phosphatase [imported] -
  misc_feature (9)..(380): Homolog of NCBI NO: 25354595 NR Description: trehalose-phosphatase (EC 3.1.3.12) B [imported] -
  misc_feature (9)..(380): Homolog of NCBI NO: 15218205 NR Description: trehalose-6-phosphate phosphatase (AtTPPB); id: At1g78090.1, supported by cDNA: gi_2944179 [Arabidopsis
MKSGHSSPVMTDSPPISNSRLTIRQNRLPYSSAAATAISQNNNLLLTVPRKKTGILDDVKSNGWLDAMKSSSPPPTILNKDNLSNDATDMTYREWMQLKYPSALTSFEKIMSFAKGKRIALFLDYDGTLSPIVEEPDCAYMSSAMRSAVQNVAKYFPTAIISGRSRDKVYEFVNLSELYYAGSHGMDIMSPAGESLNHEHSRTVSVYEQGKDVNLFQPASEFLPMIDKVLCSLIESTKDIKGVKVEDNKFCISVHYRNVEEKNWTLVAQCVDDVIRTYPKLRLTHGRKVLEIRPVIDWDKGKAVTFLLESLGLNNCEDVLPIYVGDDRTDEDAFKVLRDGPNHGYGILVSAVPKDSNAFYSLRDPSEVMEFLKSLVTWKRSMG

SEQ ID NO: 76956 - protein, 374 aa, Arabidopsis thaliana
  peptide (1)..(374): Ceres Seq. ID no. 12482157
  misc_feature (113)..(357): Pfam Name: Trehalose-phosphatase Pfam Description: Trehalose-phosphatase
  misc_feature (1)..(374): Homolog of NCBI NO: 30696054 NR Description: trehalose-6-phosphate phosphatase (TPPA)
  misc_feature (1)..(374): Homolog of NCBI NO: 30696058 NR Description: trehalose-6-phosphate phosphatase (TPPA)
  misc_feature (1)..(369): Homolog of NCBI NO: 15235713 NR Description: trehalose-6-phosphate phosphatase - like protein;
  misc_feature (8)..(371): Homolog of NCBI NO: 15234552 NR Description: putative trehalose-6-phosphate phosphatase protein id: At4g12430.1, supported by cDNA: gi_16648940
  misc_feature (1)..(370): Homolog of NCBI NO: 37536726 NR Description: putative trehalose-6-phosphate phosphatase [Oryza
  misc_feature (37)..(371): Homolog of NCBI NO: 18399940 NR Description: trehalose-phosphatase, putative; protein id:
  misc_feature (37)..(371): Homolog of NCBI NO: 21554408 NR Description: trehalose-phosphatase, putative [Arabidopsis
  misc_feature (37)..(371): Homolog of NCBI NO: 25354597 NR Description: probable trehalose-phosphatase [imported] -
  misc_feature (1)..(371): Homolog of NCBI NO: 25354595 NR Description: trehalose-phosphatase (EC 3.1.3.12) B [imported] -
  misc_feature (1)..(371): Homolog of NCBI NO: 15218205 NR Description: trehalose-6-phosphate phosphatase (AtTPPB); id: At1g78090.1, supported by cDNA: gi_2944179 [Arabidopsis
MTDSPPISNSRLTIRQNRLPYSSAAATAISQNNNLLLTVPRKKTGILDDVKSNGWLDAMKSSSPPPTILNKDNLSNDATDMTYREWMQLKYPSALTSFEKIMSFAKGKRIALFLDYDGTLSPIVEEPDCAYMSSAMRSAVQNVAKYFPTAIISGRSRDKVYEFVNLSELYYAGSHGMDIMSPAGESLNHEHSRTVSVYEQGKDVNLFQPASEFLPMIDKVLCSLIESTKDIKGVKVEDNKFCISVHYRNVEEKNWTLVAQCVDDVIRTYPKLRLTHGRKVLEIRPVIDWDKGKAVTFLLESLGLNNCEDVLPIYVGDDRTDEDAFKVLRDGPNHGYGILVSAVPKDSNAFYSLRDPSEVMEFLKSLVTWKRSMG

SEQ ID NO: 76957 - DNA, 1494 bp, Arabidopsis thaliana
  misc_feature (1)..(1494): Ceres Seq. ID no. 12482196
  misc_feature: MA Experiment ID: 20000173 Result: Down-regulated in Transcription
  misc_feature: MA Experiment 20000173 PARAMETER Experiment Name: At_42deg_Heat_P Parameter: Age (day) Value: 14
  misc_feature: MA Experiment 20000173 PARAMETER Experiment Name: At_42deg_Heat_P Parameter: Organism Value: A. thaliana
  misc_feature: MA Experiment 20000173 PARAMETER Experiment Name: At_42deg_Heat_P Parameter: Plant Line Value: WS
  misc_feature: MA Experiment 20000173 PARAMETER Experiment Name: At_42deg_Heat_P Parameter: Temperature (deg C) Value: 42 vs. 22
  misc_feature: MA Experiment 20000173 PARAMETER Experiment Name: At_42deg_Heat_P Parameter: Timepoint (hr) Value: 6
  misc_feature: MA Experiment 20000173 PARAMETER Experiment Name: At_42deg_Heat_P Parameter: Tissue Value: Aerial
  misc_feature: MA Experiment ID: 20000180 Result: Up-regulated in Transcription
  misc_feature: MA Experiment 20000180 PARAMETER Experiment Name: At_Germinating_Seeds_P Parameter: Age (hr) Value: 24 vs. 0
  misc_feature: MA Experiment 20000180 PARAMETER Experiment Name: At_Germinating_Seeds_P Parameter: Tissue Value: Germinating Seeds
  misc_feature: MA Experiment ID: 20000185 Result: Up-regulated in Transcription
  misc_feature: MA Experiment 20000185 PARAMETER Experiment Name: At_Roots__P Parameter: Age (day) Value: 7 vs. 21
  misc_feature: MA Experiment 20000185 PARAMETER Experiment Name: At_Roots__P Parameter: Organism Value: A. thaliana
  misc_feature: MA Experiment 20000185 PARAMETER Experiment Name: At_Roots__P Parameter: Tissue Value: Roots vs. Whole Plant
  misc_feature: MA Experiment ID: 20000265 Result: Up-regulated in Transcription
  misc_feature: MA Experiment 20000265 PARAMETER Experiment Name: At_Open_Flower_P Parameter: Age (day) Value: 21
  misc_feature: MA Experiment 20000265 PARAMETER Experiment Name: At_Open_Flower_P Parameter: Plant Line Value: WS
  misc_feature: MA Experiment 20000265 PARAMETER Experiment Name: At_Open_Flower_P Parameter: Tissue Value: Closed Flower vs. Whole Plant
  misc_feature: MA Experiment ID: 20000439 Result: Up-regulated in Transcription
  misc_feature: MA Experiment 20000439 PARAMETER Experiment Name: At_Roots__P Parameter: Age (day) Value: 14 vs. 21
  misc_feature: MA Experiment 20000439 PARAMETER Experiment Name: At_Roots__P Parameter: Organism Value: A. thaliana
  misc_feature: MA Experiment 20000439 PARAMETER Experiment Name: At_Roots__P Parameter: Tissue Value: Roots vs. Whole Plant
acgacctttcaatacaaaatcagatcatcgtcgtgtgtttaactttaacgaatctaggttttattgaatctcgacatgtcggaggagaaagtcgtcgctgtgatcatggttggtggtccgaccaaaggaactcgatttcgcccgttatcgttcaatacaccgaaaccattgattcctttggctggtcaacctatgattcatcatcctatctctgcttgtaaaaagatatcaaatctggctcagatttttctgattggattttacgaggaacgagaatttgctttgtatgtgtcttcaatatctaacgagctgaaaattccagtgcgatacttgaaagaagataaaccccatggttcagctggtgctctttattactttcgtgatagaattatggaagagaaaccgtcacatgttttcctcctcaactgtgatgtttgctgttctttccctcttcaaggcatacttgacgcacatcgaagatatggtggtattggaactatgctagtaatcaaggtttctgcagaagcagctagccaatttggtgaattgatagctgatcctgatactaaagaactcctgcattatacagagaagcccgagactttcgtcagtgacttgataaactgtggtgtctatgtgtttacttcagatatcttcaatgcaattgaagaagtatatagccaaataagagacacatctagcaactaccaatccgctacaaggtctgttcctgcagattttgtgagattagatcaagatatattgtcacctcttgctggaaagaagcaactatacacatatgagaacaaggatttctgggaacagatcaagactccggggaaatctttgaaatgctcggctttatatctttcccaattccgcgaaacatcgcctcatattttagcttcaggagatggtactaataggaaaccaactataattggtgatgtttatattcacccatccgtaaaactgcatccaaccgcaaagatcggtccaaatgtgtcgatatcagcaaatgttcgtgttggacctggtgtaaggcttattagctgcataatcttagacgatgttgaaatcaaggagaatgctgttgttataaactcaattatcggatggaaatcttctataggtagatggtcaagagttcaagctagtggagattacaatgacaggcttgggattaccattcttggtgaggctgtaactgtggaagatgaagtagcagtcataggaagcattgttctccagaataagactcttaatgttagtgttcaagatgatatcatcttgtgatttatcacaatgattatcgtttggattttttttctttttaattgaaacagagaaacttttacagaattgtgtattacatgaattgagttcacaggattagattttgagtaagtgaaactatggaagatttgtaaactctcactgtactttgtgtttagatactaaaaagattttagaagaaagagttttaaaagatct

SEQ ID NO: 76958 - protein, 406 aa, Arabidopsis thaliana
  peptide (1)..(406): Ceres Seq. ID no. 12482197
  misc_feature (7)..(236): Pfam Name: Nucleotidyl transferase Pfam Description: Nucleotidyl transferase
  misc_feature (1)..(406): Homolog of NCBI NO: 22325477 NR Description: putative GDP-mannose pyrophosphorylase; protein At2g04650.1, supported by cDNA: gi_17064889 [Arabidopsis
  misc_feature (1)..(406): Homolog of NCBI NO: 17064890 NR Description: putative GDP-mannose pyrophosphorylase
  misc_feature (1)..(383): Homolog of NCBI NO: 25411099 NR Description: probable GDP-mannose pyrophosphorylase [imported]
  misc_feature (3)..(406): Homolog of NCBI NO: 5882732 NR Description: Similar to gb|AF135422 GDP-mannose A (GMPPA) from Homo sapiens. ESTs gb|AA712990, gb|N65247, gb|T04179, gb|Z38092, gb|T76473, gb|N96403, gb|AA394551 and
  misc_feature (3)..(406): Homolog of NCBI NO: 15222037 NR Description: putative GDP-mannose pyrophosphorylase; protein At1g74910.1, supported by cDNA: gi_13937223 [Arabidopsis
  misc_feature (3)..(360): Homolog of NCBI NO: 30699056 NR Description: ADP-glucose pyrophosphorylase family [Arabidopsis
  misc_feature (2)..(335): Homolog of NCBI NO: 26006499 NR Description: Putative GDP-mannose pyrophosphorylase [Oryza
  misc_feature (1)..(406): Homolog of NCBI NO: 28830182 NR Description: similar to Homo sapiens (Human). GDP-mannose
  misc_feature (8)..(406): Homolog of NCBI NO: 33416563 NR Description: Unknown (protein for MGC:66135) [Danio rerio]
  misc_feature (8)..(366): Homolog of NCBI NO: 19526884 NR Description: RIKEN cDNA 1810012N01 [Mus musculus]
MSEEKVVAVIMVGGPTKGTRFRPLSFNTPKPLIPLAGQPMIHHPISACKKISNLAQIFLIGFYEEREFALYVSSISNELKIPVRYLKEDKPHGSAGALYYFRDRIMEEKPSHVFLLNCDVCCSFPLQGILDAHRRYGGIGTMLVIKVSAEAASQFGELIADPDTKELLHYTEKPETFVSDLINCGVYVFTSDIFNAIEEVYSQIRDTSSNYQSATRSVPADFVRLDQDILSPLAGKKQLYTYENKDFWEQIKTPGKSLKCSALYLSQFRETSPHILASGDGTNRKPTIIGDVYIHPSVKLHPTAKIGPNVSISANVRVGPGVRLISCIILDDVEIKENAVVINSIIGWKSSIGRWSRVQASGDYNDRLGITILGEAVTVEDEVAVIGSIVLQNKTLNVSVQDDIIL

SEQ ID NO: 76959 - protein, 396 aa, Arabidopsis thaliana
  peptide (1)..(396): Ceres Seq. ID no. 12482198
  misc_feature (1)..(226): Pfam Name: Nucleotidyl transferase Pfam Description: Nucleotidyl transferase
  misc_feature (1)..(396): Homolog of NCBI NO: 22325477 NR Description: putative GDP-mannose pyrophosphorylase; protein At2g04650.1, supported by cDNA: gi_17064889 [Arabidopsis
  misc_feature (1)..(396): Homolog of NCBI NO: 17064890 NR Description: putative GDP-mannose pyrophosphorylase
  misc_feature (1)..(373): Homolog of NCBI NO: 25411099 NR Description: probable GDP-mannose pyrophosphorylase [imported]
  misc_feature (1)..(396): Homolog of NCBI NO: 5882732 NR Description: Similar to gb|AF135422 GDP-mannose A (GMPPA) from Homo sapiens. ESTs gb|AA712990, gb|N65247, gb|T04179, gb|Z38092, gb|T76473, gb|N96403, gb|AA394551 and
  misc_feature (1)..(396): Homolog of NCBI NO: 15222037 NR Description: putative GDP-mannose pyrophosphorylase; protein At1g74910.1, supported by cDNA: gi_13937223 [Arabidopsis
  misc_feature (1)..(350): Homolog of NCBI NO: 30699056 NR Description: ADP-glucose pyrophosphorylase family [Arabidopsis
  misc_feature (1)..(325): Homolog of NCBI NO: 26006499 NR Description: Putative GDP-mannose pyrophosphorylase [Oryza
  misc_feature (1)..(396): Homolog of NCBI NO: 28830182 NR Description: similar to Homo sapiens (Human). GDP-mannose
  misc_feature (1)..(396): Homolog of NCBI NO: 33416563 NR Description: Unknown (protein for MGC:66135) [Danio rerio]
  misc_feature (1)..(356): Homolog of NCBI NO: 19526884 NR Description: RIKEN cDNA 1810012N01 [Mus musculus]
MVGGPTKGTRFRPLSFNTPKPLIPLAGQPMIHHPISACKKISNLAQIFLIGFYEEREFALYVSSISNELKIPVRYLKEDKPHGSAGALYYFRDRIMEEKPSHVFLLNCDVCCSFPLQGILDAHRRYGGIGTMLVIKVSAEAASQFGELIADPDTKELLHYTEKPETFVSDLINCGVYVFTSDIFNAIEEVYSQIRDTSSNYQSATRSVPADFVRLDQDILSPLAGKKQLYTYENKDFWEQIKTPGKSLKCSALYLSQFRETSPHILASGDGTNRKPTIIGDVYIHPSVKLHPTAKIGPNVSISANVRVGPGVRLISCIILDDVEIKENAVVINSIIGWKSSIGRWSRVQASGDYNDRLGITILGEAVTVEDEVAVIGSIVLQNKTLNVSVQDDIIL

SEQ ID NO: 76960 - protein, 367 aa, Arabidopsis thaliana
  peptide (1)..(367): Ceres Seq. ID no. 12482199
  misc_feature (1)..(197): Pfam Name: Nucleotidyl transferase Pfam Description: Nucleotidyl transferase
  misc_feature (1)..(367): Homolog of NCBI NO: 22325477 NR Description: putative GDP-mannose pyrophosphorylase; protein At2g04650.1, supported by cDNA: gi_17064889 [Arabidopsis
  misc_feature (1)..(367): Homolog of NCBI NO: 17064890 NR Description: putative GDP-mannose pyrophosphorylase
  misc_feature (1)..(344): Homolog of NCBI NO: 25411099 NR Description: probable GDP-mannose pyrophosphorylase [imported]
  misc_feature (1)..(367): Homolog of NCBI NO: 5882732 NR Description: Similar to gb|AF135422 GDP-mannose A (GMPPA) from Homo sapiens. ESTs gb|AA712990, gb|N65247, gb|T04179, gb|Z38092, gb|T76473, gb|N96403, gb|AA394551 and
  misc_feature (1)..(367): Homolog of NCBI NO: 15222037 NR Description: putative GDP-mannose pyrophosphorylase; protein At1g74910.1, supported by cDNA: gi_13937223 [Arabidopsis
  misc_feature (1)..(321): Homolog of NCBI NO: 30699056 NR Description: ADP-glucose pyrophosphorylase family [Arabidopsis
  misc_feature (1)..(296): Homolog of NCBI NO: 26006499 NR Description: Putative GDP-mannose pyrophosphorylase [Oryza
  misc_feature (1)..(367): Homolog of NCBI NO: 28830182 NR Description: similar to Homo sapiens (Human). GDP-mannose
  misc_feature (1)..(367): Homolog of NCBI NO: 33416563 NR Description: Unknown (protein for MGC:66135) [Danio rerio]
  misc_feature (1)..(327): Homolog of NCBI NO: 19526884 NR Description: RIKEN cDNA 1810012N01 [Mus musculus]
MIHHPISACKKISNLAQIFLIGFYEEREFALYVSSISNELKIPVRYLKEDKPHGSAGALYYFRDRIMEEKPSHVFLLNCDVCCSFPLQGILDAHRRYGGIGTMLVIKVSAEAASQFGELIADPDTKELLHYTEKPETFVSDLINCGVYVFTSDIFNAIEEVYSQIRDTSSNYQSATRSVPADFVRLDQDILSPLAGKKQLYTYENKDFWEQIKTPGKSLKCSALYLSQFRETSPHILASGDGTNRKPTIIGDVYIHPSVKLHPTAKIGPNVSISANVRVGPGVRLISCIILDDVEIKENAVVINSIIGWKSSIGRWSRVQASGDYNDRLGITILGEAVTVEDEVAVIGSIVLQNKTLNVSVQDDIIL

SEQ ID NO: 76961 - DNA, 772 bp, Arabidopsis thaliana
  misc_feature (1)..(772): Ceres Seq. ID no. 12482211
  misc_feature: MA Experiment ID: 20000184 Result: Down-regulated in Transcription
  misc_feature: MA Experiment 20000184 PARAMETER Experiment Name: At_Shoots__P Parameter: Age (day) Value: 7
  misc_feature: MA Experiment 20000184 PARAMETER Experiment Name: At_Shoots__P Parameter: Tissue Value: Shoots vs. Whole Plant
  misc_feature: MA Experiment ID: 20000185 Result: Up-regulated in Transcription
  misc_feature: MA Experiment 20000185 PARAMETER Experiment Name: At_Roots__P Parameter: Age (day) Value: 7 vs. 21
  misc_feature: MA Experiment 20000185 PARAMETER Experiment Name: At_Roots__P Parameter: Organism Value: A. thaliana
  misc_feature: MA Experiment 20000185 PARAMETER Experiment Name: At_Roots__P Parameter: Tissue Value: Roots vs. Whole Plant
  misc_feature: MA Experiment ID: 20000495 Result: Up-regulated in Transcription
  misc_feature: MA Experiment 20000495 PARAMETER Experiment Name: At_Guard_Cells_P Parameter: Harvest Date Value: 8/2/2002
  misc_feature: MA Experiment 20000495 PARAMETER Experiment Name: At_Guard_Cells_P Parameter: Organism Value: A. thaliana
  misc_feature: MA Experiment 20000495 PARAMETER Experiment Name: At_Guard_Cells_P Parameter: Tissue Value: Guard Cells vs. Leaves
  misc_feature: MA Experiment ID: 20001451 Result: Up-regulated in Transcription
  misc_feature: MA Experiment 20001451 PARAMETER Experiment Name: At_Far-red-induction_P Parameter: Age (day) Value: 7
  misc_feature: MA Experiment 20001451 PARAMETER Experiment Name: At_Far-red-induction_P Parameter: Light Value: Far-red vs. White
  misc_feature: MA Experiment 20001451 PARAMETER Experiment Name: At_Far-red-induction_P Parameter: Organism Value: A. thaliana
  misc_feature: MA Experiment 20001451 PARAMETER Experiment Name: At_Far-red-induction_P Parameter: Plant Line Value: Columbia
  misc_feature: MA Experiment 20001451 PARAMETER Experiment Name: At_Far-red-induction_P Parameter: Timepoint (hr) Value: 24
  misc_feature: MA Experiment 20001451 PARAMETER Experiment Name: At_Far-red-induction_P Parameter: Tissue Value: Whole Plant
  misc_feature: Pfam Name: UQ_con Pfam Description: Ubiquitin-conjugating enzyme
agacaaagtaaggaggccagatagcagacccgtctctctccgtctccgtctccgtctccgccatgaccagctcttccgctccttcacgcaaggctttaagcaagatcgcgtgtaataggttgcagaaagagctttctgagtggcaattgaatcccccctctggatttcgtcacaaagtcactgataatcttcaaaaatggacaatagatgttaccggagctccagggacgctttacgctaatgagacttatcagcttcaggttgaatttcctgaacattaccctatggaagcaccccaggtagtgtttgtttctccggcaccttcacatccacatatttacagcaatggacatatttgtttagatattctatatgactcatggtcaccagcaatgacagtgaattcagtctgcatcagcattctttcgatgctatcaagttcacccgcaaagcaacgccctgcggataacgatcgttatgtgaagaactgtaagaatgggaggtctcctaaggagacgaggtggtggttccatgacgacaaggtttgatgcaccaccaagattaaagagaagcctttatatgttaatgatgacatttaaaaatgtcaaaacctaactttttgtctcactcttactgtggaatatgtcaagtgaagagctctgaattatataagagaacactgagagccggaatctacatttcgtactgaacatgtgcacaaaaagattaattaatgctaaacaataagttgtcattaatgccaatagttatt

SEQ ID NO: 76962 - protein, 161 aa, Arabidopsis thaliana
  peptide (1)..(161): Ceres Seq. ID no. 12482212
  misc_feature: Pfam Name: UQ_con Pfam Description: Ubiquitin-conjugating enzyme
  misc_feature (1)..(161): Homolog of NCBI NO: 481811 NR Description: ubiquitin-conjugating enzyme UBC2-1 - Arabidopsis
  misc_feature (1)..(161): Homolog of NCBI NO: 18401461 NR Description: E2, ubiquitin-conjugating enzyme 15 (UBC15);
  misc_feature (1)..(161): Homolog of NCBI NO: 18422281 NR Description: E2, ubiquitin-conjugating enzyme 18 (UBC18); id: At5g42990.1, supported by cDNA: gi_16648721, supported by gi_20856299 [Arabidopsis thaliana] >gi|9758588|dbj|BAB09201.1|
  misc_feature (1)..(161): Homolog of NCBI NO: 18410856 NR Description: E2, ubiquitin-conjugating enzyme 16 (UBC16); id: At1g75440.1, supported by cDNA: gi_17529345, supported by
  misc_feature (1)..(161): Homolog of NCBI NO: 2801444 NR Description: ubiquitin-conjugating enzyme 16 [Arabidopsis
  misc_feature (1)..(161): Homolog of NCBI NO: 4090259 NR Description: ubiquitin-conjugating enzyme E2 [Pseudotsuga
  misc_feature (1)..(161): Homolog of NCBI NO: 18419831 NR Description: E2, ubiquitin-conjugating enzyme 17 (UBC17); id: At4g36410.1, supported by cDNA: 40968., supported by cDNA:
  misc_feature (1)..(130): Homolog of NCBI NO: 34897008 NR Description: putative ubiquitin-conjugating enzyme E2 [Oryza
  misc_feature (1)..(102): Homolog of NCBI NO: 25293672 NR Description: protein F27F5.13 [imported] - Arabidopsis >gi|7767660|gb|AAF69157.1|AC007915_9 F27F5.13 [Arabidopsis
  misc_feature (65)..(161): Homolog of NCBI NO: 25293670 NR Description: ubiquitin-conjugating enzyme 18 [imported] -
MTSSSAPSRKALSKIACNRLQKELSEWQLNPPSGFRHKVTDNLQKWTIDVTGAPGTLYANETYQLQVEFPEHYPMEAPQVVFVSPAPSHPHIYSNGHICLDILYDSWSPAMTVNSVCISILSMLSSSPAKQRPADNDRYVKNCKNGRSPKETRWWFHDDKV

SEQ ID NO: 76963 - protein, 87 aa, Arabidopsis thaliana
  peptide (1)..(87): Ceres Seq. ID no. 12482213
  misc_feature: Pfam Name: UQ_con Pfam Description: Ubiquitin-conjugating enzyme
  misc_feature (1)..(87): Homolog of NCBI NO: 481811 NR Description: ubiquitin-conjugating enzyme UBC2-1 - Arabidopsis
  misc_feature (1)..(87): Homolog of NCBI NO: 18401461 NR Description: E2, ubiquitin-conjugating enzyme 15 (UBC15);
  misc_feature (1)..(87): Homolog of NCBI NO: 18422281 NR Description: E2, ubiquitin-conjugating enzyme 18 (UBC18); id: At5g42990.1, supported by cDNA: gi_16648721, supported by gi_20856299 [Arabidopsis thaliana] >gi|9758588|dbj|BAB09201.1|
  misc_feature (1)..(87): Homolog of NCBI NO: 18410856 NR Description: E2, ubiquitin-conjugating enzyme 16 (UBC16); id: At1g75440.1, supported by cDNA: gi_17529345, supported by
  misc_feature (1)..(87): Homolog of NCBI NO: 2801444 NR Description: ubiquitin-conjugating enzyme 16 [Arabidopsis
  misc_feature (1)..(87): Homolog of NCBI NO: 4090259 NR Description: ubiquitin-conjugating enzyme E2 [Pseudotsuga
  misc_feature (1)..(87): Homolog of NCBI NO: 18419831 NR Description: E2, ubiquitin-conjugating enzyme 17 (UBC17); id: At4g36410.1, supported by cDNA: 40968., supported by cDNA:
  misc_feature (1)..(56): Homolog of NCBI NO: 34897008 NR Description: putative ubiquitin-conjugating enzyme E2 [Oryza
  misc_feature (1)..(28): Homolog of NCBI NO: 25293672 NR Description: protein F27F5.13 [imported] - Arabidopsis >gi|7767660|gb|AAF69157.1|AC007915_9 F27F5.13 [Arabidopsis
  misc_feature (1)..(87): Homolog of NCBI NO: 25293670 NR Description: ubiquitin-conjugating enzyme 18 [imported] -
MEAPQVVFVSPAPSHPHIYSNGHICLDILYDSWSPAMTVNSVCISILSMLSSSPAKQRPADNDRYVKNCKNGRSPKETRWWFHDDKV

SEQ ID NO: 76964 - DNA, 1834 bp, Arabidopsis thaliana
  misc_feature (1)..(1834): Ceres Seq. ID no. 12482247
  misc_feature: MA Experiment ID: 20000306 Result: Up-regulated in Transcription
  misc_feature: MA Experiment 20000306 PARAMETER Experiment Name: At_Germinating_Seeds_Sub_P Parameter: Age (hr) Value: 6 vs. 0
  misc_feature: MA Experiment 20000306 PARAMETER Experiment Name: At_Germinating_Seeds_Sub_P Parameter: Organism Value: A. thaliana
  misc_feature: MA Experiment 20000306 PARAMETER Experiment Name: At_Germinating_Seeds_Sub_P Parameter: Plant Line Value: WS
  misc_feature: MA Experiment 20000306 PARAMETER Experiment Name: At_Germinating_Seeds_Sub_P Parameter: Tissue Value: Germinating Seeds
  misc_feature: MA Experiment ID: 20000307 Result: Up-regulated in Transcription
  misc_feature: MA Experiment 20000307 PARAMETER Experiment Name: At_Germinating_Seeds_Sub_P Parameter: Age (hr) Value: 24 vs. 0
  misc_feature: MA Experiment 20000307 PARAMETER Experiment Name: At_Germinating_Seeds_Sub_P Parameter: Organism Value: A. thaliana
  misc_feature: MA Experiment 20000307 PARAMETER Experiment Name: At_Germinating_Seeds_Sub_P Parameter: Plant Line Value: WS
  misc_feature: MA Experiment 20000307 PARAMETER Experiment Name: At_Germinating_Seeds_Sub_P Parameter: Tissue Value: Germinating Seeds
  misc_feature: MA Experiment ID: 20000315 Result: Up-regulated in Transcription
  misc_feature: MA Experiment 20000315 PARAMETER Experiment Name: At_14day_Shoots-Roots_Sub_P Parameter: Age (day) Value: 14
  misc_feature: MA Experiment 20000315 PARAMETER Experiment Name: At_14day_Shoots-Roots_Sub_P Parameter: Organism Value: A. thaliana
  misc_feature: MA Experiment 20000315 PARAMETER Experiment Name: At_14day_Shoots-Roots_Sub_P Parameter: Plant Line Value: WS
  misc_feature: MA Experiment 20000315 PARAMETER Experiment Name: At_14day_Shoots-Roots_Sub_P Parameter: Tissue Value: Shoots vs. Whole Plant
  misc_feature: MA Experiment ID: 20000347 Result: Up-regulated in Transcription
  misc_feature: MA Experiment 20000347 PARAMETER Experiment Name: At_2mM_SA_Sub_P Parameter: Age (day) Value: 14
  misc_feature: MA Experiment 20000347 PARAMETER Experiment Name: At_2mM_SA_Sub_P Parameter: Organism Value: A. thaliana
  misc_feature: MA Experiment 20000347 PARAMETER Experiment Name: At_2mM_SA_Sub_P Parameter: Plant Line Value: WS
  misc_feature: MA Experiment 20000347 PARAMETER Experiment Name: At_2mM_SA_Sub_P Parameter: Timepoint (hr) Value: 6
  misc_feature: MA Experiment 20000347 PARAMETER Experiment Name: At_2mM_SA_Sub_P Parameter: Tissue Value: Aerial
  misc_feature: MA Experiment 20000347 PARAMETER Experiment Name: At_2mM_SA_Sub_P Parameter: Treatment Value: 2mM SA vs. No Treatment
  misc_feature: MA Experiment ID: 20000355 Result: Up-regulated in Transcription
  misc_feature: MA Experiment 20000355 PARAMETER Experiment Name: At_Siliques_Sub_P Parameter: Age (day) Value: 21
  misc_feature: MA Experiment 20000355 PARAMETER Experiment Name: At_Siliques_Sub_P Parameter: Organism Value: A. thaliana
  misc_feature: MA Experiment 20000355 PARAMETER Experiment Name: At_Siliques_Sub_P Parameter: Plant Line Value: WS
  misc_feature: MA Experiment 20000355 PARAMETER Experiment Name: At_Siliques_Sub_P Parameter: Tissue Value: Less Than 5mm Siliques vs. Whole Plant
gtaatttagctttcacaacaaaaaaactcttttctttttgtctgctcgtttttcttttcataatgggagccttggaagcagaaagagccgccaacaatgccacggcgttagagacacagtcgtcaccggaagatctcagtcaaccatctcctctgcgtaagatcatctccgtcgcttcaatcgccgccggtgtacagttcgggtgggccttacagctttctcttctgactccttacatacaactcctcgggatccctcacaaatggtcgtcttacatgtggctttgtggtcctatctccggcatgattgttcaaccgatcgtcggttaccacagtgaccgatgcgagtccagattcggtcgccgtcgtcctttcattgccgccggagtcgcactcgtagccgtctcggttttccttatcggattcgcggcggatatgggacatagttttggagataaactcgagaacaaggtaaggactcgagccattataatcttcctaaccgggttttggttcctcgacgtggctaacaacaccttacaaggaccatgccgtgctttcttagccgatttagccgccggagacgctaaaaaaacgcgagtcgcaaacgcgtgtttctccttctttatggcggttggaaacgttttgggttacgctgctggatcttacactaaccttcacaaaatgtttcctttcacaatgacaaaagcttgcgacatctattgtgcgaatctcaagacttgtttcttcttatccatcactctcctccttatcgtcacattctcgtctctatggtacgttaaagacaaacaatggtctccacctcaaggagacaaggaggagaaaacatcaagtctttttttctttggagaaatctttggagctgttagacacatgaaacgtcccatggtgatgcttctaattgtcacggtcattaattggatcgcttggtttccatttattttgtatgataccgattggatgggtcgtgaagtgtacggtggaaactcagatggagatgaacgatcgaagaaactttacgaccaaggagttcaggctggtgcattgggattgatgtttaattctatacttcttggtttcgtgtcacttggtgttgaatcgattggtcggaaaatgggaggagctaaacgactatggggatgtgtgaatttcatactcgccataggtttggccatgacggttcttgttactaaatcggctgagcatcaccgggaaatcgccggtcctttagccggaccaagcagtggtattaaagccggagtatttagtctctttaccgttcttggtatcccattggccattacttacagtattccatttgcactagcgtccattttctcaaccaattccggtgccggccaaggactttcattaggcgttttaaatatagcaatatgtataccacaaatgatagtatcattctcaagtggaccattggacgctcaattcggcggtggaaacctaccttcatttgtggtcggagcaattgccgcggcgattagtggagtcttagcgttaaccgttttaccttcaccgcctccggacgcaccagccatgtcaggggctatgtgattccattagttaactagtttatatatatatatatatatatatatatatatatatatgaatttccatctaatacagtattgttgtgcaaaagtgaaacccccaaaaaatggataaagtgagaaaaataaaccttggtcgtctgtcttttactgttctttagttttttttttttttttacttttgttattgatgttagtcaatttgttttcgttttgtttggacgttaataaattctgtgtttg

SEQ ID NO: 76965 - protein, 529 aa, Arabidopsis thaliana
  peptide (1)..(529): Ceres Seq. ID no. 12482248
  misc_feature (54)..(492): Pfam Name: Sugar (and other) transporter Pfam Description: Sugar (and other) transporter
  misc_feature (21)..(529): Homolog of NCBI NO: 15217602 NR Description: putative sucrose transport protein; protein id: [Arabidopsis thaliana] >gi|25344713|pir||F96741 probable sucrose
  misc_feature (21)..(529): Homolog of NCBI NO: 12057172 NR Description: sucrose trasporter [Arabidopsis thaliana]
  misc_feature (21)..(529): Homolog of NCBI NO: 15217601 NR Description: sucrose transport protein SUC1; protein id: supported by cDNA: gi_15146267 [Arabidopsis thaliana]
  misc_feature (21)..(529): Homolog of NCBI NO: 18091779 NR Description: sucrose transporter SUC1 [Brassica oleracea]
  misc_feature (27)..(529): Homolog of NCBI NO: 15219938 NR Description: putative sucrose transport protein, SUC2; protein At1g22710.1, supported by cDNA: 7894., supported by cDNA: supported by cDNA: gi_15293104, supported by cDNA: gi_20147212,
  misc_feature (27)..(529): Homolog of NCBI NO: 481131 NR Description: sucrose transport protein SUC2 - Arabidopsis
  misc_feature (27)..(529): Homolog of NCBI NO: 20147213 NR Description: At1g22710/T22J18_12 [Arabidopsis thaliana]
  misc_feature (27)..(529): Homolog of NCBI NO: 18091781 NR Description: sucrose transporter SUC2 [Brassica oleracea]
  misc_feature (28)..(516): Homolog of NCBI NO: 15225986 NR Description: putative sucrose-proton symporter; protein id:
  misc_feature (21)..(516): Homolog of NCBI NO: 15239921 NR Description: sucrose transporter protein; protein id: [Arabidopsis thaliana] >gi|10178200|dbj|BAB11624.1| sucrose
NLAFTTKKLFSFCLLVFLFIMGALEAERAANNATALETQSSPEDLSQPSPLRKIISVASIAAGVQFGWALQLSLLTPYIQLLGIPHKWSSYMWLCGPISGMIVQPIVGYHSDRCESRFGRRRPFIAAGVALVAVSVFLIGFAADMGHSFGDKLENKVRTRAIIIFLTGFWFLDVANNTLQGPCRAFLADLAAGDAKKTRVANACFSFFMAVGNVLGYAAGSYTNLHKMFPFTMTKACDIYCANLKTCFFLSITLLLIVTFSSLWYVKDKQWSPPQGDKEEKTSSLFFFGEIFGAVRHMKRPMVMLLIVTVINWIAWFPFILYDTDWMGREVYGGNSDGDERSKKLYDQGVQAGALGLMFNSILLGFVSLGVESIGRKMGGAKRLWGCVNFILAIGLAMTVLVTKSAEHHREIAGPLAGPSSGIKAGVFSLFTVLGIPLAITYSIPFALASIFSTNSGAGQGLSLGVLNIAICIPQMIVSFSSGPLDAQFGGGNLPSFVVGAIAAAISGVLALTVLPSPPPDAPAMSGAM

SEQ ID NO: 76966 - protein, 509 aa, Arabidopsis thaliana
  peptide (1)..(509): Ceres Seq. ID no. 12482249
  misc_feature (34)..(472): Pfam Name: Sugar (and other) transporter Pfam Description: Sugar (and other) transporter
  misc_feature (1)..(509): Homolog of NCBI NO: 15217602 NR Description: putative sucrose transport protein; protein id: [Arabidopsis thaliana] >gi|25344713|pir||F96741 probable sucrose
  misc_feature (1)..(509): Homolog of NCBI NO: 12057172 NR Description: sucrose trasporter [Arabidopsis thaliana]
  misc_feature (1)..(509): Homolog of NCBI NO: 15217601 NR Description: sucrose transport protein SUC1; protein id: supported by cDNA: gi_15146267 [Arabidopsis thaliana]
  misc_feature (1)..(509): Homolog of NCBI NO: 18091779 NR Description: sucrose transporter SUC1 [Brassica oleracea]
  misc_feature (7)..(509): Homolog of NCBI NO: 15219938 NR Description: putative sucrose transport protein, SUC2; protein At1g22710.1, supported by cDNA: 7894., supported by cDNA: supported by cDNA: gi_15293104, supported by cDNA: gi_20147212,
  misc_feature (7)..(509): Homolog of NCBI NO: 481131 NR Description: sucrose transport protein SUC2 - Arabidopsis
  misc_feature (7)..(509): Homolog of NCBI NO: 20147213 NR Description: At1g22710/T22J18_12 [Arabidopsis thaliana]
  misc_feature (7)..(509): Homolog of NCBI NO: 18091781 NR Description: sucrose transporter SUC2 [Brassica oleracea]
  misc_feature (8)..(496): Homolog of NCBI NO: 15225986 NR Description: putative sucrose-proton symporter; protein id:
  misc_feature (1)..(496): Homolog of NCBI NO: 15239921 NR Description: sucrose transporter protein; protein id: [Arabidopsis thaliana] >gi|10178200|dbj|BAB11624.1| sucrose
MGALEAERAANNATALETQSSPEDLSQPSPLRKIISVASIAAGVQFGWALQLSLLTPYIQLLGIPHKWSSYMWLCGPISGMIVQPIVGYHSDRCESRFGRRRPFIAAGVALVAVSVFLIGFAADMGHSFGDKLENKVRTRAIIIFLTGFWFLDVANNTLQGPCRAFLADLAAGDAKKTRVANACFSFFMAVGNVLGYAAGSYTNLHKMFPFTMTKACDIYCANLKTCFFLSITLLLIVTFSSLWYVKDKQWSPPQGDKEEKTSSLFFFGEIFGAVRHMKRPMVMLLIVTVINWIAWFPFILYDTDWMGREVYGGNSDGDERSKKLYDQGVQAGALGLMFNSILLGFVSLGVESIGRKMGGAKRLWGCVNFILAIGLAMTVLVTKSAEHHREIAGPLAGPSSGIKAGVFSLFTVLGIPLAITYSIPFALASIFSTNSGAGQGLSLGVLNIAICIPQMIVSFSSGPLDAQFGGGNLPSFVVGAIAAAISGVLALTVLPSPPPDAPAMSGAM

SEQ ID NO: 76967 - protein, 438 aa, Arabidopsis thaliana
  peptide (1)..(438): Ceres Seq. ID no. 12482250
  misc_feature (1)..(401): Pfam Name: Sugar (and other) transporter Pfam Description: Sugar (and other) transporter
  misc_feature (1)..(438): Homolog of NCBI NO: 15217602 NR Description: putative sucrose transport protein; protein id: [Arabidopsis thaliana] >gi|25344713|pir||F96741 probable sucrose
  misc_feature (1)..(438): Homolog of NCBI NO: 12057172 NR Description: sucrose trasporter [Arabidopsis thaliana]
  misc_feature (1)..(438): Homolog of NCBI NO: 15217601 NR Description: sucrose transport protein SUC1; protein id: supported by cDNA: gi_15146267 [Arabidopsis thaliana]
  misc_feature (1)..(438): Homolog of NCBI NO: 18091779 NR Description: sucrose transporter SUC1 [Brassica oleracea]
  misc_feature (1)..(438): Homolog of NCBI NO: 15219938 NR Description: putative sucrose transport protein, SUC2; protein At1g22710.1, supported by cDNA: 7894., supported by cDNA: supported by cDNA: gi_15293104, supported by cDNA: gi_20147212,
  misc_feature (1)..(438): Homolog of NCBI NO: 481131 NR Description: sucrose transport protein SUC2 - Arabidopsis
  misc_feature (1)..(438): Homolog of NCBI NO: 20147213 NR Description: At1g22710/T22J18_12 [Arabidopsis thaliana]
  misc_feature (1)..(438): Homolog of NCBI NO: 18091781 NR Description: sucrose transporter SUC2 [Brassica oleracea]
  misc_feature (1)..(425): Homolog of NCBI NO: 15225986 NR Description: putative sucrose-proton symporter; protein id:
  misc_feature (1)..(425): Homolog of NCBI NO: 15239921 NR Description: sucrose transporter protein; protein id: [Arabidopsis thaliana] >gi|10178200|dbj|BAB11624.1| sucrose
MWLCGPISGMIVQPIVGYHSDRCESRFGRRRPFIAAGVALVAVSVFLIGFAADMGHSFGDKLENKVRTRAIIIFLTGFWFLDVANNTLQGPCRAFLADLAAGDAKKTRVANACFSFFMAVGNVLGYAAGSYTNLHKMFPFTMTKACDIYCANLKTCFFLSITLLLIVTFSSLWYVKDKQWSPPQGDKEEKTSSLFFFGEIFGAVRHMKRPMVMLLIVTVINWIAWFPFILYDTDWMGREVYGGNSDGDERSKKLYDQGVQAGALGLMFNSILLGFVSLGVESIGRKMGGAKRLWGCVNFILAIGLAMTVLVTKSAEHHREIAGPLAGPSSGIKAGVFSLFTVLGIPLAITYSIPFALASIFSTNSGAGQGLSLGVLNIAICIPQMIVSFSSGPLDAQFGGGNLPSFVVGAIAAAISGVLALTVLPSPPPDAPAMSGAM

SEQ ID NO: 76968 - DNA, 1649 bp, Arabidopsis thaliana
  misc_feature (1)..(1649): Ceres Seq. ID no. 12482269
cgccttatgaatctctctatcgcggtttcattagattcagtttaactcgagtgatgaaaccaatctccgtgctagagctctttgatcccgtggctggtaggatattacggcgtttgtagctctgtcgtcgtggatagagttagaacgacgaaatcagccttggtttcctaactgtatctgaatttttgcaacaatgtctgagctaaaagagcgcctgcttcctccaagacctgcttcagctatgaacctcagagatgcttctgtgactcggccttctgcttctggaagaccaccccttcttggagttgatgtcttgggtctgaagaagcgtggacaaggcctacgctcttggattcgtgttgatacttctggtaatactcaggtcatggaggttgacaagttcactatgatgcgtaggtgtgacttacccgcccgtgatttaaggctgcttgatcccttattcgtgtatccctctactatcctaggccgagagaaggctattgttgtcaacttagagcagatccgttgtattattactgcagacgaagttctgcttctgaattcccttgacaactacgtgctgcgctatgttgttgagttgcagcagagactaaagactagtagtgtaggtgagatgtggcagcaggaaaattcccagttgagtaggaggaggagcaggagttttgacaatgcttttgagaattcatcccctgattatttacctttcgagtttagagctcttgaaatagcccttgaagctgcttgtacgtttctcgattcccaggcttcagagttggagattgaggcatacccgttattagatgagcttacctcaaagatcagtacactaaacttggagcgtgtgcgtagactaaagagcaggcttgtagcactgacaagaagagttcagaaggttcgggatgagatcgagcagctaatggatgatgatggagatatggcagaaatgtatctaacagagaagaagaggagaatggaaggatctatgtacggtgaccagtccttattgggttacaggtcaaatgatggtctatctgtttctgcaccggtgtctcctgtttcttctccacctgattcccgaagacttgataaaagcttgagcattgcgaggagtcggcatgacagtgcaaggagttctgaaggtgcagagaatatagaagagctagagatgttgctggaagcttactttgtcgtcattgatagtactctaaacaagttgacatcgttaaaggagtacattgatgacactgaagatttcattaacattcaactggataatgtgcggaatcagctgatccagttcgagttgcttctgacgactgcaacgtttgttgtagccatatttggggtcgttgctgggatctttgggatgaactttgagatagacttcttcaatcagccaggtgcattcagatgggtactcataattactggagtatgtggctttgtgatattttcggcattcgtctggttcttcaagtacagaagactcatgcctctataagaagagagacatgaatgtgctccccagaaagtagacatcaacttatattgttatgttgcttacagatattaatgatttgtttcctttacacaatggaatcttgggaatttttatcataggcattgtc

SEQ ID NO: 76969 - protein, 442 aa, Arabidopsis thaliana
  peptide (1)..(442): Ceres Seq. ID no. 12482270
  misc_feature (1)..(442): Homolog of NCBI NO: 18394312 NR Description: expressed protein; protein id: At1g16010.1, by cDNA: gi_15451153, supported by cDNA: gi_20148402 [Arabidopsis
  misc_feature (1)..(442): Homolog of NCBI NO: 21553824 NR Description: unknown [Arabidopsis thaliana]
  misc_feature (1)..(442): Homolog of NCBI NO: 18412911 NR Description: expressed protein; protein id: At1g80900.1, by cDNA: 17164. [Arabidopsis thaliana] >gi|25352404|pir||H96841
  misc_feature (174)..(442): Homolog of NCBI NO: 38345033 NR Description: OSJNBa0029H02.17 [Oryza sativa (japonica
  misc_feature (5)..(140): Homolog of NCBI NO: 38345033 NR Description: OSJNBa0029H02.17 [Oryza sativa (japonica
  misc_feature (311)..(440): Homolog of NCBI NO: 30685422 NR Description: expressed protein [Arabidopsis thaliana]
  misc_feature (152)..(270): Homolog of NCBI NO: 30685422 NR Description: expressed protein [Arabidopsis thaliana]
  misc_feature (42)..(140): Homolog of NCBI NO: 30685422 NR Description: expressed protein [Arabidopsis thaliana]
  misc_feature (1)..(440): Homolog of NCBI NO: 18411070 NR Description: putative protein; protein id: At3g58970.1, by cDNA: gi_16209701 [Arabidopsis thaliana] AT3g58970/F17J16_20 [Arabidopsis thaliana]
  misc_feature (114)..(442): Homolog of NCBI NO: 15227679 NR Description: hypothetical protein; protein id: At2g03620.1, by cDNA: gi_17979300, supported by cDNA: gi_20336656, supported cDNA: gi_20465990 [Arabidopsis thaliana] >gi|25352407|pir||F84450
MSELKERLLPPRPASAMNLRDASVTRPSASGRPPLLGVDVLGLKKRGQGLRSWIRVDTSGNTQVMEVDKFTMMRRCDLPARDLRLLDPLFVYPSTILGREKAIVVNLEQIRCIITADEVLLLNSLDNYVLRYVVELQQRLKTSSVGEMWQQENSQLSRRRSRSFDNAFENSSPDYLPFEFRALEIALEAACTFLDSQASELEIEAYPLLDELTSKISTLNLERVRRLKSRLVALTRRVQKVRDEIEQLMDDDGDMAEMYLTEKKRRMEGSMYGDQSLLGYRSNDGLSVSAPVSPVSSPPDSRRLDKSLSIARSRHDSARSSEGAENIEELEMLLEAYFVVIDSTLNKLTSLKEYIDDTEDFINIQLDNVRNQLIQFELLLTTATFVVAIFGVVAGIFGMNFEIDFFNQPGAFRWVLIITGVCGFVIFSAFVWFFKYRRLMPL

SEQ ID NO: 76970 - protein, 426 aa, Arabidopsis thaliana
  peptide (1)..(426): Ceres Seq. ID no. 12482271
  misc_feature (1)..(426): Homolog of NCBI NO: 18394312 NR Description: expressed protein; protein id: At1g16010.1, by cDNA: gi_15451153, supported by cDNA: gi_20148402 [Arabidopsis
  misc_feature (1)..(426): Homolog of NCBI NO: 21553824 NR Description: unknown [Arabidopsis thaliana]
  misc_feature (1)..(426): Homolog of NCBI NO: 18412911 NR Description: expressed protein; protein id: At1g80900.1, by cDNA: 17164. [Arabidopsis thaliana] >gi|25352404|pir||H96841
  misc_feature (158)..(426): Homolog of NCBI NO: 38345033 NR Description: OSJNBa0029H02.17 [Oryza sativa (japonica
  misc_feature (1)..(124): Homolog of NCBI NO: 38345033 NR Description: OSJNBa0029H02.17 [Oryza sativa (japonica
  misc_feature (295)..(424): Homolog of NCBI NO: 30685422 NR Description: expressed protein [Arabidopsis thaliana]
  misc_feature (136)..(254): Homolog of NCBI NO: 30685422 NR Description: expressed protein [Arabidopsis thaliana]
  misc_feature (26)..(124): Homolog of NCBI NO: 30685422 NR Description: expressed protein [Arabidopsis thaliana]
  misc_feature (1)..(424): Homolog of NCBI NO: 18411070 NR Description: putative protein; protein id: At3g58970.1, by cDNA: gi_16209701 [Arabidopsis thaliana] AT3g58970/F17J16_20 [Arabidopsis thaliana]
  misc_feature (98)..(426): Homolog of NCBI NO: 15227679 NR Description: hypothetical protein; protein id: At2g03620.1, by cDNA: gi_17979300, supported by cDNA: gi_20336656, supported cDNA: gi_20465990 [Arabidopsis thaliana] >gi|25352407|pir||F84450
MNLRDASVTRPSASGRPPLLGVDVLGLKKRGQGLRSWIRVDTSGNTQVMEVDKFTMMRRCDLPARDLRLLDPLFVYPSTILGREKAIVVNLEQIRCIITADEVLLLNSLDNYVLRYVVELQQRLKTSSVGEMWQQENSQLSRRRSRSFDNAFENSSPDYLPFEFRALEIALEAACTFLDSQASELEIEAYPLLDELTSKISTLNLERVRRLKSRLVALTRRVQKVRDEIEQLMDDDGDMAEMYLTEKKRRMEGSMYGDQSLLGYRSNDGLSVSAPVSPVSSPPDSRRLDKSLSIARSRHDSARSSEGAENIEELEMLLEAYFVVIDSTLNKLTSLKEYIDDTEDFINIQLDNVRNQLIQFELLLTTATFVVAIFGVVAGIFGMNFEIDFFNQPGAFRWVLIITGVCGFVIFSAFVWFFKYRRLMPL

SEQ ID NO: 76971 - protein, 378 aa, Arabidopsis thaliana
  peptide (1)..(378): Ceres Seq. ID no. 12482272
  misc_feature (1)..(378): Homolog of NCBI NO: 18394312 NR Description: expressed protein; protein id: At1g16010.1, by cDNA: gi_15451153, supported by cDNA: gi_20148402 [Arabidopsis
  misc_feature (1)..(378): Homolog of NCBI NO: 21553824 NR Description: unknown [Arabidopsis thaliana]
  misc_feature (1)..(378): Homolog of NCBI NO: 18412911 NR Description: expressed protein; protein id: At1g80900.1, by cDNA: 17164. [Arabidopsis thaliana] >gi|25352404|pir||H96841
  misc_feature (110)..(378): Homolog of NCBI NO: 38345033 NR Description: OSJNBa0029H02.17 [Oryza sativa (japonica
  misc_feature (1)..(76): Homolog of NCBI NO: 38345033 NR Description: OSJNBa0029H02.17 [Oryza sativa (japonica
  misc_feature (247)..(376): Homolog of NCBI NO: 30685422 NR Description: expressed protein [Arabidopsis thaliana]
  misc_feature (88)..(206): Homolog of NCBI NO: 30685422 NR Description: expressed protein [Arabidopsis thaliana]
  misc_feature (1)..(76): Homolog of NCBI NO: 30685422 NR Description: expressed protein [Arabidopsis thaliana]
  misc_feature (1)..(376): Homolog of NCBI NO: 18411070 NR Description: putative protein; protein id: At3g58970.1, by cDNA: gi_16209701 [Arabidopsis thaliana] AT3g58970/F17J16_20 [Arabidopsis thaliana]
  misc_feature (50)..(378): Homolog of NCBI NO: 15227679 NR Description: hypothetical protein; protein id: At2g03620.1, by cDNA: gi_17979300, supported by cDNA: gi_20336656, supported cDNA: gi_20465990 [Arabidopsis thaliana] >gi|25352407|pir||F84450
MEVDKFTMMRRCDLPARDLRLLDPLFVYPSTILGREKAIVVNLEQIRCIITADEVLLLNSLDNYVLRYVVELQQRLKTSSVGEMWQQENSQLSRRRSRSFDNAFENSSPDYLPFEFRALEIALEAACTFLDSQASELEIEAYPLLDELTSKISTLNLERVRRLKSRLVALTRRVQKVRDEIEQLMDDDGDMAEMYLTEKKRRMEGSMYGDQSLLGYRSNDGLSVSAPVSPVSSPPDSRRLDKSLSIARSRHDSARSSEGAENIEELEMLLEAYFVVIDSTLNKLTSLKEYIDDTEDFINIQLDNVRNQLIQFELLLTTATFVVAIFGVVAGIFGMNFEIDFFNQPGAFRWVLIITGVCGFVIFSAFVWFFKYRRLMPL

SEQ ID NO: 76972 - DNA, 1003 bp, Arabidopsis thaliana
  misc_feature (1)..(1003): Ceres Seq. ID no. 12482277
  misc_feature: MA Experiment ID: 20000171 Result: Up-regulated in Transcription
  misc_feature: MA Experiment 20000171 PARAMETER Experiment Name: At_42deg_Heat_P Parameter: Age (day) Value: 14
  misc_feature: MA Experiment 20000171 PARAMETER Experiment Name: At_42deg_Heat_P Parameter: Organism Value: A. thaliana
  misc_feature: MA Experiment 20000171 PARAMETER Experiment Name: At_42deg_Heat_P Parameter: Plant Line Value: WS
  misc_feature: MA Experiment 20000171 PARAMETER Experiment Name: At_42deg_Heat_P Parameter: Temperature (deg C) Value: 42 vs. 22
  misc_feature: MA Experiment 20000171 PARAMETER Experiment Name: At_42deg_Heat_P Parameter: Timepoint (hr) Value: 1
  misc_feature: MA Experiment 20000171 PARAMETER Experiment Name: At_42deg_Heat_P Parameter: Tissue Value: Aerial
  misc_feature: MA Experiment ID: 20000173 Result: Up-regulated in Transcription
  misc_feature: MA Experiment 20000173 PARAMETER Experiment Name: At_42deg_Heat_P Parameter: Age (day) Value: 14
  misc_feature: MA Experiment 20000173 PARAMETER Experiment Name: At_42deg_Heat_P Parameter: Organism Value: A. thaliana
  misc_feature: MA Experiment 20000173 PARAMETER Experiment Name: At_42deg_Heat_P Parameter: Plant Line Value: WS
  misc_feature: MA Experiment 20000173 PARAMETER Experiment Name: At_42deg_Heat_P Parameter: Temperature (deg C) Value: 42 vs. 22
  misc_feature: MA Experiment 20000173 PARAMETER Experiment Name: At_42deg_Heat_P Parameter: Timepoint (hr) Value: 6
  misc_feature: MA Experiment 20000173 PARAMETER Experiment Name: At_42deg_Heat_P Parameter: Tissue Value: Aerial
  misc_feature: MA Experiment ID: 20000437 Result: Up-regulated in Transcription
  misc_feature: MA Experiment 20000437 PARAMETER Experiment Name: At_Drought_P Parameter: Age (day) Value: 8
  misc_feature: MA Experiment 20000437 PARAMETER Experiment Name: At_Drought_P Parameter: Organism Value: A. thaliana
  misc_feature: MA Experiment 20000437 PARAMETER Experiment Name: At_Drought_P Parameter: Plant Line Value: WS
  misc_feature: MA Experiment 20000437 PARAMETER Experiment Name: At_Drought_P Parameter: Timepoint (hr) Value: 24
  misc_feature: MA Experiment 20000437 PARAMETER Experiment Name: At_Drought_P Parameter: Tissue Value: Whole Plant
  misc_feature: MA Experiment 20000437 PARAMETER Experiment Name: At_Drought_P Parameter: Treatment Value: Drought vs. No Drought
ctccattaatgttgctctcacactcatgcacctctcttatctttataggagtgtgttccctttgtatgttacccaaaacgggacattaccataacaaaacagagagatgagtcaagaagaacaaccaaagcggccacaagagccagtcacttacggtgacgtttttgaagtctccggtgaactcgctgataagcctatagcgccggaggatgcaaacatgatgcaagcagcggagacacgtgtgtttggccacactcagaaaggcggtgcagcggcagtcatgcagtctgcagccactgctaataaacgcggtggctttgtccatccaggtgacacaactgatctcgccgctgaacgaggcgtcacagtggcgcaaactgacgtccctggtgcacgtgtcacaacagaattcgtcggtggacaggtcgttggacaatacgtcgagcctaggccagtggcgactgcggcagtttatggtaagcagaagttggtgggtttgagtttacaaagtgcaataacgattggagaagcattggaagcgactgtgcaaaccgctggaaacaaaccggtggatcaaagcgacgcagcagcgattcaagcggcagaggttagagcttgtggcactaatgtgattgctcctggtggaatcgccgcttctgctcaatcagcagcaaatcacaacgctaccatagaccgtgatgaggataaaatcaagctcattgatgttttggcggggtgcgaccgggaagttagccgcagataaatctgtgaccaggcaggacgcagagggagtggtgagcgctgagctgaggaacaatcctaatttgtctactcaccctggtggtgtagcggcttctattactgccgccgctaggcttaacgagagagctgatatatgaaaaatcctgcgagagggagatgttttggttctgttgttcaaaaaagttcagtcataatgtaaaaaaatggtcactttccggttataaagttgaaatctttctct

SEQ ID NO: 76973 - protein, 218 aa, Arabidopsis thaliana
  peptide (1)..(218): Ceres Seq. ID no. 12482278
  misc_feature (135)..(197): Pfam Name: Seed maturation protein Pfam Description: Seed maturation protein
  misc_feature (1)..(210): Homolog of NCBI NO: 15228768 NR Description: LEA protein, putative; protein id: At3g22490.1 thaliana] >gi|11994281|dbj|BAB01464.1| seed maturation protein,
  misc_feature (1)..(218): Homolog of NCBI NO: 2129632 NR Description: embryonic protein LEA.D34 homolog type 1 - thaliana >gi|1113094|emb|CAA63085.1| LEA D34 protein homologue
  misc_feature (1)..(216): Homolog of NCBI NO: 15228770 NR Description: LEA protein, putative; protein id: At3g22500.1, by cDNA: gi_15450430, supported by cDNA: gi_992920 [Arabidopsis >gi|11994283|dbj|BAB01466.1| LEA protein in group 5 [Arabidopsis
  misc_feature (1)..(216): Homolog of NCBI NO: 1526422 NR Description: LEA protein in group 5 [Arabidopsis thaliana]
  misc_feature (1)..(210): Homolog of NCBI NO: 126078 NR Description: LATE EMBRYOGENESIS ABUNDANT PROTEIN D-34 (LEA
MSQEEQPKRPQEPVTYGDVFEVSGELADKPIAPEDANMMQAAETRVFGHTQKGGAAAVMQSAATANKRGGFVHPGDTTDLAAERGVTVAQTDVPGARVTTEFVGGQVVGQYVEPRPVATAAVYGKQKLVGLSLQSAITIGEALEATVQTAGNKPVDQSDAAAIQAAEVRACGTNVIAPGGIAASAQSAANHNATIDRDEDKIKLIDVLAGCDREVSRR

SEQ ID NO: 76974 - protein, 181 aa, Arabidopsis thaliana
  peptide (1)..(181): Ceres Seq. ID no. 12482279
  misc_feature (98)..(160): Pfam Name: Seed maturation protein Pfam Description: Seed maturation protein
  misc_feature (1)..(173): Homolog of NCBI NO: 15228768 NR Description: LEA protein, putative; protein id: At3g22490.1 thaliana] >gi|11994281|dbj|BAB01464.1| seed maturation protein,
  misc_feature (1)..(181): Homolog of NCBI NO: 2129632 NR Description: embryonic protein LEA.D34 homolog type 1 - thaliana >gi|1113094|emb|CAA63085.1| LEA D34 protein homologue
  misc_feature (1)..(179): Homolog of NCBI NO: 15228770 NR Description: LEA protein, putative; protein id: At3g22500.1, by cDNA: gi_15450430, supported by cDNA: gi_992920 [Arabidopsis >gi|11994283|dbj|BAB01466.1| LEA protein in group 5 [Arabidopsis
  misc_feature (1)..(179): Homolog of NCBI NO: 1526422 NR Description: LEA protein in group 5 [Arabidopsis thaliana]
  misc_feature (1)..(173): Homolog of NCBI NO: 126078 NR Description: LATE EMBRYOGENESIS ABUNDANT PROTEIN D-34 (LEA
MMQAAETRVFGHTQKGGAAAVMQSAATANKRGGFVHPGDTTDLAAERGVTVAQTDVPGARVTTEFVGGQVVGQYVEPRPVATAAVYGKQKLVGLSLQSAITIGEALEATVQTAGNKPVDQSDAAAIQAAEVRACGTNVIAPGGIAASAQSAANHNATIDRDEDKIKLIDVLAGCDREVSRR

SEQ ID NO: 76975 - protein, 180 aa, Arabidopsis thaliana
  peptide (1)..(180): Ceres Seq. ID no. 12482280
  misc_feature (97)..(159): Pfam Name: Seed maturation protein Pfam Description: Seed maturation protein
  misc_feature (1)..(172): Homolog of NCBI NO: 15228768 NR Description: LEA protein, putative; protein id: At3g22490.1 thaliana] >gi|11994281|dbj|BAB01464.1| seed maturation protein,
  misc_feature (1)..(180): Homolog of NCBI NO: 2129632 NR Description: embryonic protein LEA.D34 homolog type 1 - thaliana >gi|1113094|emb|CAA63085.1| LEA D34 protein homologue
  misc_feature (1)..(178): Homolog of NCBI NO: 15228770 NR Description: LEA protein, putative; protein id: At3g22500.1, by cDNA: gi_15450430, supported by cDNA: gi_992920 [Arabidopsis >gi|11994283|dbj|BAB01466.1| LEA protein in group 5 [Arabidopsis
  misc_feature (1)..(178): Homolog of NCBI NO: 1526422 NR Description: LEA protein in group 5 [Arabidopsis thaliana]
  misc_feature (1)..(172): Homolog of NCBI NO: 126078 NR Description: LATE EMBRYOGENESIS ABUNDANT PROTEIN D-34 (LEA
MQAAETRVFGHTQKGGAAAVMQSAATANKRGGFVHPGDTTDLAAERGVTVAQTDVPGARVTTEFVGGQVVGQYVEPRPVATAAVYGKQKLVGLSLQSAITIGEALEATVQTAGNKPVDQSDAAAIQAAEVRACGTNVIAPGGIAASAQSAANHNATIDRDEDKIKLIDVLAGCDREVSRR

SEQ ID NO: 76976 - DNA, 1747 bp, Arabidopsis thaliana
  misc_feature (1)..(1747): Ceres Seq. ID no. 12482381
  misc_feature: MA Experiment ID: 20000185 Result: Up-regulated in Transcription
  misc_feature: MA Experiment 20000185 PARAMETER Experiment Name: At_Roots__P Parameter: Age (day) Value: 7 vs. 21
  misc_feature: MA Experiment 20000185 PARAMETER Experiment Name: At_Roots__P Parameter: Organism Value: A. thaliana
  misc_feature: MA Experiment 20000185 PARAMETER Experiment Name: At_Roots__P Parameter: Tissue Value: Roots vs. Whole Plant
  misc_feature: MA Experiment ID: 20001248 Result: Up-regulated in Transcription
  misc_feature: MA Experiment 20001248 PARAMETER Experiment Name: At_Far-red-induction_P Parameter: Age (day) Value: 7
  misc_feature: MA Experiment 20001248 PARAMETER Experiment Name: At_Far-red-induction_P Parameter: Light Value: Far-red vs. White
  misc_feature: MA Experiment 20001248 PARAMETER Experiment Name: At_Far-red-induction_P Parameter: Organism Value: A. thaliana
  misc_feature: MA Experiment 20001248 PARAMETER Experiment Name: At_Far-red-induction_P Parameter: Plant Line Value: Columbia
  misc_feature: MA Experiment 20001248 PARAMETER Experiment Name: At_Far-red-induction_P Parameter: Timepoint (hr) Value: 4
  misc_feature: MA Experiment 20001248 PARAMETER Experiment Name: At_Far-red-induction_P Parameter: Tissue Value: Whole Plant
  misc_feature: MA Experiment ID: 20001450 Result: Up-regulated in Transcription
  misc_feature: MA Experiment 20001450 PARAMETER Experiment Name: At_Far-red-induction_P Parameter: Age (day) Value: 7
  misc_feature: MA Experiment 20001450 PARAMETER Experiment Name: At_Far-red-induction_P Parameter: Light Value: Far-red vs. White
  misc_feature: MA Experiment 20001450 PARAMETER Experiment Name: At_Far-red-induction_P Parameter: Organism Value: A. thaliana
  misc_feature: MA Experiment 20001450 PARAMETER Experiment Name: At_Far-red-induction_P Parameter: Plant Line Value: Columbia
  misc_feature: MA Experiment 20001450 PARAMETER Experiment Name: At_Far-red-induction_P Parameter: Timepoint (hr) Value: 8
  misc_feature: MA Experiment 20001450 PARAMETER Experiment Name: At_Far-red-induction_P Parameter: Tissue Value: Whole Plant
  misc_feature: MA Experiment ID: 20001451 Result: Up-regulated in Transcription
  misc_feature: MA Experiment 20001451 PARAMETER Experiment Name: At_Far-red-induction_P Parameter: Age (day) Value: 7
  misc_feature: MA Experiment 20001451 PARAMETER Experiment Name: At_Far-red-induction_P Parameter: Light Value: Far-red vs. White
  misc_feature: MA Experiment 20001451 PARAMETER Experiment Name: At_Far-red-induction_P Parameter: Organism Value: A. thaliana
  misc_feature: MA Experiment 20001451 PARAMETER Experiment Name: At_Far-red-induction_P Parameter: Plant Line Value: Columbia
  misc_feature: MA Experiment 20001451 PARAMETER Experiment Name: At_Far-red-induction_P Parameter: Timepoint (hr) Value: 24
  misc_feature: MA Experiment 20001451 PARAMETER Experiment Name: At_Far-red-induction_P Parameter: Tissue Value: Whole Plant
gatccgggtacatattcttcttcttcttcaaatcgagatcgaagaagaaccaacaaaaaaccaaaaatggagacgaagccaaaccctagacgtccttcaaacacagttctaccatatcaaacaccacgattaagagatcattaccttctgggaaaaaagctaggccaaggccaatttggaacaacctatctctgcacagagaaatcaacctccgctaattacgcctgcaaatcgatcccgaagcgaaagctcgtgtgtcgcgaggattacgaagatgtatggcgtgagattcagatcatgcatcatctctctgagcatccaaatgttgttaggatcaaagggacttatgaagattcggtgtttgttcatattgttatggaggtttgtgaaggtggtgagctttttgatcggattgtttctaaaggtcattttagtgagcgtgaagctgtcaagcttattaagacgattcttggtgttgttgaggcttgtcattctcttggtgttatgcatagagatctcaaacctgagaatttcttgtttgatagtcctaaagatgatgctaagcttaaggctaccgattttggtttgtctgtcttctataagccaggacaatatttatatgacgtagttggaagtccgtactatgttgcaccagaggtgctaaagaaatgttatggacctgaaatagatgtgtggagtgctggtgttatcctctacattttactcagcggtgttcctcccttctgggcagagactgagtctggaatctttagacagatattgcaagggaagttagatttcaaatctgacccgtggcctactatctcagaagctgctaaagatttgatctataaaatgctcgaaaggagccccaagaaacgcatttctgctcatgaagccttgtgtcacccatggattgtcgatgaacaagcagcaccagacaagcctcttgatccagcagtcttatctcgtctaaagcagttttctcaaatgaataagattaagaaaatggcattacgggtaattgctgagagactttcagaggaagaaattggaggtctgaaggaattgttcaagatgatagacacagacaacagcggaacgattacttttgaagagctcaaagcgggtttgaagagagtcggatctgaactgatggaatcagaaatcaagtctctcatggatgcggctgatatcgacaacagtggtacaatagactacggagaattcctagcagcaaccttacacatgaacaagatggagagagaggagattctggtggctgcattttcggactttgacaaagacggaagcggttatatcaccatcgatgagcttcagtcagcttgcacagagtttggtctatgtgatacacctctggacgacatgatcaaggagattgatcttgacaatgacgggaagatcgatttctcggagtttacagcaatgatgaggaaaggagatggagttgggagaagcagaaccatgatgaagaacttgaacttcaacattgctgatgcttttggagttgatggtgaaaaatctgatgactgactcatcattcttccacaatttctgttttttttctctttaatttcgtttatattttgaattctaatttctaaggatacaaaaatatattctggcttgttttttgctttcctttttatttttgtacatgagcaactttctaaatttttatcctcatatggataatttttgcttcatataaaagtttttgaattcc

SEQ ID NO: 76977 - protein, 517 aa, Arabidopsis thaliana
  peptide (1)..(517): Ceres Seq. ID no. 12482382
  misc_feature (48)..(306): Pfam Name: Protein kinase domain Pfam Description: Protein kinase domain
  misc_feature (23)..(517): Homolog of NCBI NO: 1084335 NR Description: calcium-dependent protein kinase (EC 2.7.1.-) 2 -
  misc_feature (23)..(517): Homolog of NCBI NO: 15219693 NR Description: calcium-dependent protein kinase; protein id: supported by cDNA: gi_1235717, supported by cDNA: gi_15293094, by cDNA: gi_21281140 [Arabidopsis thaliana]
  misc_feature (203)..(517): Homolog of NCBI NO: 8778378 NR Description: F15O4.8 [Arabidopsis thaliana]
  misc_feature (23)..(212): Homolog of NCBI NO: 8778378 NR Description: F15O4.8 [Arabidopsis thaliana]
  misc_feature (23)..(517): Homolog of NCBI NO: 15233947 NR Description: calmodulin-domain protein kinase CDPK isoform 4 protein id: At4g09570.1 [Arabidopsis thaliana]
DPGTYSSSSSNRDRRRTNKKPKMETKPNPRRPSNTVLPYQTPRLRDHYLLGKKLGQGQFGTTYLCTEKSTSANYACKSIPKRKLVCREDYEDVWREIQIMHHLSEHPNVVRIKGTYEDSVFVHIVMEVCEGGELFDRIVSKGHFSEREAVKLIKTILGVVEACHSLGVMHRDLKPENFLFDSPKDDAKLKATDFGLSVFYKPGQYLYDVVGSPYYVAPEVLKKCYGPEIDVWSAGVILYILLSGVPPFWAETESGIFRQILQGKLDFKSDPWPTISEAAKDLIYKMLERSPKKRISAHEALCHPWIVDEQAAPDKPLDPAVLSRLKQFSQMNKIKKMALRVIAERLSEEEIGGLKELFKMIDTDNSGTITFEELKAGLKRVGSELMESEIKSLMDAADIDNSGTIDYGEFLAATLHMNKMEREEILVAAFSDFDKDGSGYITIDELQSACTEFGLCDTPLDDMIKEIDLDNDGKIDFSEFTAMMRKGDGVGRSRTMMKNLNFNIADAFGVDGEKSDD

SEQ ID NO: 76978 - protein, 495 aa, Arabidopsis thaliana
  peptide (1)..(495): Ceres Seq. ID no. 12482383
  misc_feature (26)..(284): Pfam Name: Protein kinase domain Pfam Description: Protein kinase domain
  misc_feature (1)..(495): Homolog of NCBI NO: 1084335 NR Description: calcium-dependent protein kinase (EC 2.7.1.-) 2 -
  misc_feature (1)..(495): Homolog of NCBI NO: 15219693 NR Description: calcium-dependent protein kinase; protein id: supported by cDNA: gi_1235717, supported by cDNA: gi_15293094, by cDNA: gi_21281140 [Arabidopsis thaliana]
  misc_feature (181)..(495): Homolog of NCBI NO: 8778378 NR Description: F15O4.8 [Arabidopsis thaliana]
  misc_feature (1)..(190): Homolog of NCBI NO: 8778378 NR Description: F15O4.8 [Arabidopsis thaliana]
  misc_feature (1)..(495): Homolog of NCBI NO: 15233947 NR Description: calmodulin-domain protein kinase CDPK isoform 4 protein id: At4g09570.1 [Arabidopsis thaliana]
METKPNPRRPSNTVLPYQTPRLRDHYLLGKKLGQGQFGTTYLCTEKSTSANYACKSIPKRKLVCREDYEDVWREIQIMHHLSEHPNVVRIKGTYEDSVFVHIVMEVCEGGELFDRIVSKGHFSEREAVKLIKTILGVVEACHSLGVMHRDLKPENFLFDSPKDDAKLKATDFGLSVFYKPGQYLYDVVGSPYYVAPEVLKKCYGPEIDVWSAGVILYILLSGVPPFWAETESGIFRQILQGKLDFKSDPWPTISEAAKDLIYKMLERSPKKRISAHEALCHPWIVDEQAAPDKPLDPAVLSRLKQFSQMNKIKKMALRVIAERLSEEEIGGLKELFKMIDTDNSGTITFEELKAGLKRVGSELMESEIKSLMDAADIDNSGTIDYGEFLAATLHMNKMEREEILVAAFSDFDKDGSGYITIDELQSACTEFGLCDTPLDDMIKEIDLDNDGKIDFSEFTAMMRKGDGVGRSRTMMKNLNFNIADAFGVDGEKSDD

SEQ ID NO: 76979 - protein, 418 aa, Arabidopsis thaliana
  peptide (1)..(418): Ceres Seq. ID no. 12482384
  misc_feature (1)..(207): Pfam Name: Protein kinase domain Pfam Description: Protein kinase domain
  misc_feature (1)..(418): Homolog of NCBI NO: 1084335 NR Description: calcium-dependent protein kinase (EC 2.7.1.-) 2 -
  misc_feature (1)..(418): Homolog of NCBI NO: 15219693 NR Description: calcium-dependent protein kinase; protein id: supported by cDNA: gi_1235717, supported by cDNA: gi_15293094, by cDNA: gi_21281140 [Arabidopsis thaliana]
  misc_feature (104)..(418): Homolog of NCBI NO: 8778378 NR Description: F15O4.8 [Arabidopsis thaliana]
  misc_feature (1)..(113): Homolog of NCBI NO: 8778378 NR Description: F15O4.8 [Arabidopsis thaliana]
  misc_feature (1)..(418): Homolog of NCBI NO: 15233947 NR Description: calmodulin-domain protein kinase CDPK isoform 4 protein id: At4g09570.1 [Arabidopsis thaliana]
MHHLSEHPNVVRIKGTYEDSVFVHIVMEVCEGGELFDRIVSKGHFSEREAVKLIKTILGVVEACHSLGVMHRDLKPENFLFDSPKDDAKLKATDFGLSVFYKPGQYLYDVVGSPYYVAPEVLKKCYGPEIDVWSAGVILYILLSGVPPFWAETESGIFRQILQGKLDFKSDPWPTISEAAKDLIYKMLERSPKKRISAHEALCHPWIVDEQAAPDKPLDPAVLSRLKQFSQMNKIKKMALRVIAERLSEEEIGGLKELFKMIDTDNSGTITFEELKAGLKRVGSELMESEIKSLMDAADIDNSGTIDYGEFLAATLHMNKMEREEILVAAFSDFDKDGSGYITIDELQSACTEFGLCDTPLDDMIKEIDLDNDGKIDFSEFTAMMRKGDGVGRSRTMMKNLNFNIADAFGVDGEKSDD

SEQ ID NO: 76980 - DNA, 3699 bp, Arabidopsis thaliana
  misc_feature (1)..(3699): Ceres Seq. ID no. 12482385
  misc_feature: MA Experiment ID: 20000307 Result: Down-regulated in Transcription
  misc_feature: MA Experiment 20000307 PARAMETER Experiment Name: At_Germinating_Seeds_Sub_P Parameter: Age (hr) Value: 24 vs. 0
  misc_feature: MA Experiment 20000307 PARAMETER Experiment Name: At_Germinating_Seeds_Sub_P Parameter: Organism Value: A. thaliana
  misc_feature: MA Experiment 20000307 PARAMETER Experiment Name: At_Germinating_Seeds_Sub_P Parameter: Plant Line Value: WS
  misc_feature: MA Experiment 20000307 PARAMETER Experiment Name: At_Germinating_Seeds_Sub_P Parameter: Tissue Value: Germinating Seeds
  misc_feature: MA Experiment ID: 20000315 Result: Down-regulated in Transcription
  misc_feature: MA Experiment 20000315 PARAMETER Experiment Name: At_14day_Shoots-Roots_Sub_P Parameter: Age (day) Value: 14
  misc_feature: MA Experiment 20000315 PARAMETER Experiment Name: At_14day_Shoots-Roots_Sub_P Parameter: Organism Value: A. thaliana
  misc_feature: MA Experiment 20000315 PARAMETER Experiment Name: At_14day_Shoots-Roots_Sub_P Parameter: Plant Line Value: WS
  misc_feature: MA Experiment 20000315 PARAMETER Experiment Name: At_14day_Shoots-Roots_Sub_P Parameter: Tissue Value: Shoots vs. Whole Plant
  misc_feature: MA Experiment ID: 20000327 Result: Down-regulated in Transcription
  misc_feature: MA Experiment 20000327 PARAMETER Experiment Name: At_42deg_Heat_Sub_P Parameter: Age (day) Value: 14
  misc_feature: MA Experiment 20000327 PARAMETER Experiment Name: At_42deg_Heat_Sub_P Parameter: Organism Value: A. thaliana
  misc_feature: MA Experiment 20000327 PARAMETER Experiment Name: At_42deg_Heat_Sub_P Parameter: Plant Line Value: WS
  misc_feature: MA Experiment 20000327 PARAMETER Experiment Name: At_42deg_Heat_Sub_P Parameter: Temperature (deg C) Value: 42 vs. 22
  misc_feature: MA Experiment 20000327 PARAMETER Experiment Name: At_42deg_Heat_Sub_P Parameter: Timepoint (hr) Value: 1
  misc_feature: MA Experiment 20000327 PARAMETER Experiment Name: At_42deg_Heat_Sub_P Parameter: Tissue Value: Aerial
  misc_feature: MA Experiment ID: 20000328 Result: Down-regulated in Transcription
  misc_feature: MA Experiment 20000328 PARAMETER Experiment Name: At_42deg_Heat_Sub_P Parameter: Age (day) Value: 14
  misc_feature: MA Experiment 20000328 PARAMETER Experiment Name: At_42deg_Heat_Sub_P Parameter: Organism Value: A. thaliana
  misc_feature: MA Experiment 20000328 PARAMETER Experiment Name: At_42deg_Heat_Sub_P Parameter: Plant Line Value: WS
  misc_feature: MA Experiment 20000328 PARAMETER Experiment Name: At_42deg_Heat_Sub_P Parameter: Temperature (deg C) Value: 42 vs. 22
  misc_feature: MA Experiment 20000328 PARAMETER Experiment Name: At_42deg_Heat_Sub_P Parameter: Timepoint (hr) Value: 6
  misc_feature: MA Experiment 20000328 PARAMETER Experiment Name: At_42deg_Heat_Sub_P Parameter: Tissue Value: Aerial
atgcaaaacaataccaacaattattaatctcaattcttccttccatttctatctctctcactctctttctctctcgatcttcttcttcttcaactcttctgtcgataggctcagtatcggatttttcgtcaacactataaaacccatttttctatctctctgtctaaaagtctttactttaaaacaaacagtgacatgaaaaatcaaagcttcgatacaatctcaggatggatttgagtatcgcttaatgaagttttgatctttgggtttagttctacaacagagtatttcgaggattgtatatattgagggtttttgttgtttaggtgataatgataccggaactggggagaagaccgatgcatagagggaacgaagattcatcttttggggatgattatgagaaagagattggagtattacttggtgagcagcagagaaggcaagtagaagctgatgagcttgagagagagcttaatttgtataggagtggctctgctccaccgactgttgatggttctgttagtgctgctggagggctttttagcggcggaggtggggctccttttttggagtttggtggaggcaacaagggtaatgggtttggtggcgatgatgaggagtttaggaaagatccggcttacttgtcttattactatgctaatatgaagttgaatccgaggttgccaccgcctttgatgtctagggaggatttgagggttgctcagaggcttaaagggagtagtaatgttttaggtggtgttggggataggaggaaagttaatgatagtcaatctttattctctatgccacctggttttgatcagaggaagcagcatgagtttgaggttgagaaaactagtgcttcttcttctgaatgggatgctaatggattgatcggtttgccgggtttggggattggaggcaagcagaagagttttgctgatatctttcaggctgatatggggcatggacatcctgtcactaagcagccctcacgtcctgcaagtcgtaatacctttgatgaaaatgttgactctaagaataatctgtctccatctgcatcgcaaggcattggtgcaccatctccatacagctatgcagctgttctgggttcgtctttgtctagaaatggaactccagatccacaggccattgctagggtgcctagtccctgtcttactcccattgggagtgggagagtgagttcaaatgataagaggaacacaagtaatcaaagcccgttcaacggtgggctcaacgagtcttctgatcttgtcaatgctttatctggcatgaacctgtctggcagtggcgggttagatgaacgtggtcaggctgagcaagatgtggaaaaggtcaggaactatatgtttggactgcaaggtgggcataacgaagtcaatcaacatgggttcccaaacaaatctgatcaagcccagaaggcaactggcttgttgaggaattcacaattgagaggggcacaaggatctacctataatgatggaggtggagtagctactcagtaccagcatcttgatagcccaaactattgtctcaacaattatggattaaatccagctgtagcttctatgatggctaaccaacttggaactaataactattctccagtgtatgaaaatgcttctgcagcatctgctatgggattttctggaatggattccagacttcatggtggaggttatgtatcatctggtcaaaacctctctgaatcacgtaatcttggcagattcagtaatcgaatgatgggaggaggtactggtcttcagtcacatatggcagatccaatgtatcatcagtatgctgattcgcttgatcttctcaatgatccttccatggacgtgaactttatgggtaattcatacatgaatatgcttgaactccagagggcttatcttggagcacagaaatcacagtacggtgtcccttacaaatccgggagccctaacagccacaccgattatgggagtccaacatttgggtcatatcctggcagcccattggctcatcatcttctgcctaattctcttgtgtcaccctgtagccctatgagacgaggtgaagttaatatgcgatatccctctgcaacaagaaactacgcaggaggggtaatgggttcctggcacatggatgctagtttggatgaaggctttggatcttcaatgcttgaagagttcaaaagtaacaaaacaagaggattcgaacttgctgaaatagctggccatgttgtagagttcagttcggatcagtatggaagccggtttattcagcagaaactcgagacagcaacaagtgatgagaaaaacatggtttatgaggagatcatgccacacgctcttgccctgatgactgacgtttttggaaactatgtgattcagaagttctttgagcatggactcccaccacagagaagagaattggcagataaactctttgacaatgttttgcctcttagcctacagatgtatggttgtcgtgttattcagaaggcaattgaggtggttgatctagaccagaaaattaaaatggtgaaagaactcgatggacatgtgatgcgatgcgtacgtgatcagaatgggaaccatgtggttcaaaagtgtattgaatgtgtgcctgaagaaaacatcgaatttattatttccaccttctttggcaatgttgtgaccctctccactcacccatatgggtgccgagttattcagagggtattggagcactgccatgaccctgatactcagagtaaggttatggatgaaatcatgtcaactattagtatgctggcccaagatcagtatggaaactatgttattcagcatgtattggaacacggaaagcctgatgagcgtactgtgattatcaaggaattagcggggaagattgttcagatgagccaacagaagtttgcttcaaacgttgttgagaaatgtttgacttttggagggccagaggaacgggaatttctggtaaatgagatgctgggcacaactgatgaaaacgagcctcttcaggcgatgatgaaggatcagtttgccaactatgtagtgcaaaaagttttagagacatgtgatgaccaacagcgtgagctgatccttggtcgtattaaagtgcatctcaatgctttaaagaaatacacttatggaaagcatatcgttgctcgtgttgaaaaactcgttgctgctggagagaggaggatggctttgcagtccctaacccagcctcagatggcgtaaggccgcaagtgttgtacagcttaactagggtggatggctctgccatagcgttttgagaattaggtaaaatctaaaccggaaataatctgcgggaaaattgtgaaggagagctttgttttctctgcaaatctgtaaaattgtgtagttgcttacggtttttctatacatagaaccaaacatcccactttaggctgatgagtaagagaggaaatatgcagagaatggtgtaaaggtgggctgaggtatggtgaggattttagggtttcctttacacgaaagagaatggctttttcattgccaaatgtgtagaagtgagaatatgttcatgcttttaggacaatcctagtgtttagagttttttctccatctatgtaatttgtttcatcaaactcttgtttcctatttcactagtaactctttcgtttctgtaatattgcaatatttttgt

SEQ ID NO: 76981 - protein, 972 aa, Arabidopsis thaliana
  peptide (1)..(972): Ceres Seq. ID no. 12482386
  misc_feature (778)..(813): Pfam Name: Pumilio-family RNA binding repeat Pfam Description: Pumilio-family RNA binding repeat
  misc_feature (412)..(964): Homolog of NCBI NO: 20513851 NR Description: BPM [Hordeum vulgare]
  misc_feature (226)..(431): Homolog of NCBI NO: 20513851 NR Description: BPM [Hordeum vulgare]
  misc_feature (70)..(131): Homolog of NCBI NO: 20513851 NR Description: BPM [Hordeum vulgare]
  misc_feature (130)..(965): Homolog of NCBI NO: 34908236 NR Description: putative pumilio/Mpt5 family RNA-binding protein
  misc_feature (39)..(81): Homolog of NCBI NO: 20513851 NR Description: BPM [Hordeum vulgare]
  misc_feature (349)..(964): Homolog of NCBI NO: 14719326 NR Description: putative pumilio/Mpt5 family RNA-binding protein
  misc_feature (70)..(171): Homolog of NCBI NO: 14719326 NR Description: putative pumilio/Mpt5 family RNA-binding protein
  misc_feature (45)..(67): Homolog of NCBI NO: 14719326 NR Description: putative pumilio/Mpt5 family RNA-binding protein
  misc_feature (188)..(965): Homolog of NCBI NO: 22330960 NR Description: pumilio-family RNA-binding protein, putative;
  misc_feature (188)..(967): Homolog of NCBI NO: 6056191 NR Description: putative RNA binding protein [Arabidopsis
MIPELGRRPMHRGNEDSSFGDDYEKEIGVLLGEQQRRQVEADELERELNLYRSGSAPPTVDGSVSAAGGLFSGGGGAPFLEFGGGNKGNGFGGDDEEFRKDPAYLSYYYANMKLNPRLPPPLMSREDLRVAQRLKGSSNVLGGVGDRRKVNDSQSLFSMPPGFDQRKQHEFEVEKTSASSSEWDANGLIGLPGLGIGGKQKSFADIFQADMGHGHPVTKQPSRPASRNTFDENVDSKNNLSPSASQGIGAPSPYSYAAVLGSSLSRNGTPDPQAIARVPSPCLTPIGSGRVSSNDKRNTSNQSPFNGGLNESSDLVNALSGMNLSGSGGLDERGQAEQDVEKVRNYMFGLQGGHNEVNQHGFPNKSDQAQKATGLLRNSQLRGAQGSTYNDGGGVATQYQHLDSPNYCLNNYGLNPAVASMMANQLGTNNYSPVYENASAASAMGFSGMDSRLHGGGYVSSGQNLSESRNLGRFSNRMMGGGTGLQSHMADPMYHQYADSLDLLNDPSMDVNFMGNSYMNMLELQRAYLGAQKSQYGVPYKSGSPNSHTDYGSPTFGSYPGSPLAHHLLPNSLVSPCSPMRRGEVNMRYPSATRNYAGGVMGSWHMDASLDEGFGSSMLEEFKSNKTRGFELAEIAGHVVEFSSDQYGSRFIQQKLETATSDEKNMVYEEIMPHALALMTDVFGNYVIQKFFEHGLPPQRRELADKLFDNVLPLSLQMYGCRVIQKAIEVVDLDQKIKMVKELDGHVMRCVRDQNGNHVVQKCIECVPEENIEFIISTFFGNVVTLSTHPYGCRVIQRVLEHCHDPDTQSKVMDEIMSTISMLAQDQYGNYVIQHVLEHGKPDERTVIIKELAGKIVQMSQQKFASNVVEKCLTFGGPEEREFLVNEMLGTTDENEPLQAMMKDQFANYVVQKVLETCDDQQRELILGRIKVHLNALKKYTYGKHIVARVEKLVAAGERRMALQSLTQPQMA

SEQ ID NO: 76982 - protein, 963 aa, Arabidopsis thaliana
  peptide (1)..(963): Ceres Seq. ID no. 12482387
  misc_feature (769)..(804): Pfam Name: Pumilio-family RNA binding repeat Pfam Description: Pumilio-family RNA binding repeat
  misc_feature (403)..(955): Homolog of NCBI NO: 20513851 NR Description: BPM [Hordeum vulgare]
  misc_feature (217)..(422): Homolog of NCBI NO: 20513851 NR Description: BPM [Hordeum vulgare]
  misc_feature (61)..(122): Homolog of NCBI NO: 20513851 NR Description: BPM [Hordeum vulgare]
  misc_feature (121)..(956): Homolog of NCBI NO: 34908236 NR Description: putative pumilio/Mpt5 family RNA-binding protein
  misc_feature (30)..(72): Homolog of NCBI NO: 20513851 NR Description: BPM [Hordeum vulgare]
  misc_feature (340)..(955): Homolog of NCBI NO: 14719326 NR Description: putative pumilio/Mpt5 family RNA-binding protein
  misc_feature (61)..(162): Homolog of NCBI NO: 14719326 NR Description: putative pumilio/Mpt5 family RNA-binding protein
  misc_feature (36)..(58): Homolog of NCBI NO: 14719326 NR Description: putative pumilio/Mpt5 family RNA-binding protein
  misc_feature (179)..(956): Homolog of NCBI NO: 22330960 NR Description: pumilio-family RNA-binding protein, putative;
  misc_feature (179)..(958): Homolog of NCBI NO: 6056191 NR Description: putative RNA binding protein [Arabidopsis
MHRGNEDSSFGDDYEKEIGVLLGEQQRRQVEADELERELNLYRSGSAPPTVDGSVSAAGGLFSGGGGAPFLEFGGGNKGNGFGGDDEEFRKDPAYLSYYYANMKLNPRLPPPLMSREDLRVAQRLKGSSNVLGGVGDRRKVNDSQSLFSMPPGFDQRKQHEFEVEKTSASSSEWDANGLIGLPGLGIGGKQKSFADIFQADMGHGHPVTKQPSRPASRNTFDENVDSKNNLSPSASQGIGAPSPYSYAAVLGSSLSRNGTPDPQAIARVPSPCLTPIGSGRVSSNDKRNTSNQSPFNGGLNESSDLVNALSGMNLSGSGGLDERGQAEQDVEKVRNYMFGLQGGHNEVNQHGFPNKSDQAQKATGLLRNSQLRGAQGSTYNDGGGVATQYQHLDSPNYCLNNYGLNPAVASMMANQLGTNNYSPVYENASAASAMGFSGMDSRLHGGGYVSSGQNLSESRNLGRFSNRMMGGGTGLQSHMADPMYHQYADSLDLLNDPSMDVNFMGNSYMNMLELQRAYLGAQKSQYGVPYKSGSPNSHTDYGSPTFGSYPGSPLAHHLLPNSLVSPCSPMRRGEVNMRYPSATRNYAGGVMGSWHMDASLDEGFGSSMLEEFKSNKTRGFELAEIAGHVVEFSSDQYGSRFIQQKLETATSDEKNMVYEEIMPHALALMTDVFGNYVIQKFFEHGLPPQRRELADKLFDNVLPLSLQMYGCRVIQKAIEVVDLDQKIKMVKELDGHVMRCVRDQNGNHVVQKCIECVPEENIEFIISTFFGNVVTLSTHPYGCRVIQRVLEHCHDPDTQSKVMDEIMSTISMLAQDQYGNYVIQHVLEHGKPDERTVIIKELAGKIVQMSQQKFASNVVEKCLTFGGPEEREFLVNEMLGTTDENEPLQAMMKDQFANYVVQKVLETCDDQQRELILGRIKVHLNALKKYTYGKHIVARVEKLVAAGERRMALQSLTQPQMA

SEQ ID NO: 76983 - protein, 861 aa, Arabidopsis thaliana
  peptide (1)..(861): Ceres Seq. ID no. 12482388
  misc_feature (667)..(702): Pfam Name: Pumilio-family RNA binding repeat Pfam Description: Pumilio-family RNA binding repeat
  misc_feature (301)..(853): Homolog of NCBI NO: 20513851 NR Description: BPM [Hordeum vulgare]
  misc_feature (115)..(320): Homolog of NCBI NO: 20513851 NR Description: BPM [Hordeum vulgare]
  misc_feature (1)..(20): Homolog of NCBI NO: 20513851 NR Description: BPM [Hordeum vulgare]
  misc_feature (19)..(854): Homolog of NCBI NO: 34908236 NR Description: putative pumilio/Mpt5 family RNA-binding protein
  misc_feature (238)..(853): Homolog of NCBI NO: 14719326 NR Description: putative pumilio/Mpt5 family RNA-binding protein
  misc_feature (1)..(60): Homolog of NCBI NO: 14719326 NR Description: putative pumilio/Mpt5 family RNA-binding protein
  misc_feature (77)..(854): Homolog of NCBI NO: 22330960 NR Description: pumilio-family RNA-binding protein, putative;
  misc_feature (77)..(856): Homolog of NCBI NO: 6056191 NR Description: putative RNA binding protein [Arabidopsis
  misc_feature (294)..(842): Homolog of NCBI NO: 30685690 NR Description: pumilio-family RNA-binding protein, putative
  misc_feature (1)..(99): Homolog of NCBI NO: 30685690 NR Description: pumilio-family RNA-binding protein, putative
MKLNPRLPPPLMSREDLRVAQRLKGSSNVLGGVGDRRKVNDSQSLFSMPPGFDQRKQHEFEVEKTSASSSEWDANGLIGLPGLGIGGKQKSFADIFQADMGHGHPVTKQPSRPASRNTFDENVDSKNNLSPSASQGIGAPSPYSYAAVLGSSLSRNGTPDPQAIARVPSPCLTPIGSGRVSSNDKRNTSNQSPFNGGLNESSDLVNALSGMNLSGSGGLDERGQAEQDVEKVRNYMFGLQGGHNEVNQHGFPNKSDQAQKATGLLRNSQLRGAQGSTYNDGGGVATQYQHLDSPNYCLNNYGLNPAVASMMANQLGTNNYSPVYENASAASAMGFSGMDSRLHGGGYVSSGQNLSESRNLGRFSNRMMGGGTGLQSHMADPMYHQYADSLDLLNDPSMDVNFMGNSYMNMLELQRAYLGAQKSQYGVPYKSGSPNSHTDYGSPTFGSYPGSPLAHHLLPNSLVSPCSPMRRGEVNMRYPSATRNYAGGVMGSWHMDASLDEGFGSSMLEEFKSNKTRGFELAEIAGHVVEFSSDQYGSRFIQQKLETATSDEKNMVYEEIMPHALALMTDVFGNYVIQKFFEHGLPPQRRELADKLFDNVLPLSLQMYGCRVIQKAIEVVDLDQKIKMVKELDGHVMRCVRDQNGNHVVQKCIECVPEENIEFIISTFFGNVVTLSTHPYGCRVIQRVLEHCHDPDTQSKVMDEIMSTISMLAQDQYGNYVIQHVLEHGKPDERTVIIKELAGKIVQMSQQKFASNVVEKCLTFGGPEEREFLVNEMLGTTDENEPLQAMMKDQFANYVVQKVLETCDDQQRELILGRIKVHLNALKKYTYGKHIVARVEKLVAAGERRMALQSLTQPQMA

SEQ ID NO: 76984 - DNA, 1330 bp, Arabidopsis thaliana
  misc_feature (1)..(1330): Ceres Seq. ID no. 12482393
  misc_feature: MA Experiment ID: 20000496 Result: Up-regulated in Transcription
  misc_feature: MA Experiment 20000496 PARAMETER Experiment Name: At_Guard_Cells_P Parameter: Harvest Date Value: 7/19/2002
  misc_feature: MA Experiment 20000496 PARAMETER Experiment Name: At_Guard_Cells_P Parameter: Organism Value: Canola
  misc_feature: MA Experiment 20000496 PARAMETER Experiment Name: At_Guard_Cells_P Parameter: Tissue Value: Guard Cells vs. Leaves
  misc_feature: MA Experiment ID: 20001905 Result: Down-regulated in Transcription
  misc_feature: MA Experiment 20001905 PARAMETER Experiment Name: At_Drought_Reproduction_P Parameter: Age (day) Value: 40
  misc_feature: MA Experiment 20001905 PARAMETER Experiment Name: At_Drought_Reproduction_P Parameter: Organism Value: A. thaliana
  misc_feature: MA Experiment 20001905 PARAMETER Experiment Name: At_Drought_Reproduction_P Parameter: Plant Line Value: WS
  misc_feature: MA Experiment 20001905 PARAMETER Experiment Name: At_Drought_Reproduction_P Parameter: Timepoint (day) Value: 10
  misc_feature: MA Experiment 20001905 PARAMETER Experiment Name: At_Drought_Reproduction_P Parameter: Tissue Value: Rosettes
  misc_feature: MA Experiment 20001905 PARAMETER Experiment Name: At_Drought_Reproduction_P Parameter: Treatment Value: Drought vs. No Drought
gaattcccgggcaggtgcaagcttcacgcttgaaaatctccgttcgttttctacctcgtttagatcggagatggcggagaagccggcgcaagagcaagagcagaagcgagcgatggaacctgcagttctcgacgatattattcgtcgtttggttgagtttcggaacacgagacctggatcggggaagcaagttcatctcagtgaaggtgaaattcgtcagctttgtgctgtctccaaagaaatatttcttcaacagcccaatctgcttgaattggaagctcccatcaagatctgcggtgatattcatgggcagtattcagatctattgaggctttttgagtatggagggttccctcccgaagctaattatttgttcttgggtgattatgttgaccgtggcaagcaaagcttggaaacaatatgtcttcttctagcttacaaaatcaagtaccctgagaacttcttcttgttgagagggaatcatgaatctgcttccattaatcgtatttacggtttctatgatgagtgcaaacgcaggttcaatgtcagactctggaaaatattcaccgattgctttaactgtcttcctgtggccgccttaattgatgacagaatactatgtatgcatggtgggatttccccagagctgaaaagtttggaccagattagaaatattgcacggccgatggatattccggagtctggtttggtatgtgatttactatggtcggatcctagtggagacgtaggctggggcatgaatgatcgtggtgtttcatacacttttggagctgacaaagtcgcagagttcttggagaaacatgacatggaccttatctgtcgtgcccaccaggttgttgaagatgggtatgagttctttgcagaaagacaacttgttacagtattttcagctcccaactattgcggggaatttgacaacgctggcgcaatgatgagcattgatgagagcttaatgtgctcattccagattctaaagccgtcagaaaagaagtcgccttttctgtgacaccgattatccagtgaccaccattgcttcaaattaacaattctacaaaagttgtatatggcaagaggatctagagacggaaactgctcaattgggaccttaatggtactgataatagagcattagacatgtagctgttgacagtgatggcatcgagcagaaggaacaagtcaagtctgtactgtgattttagcatctctcacatctatgtttgtyctaaaatgtgtgtgtgtttttagtcttctctctgaataatatagattctcatttgtactctctatttatttaggagaacccaaattc

SEQ ID NO: 76985 - protein, 341 aa, Arabidopsis thaliana
  peptide (1)..(341): Ceres Seq. ID no. 12482394
  misc_feature (93)..(287): Pfam Name: Calcineurin-like phosphoesterase Pfam Description: Calcineurin-like phosphoesterase
  misc_feature (24)..(341): Homolog of NCBI NO: 15227080 NR Description: phosphoprotein phosphatase-type 1 catalytic protein id: At2g29400.1, supported by cDNA: gi_166571, supported cDNA: gi_19424067 [Arabidopsis thaliana]
  misc_feature (24)..(341): Homolog of NCBI NO: 25289017 NR Description: phosphoprotein phosphatase (EC 3.1.3.16) 1
  misc_feature (24)..(337): Homolog of NCBI NO: 1346762 NR Description: SERINE/THREONINE PROTEIN PHOSPHATASE PP1
  misc_feature (38)..(341): Homolog of NCBI NO: 5917726 NR Description: serine/threonine protein phosphatase 1; PP1
  misc_feature (32)..(341): Homolog of NCBI NO: 15237829 NR Description: protein phosphatase 1A; protein id: At5g59160.1, by cDNA: gi_166796 [Arabidopsis thaliana] Serine/threonine protein phosphatase PP1 isozyme 2
  misc_feature (38)..(341): Homolog of NCBI NO: 1346764 NR Description: SERINE/THREONINE PROTEIN PHOSPHATASE PP1
  misc_feature (32)..(341): Homolog of NCBI NO: 99751 NR Description: phosphoprotein phosphatase (EC 3.1.3.16) 1A
  misc_feature (36)..(341): Homolog of NCBI NO: 11133833 NR Description: Serine/threonine protein phosphatase PP1 isozyme 2
  misc_feature (32)..(341): Homolog of NCBI NO: 15225576 NR Description: phosphoprotein phosphatase type 1 catalytic protein id: At2g39840.1, supported by cDNA: gi_166800 thaliana] >gi|1346758|sp|P48484|PP14_ARATH Serine/threonine
  misc_feature (24)..(341): Homolog of NCBI NO: 11133831 NR Description: Serine/threonine protein phosphatase PP1 isozyme 1
NSRAGASFTLENLRSFSTSFRSEMAEKPAQEQEQKRAMEPAVLDDIIRRLVEFRNTRPGSGKQVHLSEGEIRQLCAVSKEIFLQQPNLLELEAPIKICGDIHGQYSDLLRLFEYGGFPPEANYLFLGDYVDRGKQSLETICLLLAYKIKYPENFFLLRGNHESASINRIYGFYDECKRRFNVRLWKIFTDCFNCLPVAALIDDRILCMHGGISPELKSLDQIRNIARPMDIPESGLVCDLLWSDPSGDVGWGMNDRGVSYTFGADKVAEFLEKHDMDLICRAHQVVEDGYEFFAERQLVTVFSAPNYCGEFDNAGAMMSIDESLMCSFQILKPSEKKSPFL

SEQ ID NO: 76986 - protein, 318 aa, Arabidopsis thaliana
  peptide (1)..(318): Ceres Seq. ID no. 12482395
  misc_feature (70)..(264): Pfam Name: Calcineurin-like phosphoesterase Pfam Description: Calcineurin-like phosphoesterase
  misc_feature (1)..(318): Homolog of NCBI NO: 15227080 NR Description: phosphoprotein phosphatase-type 1 catalytic protein id: At2g29400.1, supported by cDNA: gi_166571, supported cDNA: gi_19424067 [Arabidopsis thaliana]
  misc_feature (1)..(318): Homolog of NCBI NO: 25289017 NR Description: phosphoprotein phosphatase (EC 3.1.3.16) 1
  misc_feature (1)..(314): Homolog of NCBI NO: 1346762 NR Description: SERINE/THREONINE PROTEIN PHOSPHATASE PP1
  misc_feature (15)..(318): Homolog of NCBI NO: 5917726 NR Description: serine/threonine protein phosphatase 1; PP1
  misc_feature (9)..(318): Homolog of NCBI NO: 15237829 NR Description: protein phosphatase 1A; protein id: At5g59160.1, by cDNA: gi_166796 [Arabidopsis thaliana] Serine/threonine protein phosphatase PP1 isozyme 2
  misc_feature (15)..(318): Homolog of NCBI NO: 1346764 NR Description: SERINE/THREONINE PROTEIN PHOSPHATASE PP1
  misc_feature (9)..(318): Homolog of NCBI NO: 99751 NR Description: phosphoprotein phosphatase (EC 3.1.3.16) 1A
  misc_feature (13)..(318): Homolog of NCBI NO: 11133833 NR Description: Serine/threonine protein phosphatase PP1 isozyme 2
  misc_feature (9)..(318): Homolog of NCBI NO: 15225576 NR Description: phosphoprotein phosphatase type 1 catalytic protein id: At2g39840.1, supported by cDNA: gi_166800 thaliana] >gi|1346758|sp|P48484|PP14_ARATH Serine/threonine
  misc_feature (1)..(318): Homolog of NCBI NO: 11133831 NR Description: Serine/threonine protein phosphatase PP1 isozyme 1
MAEKPAQEQEQKRAMEPAVLDDIIRRLVEFRNTRPGSGKQVHLSEGEIRQLCAVSKEIFLQQPNLLELEAPIKICGDIHGQYSDLLRLFEYGGFPPEANYLFLGDYVDRGKQSLETICLLLAYKIKYPENFFLLRGNHESASINRIYGFYDECKRRFNVRLWKIFTDCFNCLPVAALIDDRILCMHGGISPELKSLDQIRNIARPMDIPESGLVCDLLWSDPSGDVGWGMNDRGVSYTFGADKVAEFLEKHDMDLICRAHQVVEDGYEFFAERQLVTVFSAPNYCGEFDNAGAMMSIDESLMCSFQILKPSEKKSPFL

SEQ ID NO: 76987 - protein, 304 aa, Arabidopsis thaliana
  peptide (1)..(304): Ceres Seq. ID no. 12482396
  misc_feature (56)..(250): Pfam Name: Calcineurin-like phosphoesterase Pfam Description: Calcineurin-like phosphoesterase
  misc_feature (1)..(304): Homolog of NCBI NO: 15227080 NR Description: phosphoprotein phosphatase-type 1 catalytic protein id: At2g29400.1, supported by cDNA: gi_166571, supported cDNA: gi_19424067 [Arabidopsis thaliana]
  misc_feature (1)..(304): Homolog of NCBI NO: 25289017 NR Description: phosphoprotein phosphatase (EC 3.1.3.16) 1
  misc_feature (1)..(300): Homolog of NCBI NO: 1346762 NR Description: SERINE/THREONINE PROTEIN PHOSPHATASE PP1
  misc_feature (1)..(304): Homolog of NCBI NO: 5917726 NR Description: serine/threonine protein phosphatase 1; PP1
  misc_feature (1)..(304): Homolog of NCBI NO: 15237829 NR Description: protein phosphatase 1A; protein id: At5g59160.1, by cDNA: gi_166796 [Arabidopsis thaliana] Serine/threonine protein phosphatase PP1 isozyme 2
  misc_feature (1)..(304): Homolog of NCBI NO: 1346764 NR Description: SERINE/THREONINE PROTEIN PHOSPHATASE PP1
  misc_feature (1)..(304): Homolog of NCBI NO: 99751 NR Description: phosphoprotein phosphatase (EC 3.1.3.16) 1A
  misc_feature (1)..(304): Homolog of NCBI NO: 11133833 NR Description: Serine/threonine protein phosphatase PP1 isozyme 2
  misc_feature (1)..(304): Homolog of NCBI NO: 15225576 NR Description: phosphoprotein phosphatase type 1 catalytic protein id: At2g39840.1, supported by cDNA: gi_166800 thaliana] >gi|1346758|sp|P48484|PP14_ARATH Serine/threonine
  misc_feature (1)..(304): Homolog of NCBI NO: 11133831 NR Description: Serine/threonine protein phosphatase PP1 isozyme 1
MEPAVLDDIIRRLVEFRNTRPGSGKQVHLSEGEIRQLCAVSKEIFLQQPNLLELEAPIKICGDIHGQYSDLLRLFEYGGFPPEANYLFLGDYVDRGKQSLETICLLLAYKIKYPENFFLLRGNHESASINRIYGFYDECKRRFNVRLWKIFTDCFNCLPVAALIDDRILCMHGGISPELKSLDQIRNIARPMDIPESGLVCDLLWSDPSGDVGWGMNDRGVSYTFGADKVAEFLEKHDMDLICRAHQVVEDGYEFFAERQLVTVFSAPNYCGEFDNAGAMMSIDESLMCSFQILKPSEKKSPFL

SEQ ID NO: 76988 - DNA, 1631 bp, Arabidopsis thaliana
  misc_feature (1)..(1631): Ceres Seq. ID no. 12482400
  misc_feature: MA Experiment ID: 20000495 Result: Up-regulated in Transcription
  misc_feature: MA Experiment 20000495 PARAMETER Experiment Name: At_Guard_Cells_P Parameter: Harvest Date Value: 8/2/2002
  misc_feature: MA Experiment 20000495 PARAMETER Experiment Name: At_Guard_Cells_P Parameter: Organism Value: A. thaliana
  misc_feature: MA Experiment 20000495 PARAMETER Experiment Name: At_Guard_Cells_P Parameter: Tissue Value: Guard Cells vs. Leaves
  misc_feature: MA Experiment ID: 20001451 Result: Up-regulated in Transcription
  misc_feature: MA Experiment 20001451 PARAMETER Experiment Name: At_Far-red-induction_P Parameter: Age (day) Value: 7
  misc_feature: MA Experiment 20001451 PARAMETER Experiment Name: At_Far-red-induction_P Parameter: Light Value: Far-red vs. White
  misc_feature: MA Experiment 20001451 PARAMETER Experiment Name: At_Far-red-induction_P Parameter: Organism Value: A. thaliana
  misc_feature: MA Experiment 20001451 PARAMETER Experiment Name: At_Far-red-induction_P Parameter: Plant Line Value: Columbia
  misc_feature: MA Experiment 20001451 PARAMETER Experiment Name: At_Far-red-induction_P Parameter: Timepoint (hr) Value: 24
  misc_feature: MA Experiment 20001451 PARAMETER Experiment Name: At_Far-red-induction_P Parameter: Tissue Value: Whole Plant
  misc_feature: MA Experiment ID: 20001560 Result: Up-regulated in Transcription
  misc_feature: MA Experiment 20001560 PARAMETER Experiment Name: At_Drought_Soil_Dry_P Parameter: Age (day) Value: 28
  misc_feature: MA Experiment 20001560 PARAMETER Experiment Name: At_Drought_Soil_Dry_P Parameter: Organism Value: A. thaliana
  misc_feature: MA Experiment 20001560 PARAMETER Experiment Name: At_Drought_Soil_Dry_P Parameter: Plant Line Value: WS
  misc_feature: MA Experiment 20001560 PARAMETER Experiment Name: At_Drought_Soil_Dry_P Parameter: Post Timepoint (hr) Value: None
  misc_feature: MA Experiment 20001560 PARAMETER Experiment Name: At_Drought_Soil_Dry_P Parameter: Post-Treatment Value: None
  misc_feature: MA Experiment 20001560 PARAMETER Experiment Name: At_Drought_Soil_Dry_P Parameter: Timepoint (day) Value: 14
  misc_feature: MA Experiment 20001560 PARAMETER Experiment Name: At_Drought_Soil_Dry_P Parameter: Treatment Value: Drought vs. No Drought
  misc_feature: MA Experiment ID: 20001911 Result: Up-regulated in Transcription
  misc_feature: MA Experiment 20001911 PARAMETER Experiment Name: At_Drought_Reproduction_P Parameter: Age (day) Value: 40
  misc_feature: MA Experiment 20001911 PARAMETER Experiment Name: At_Drought_Reproduction_P Parameter: Organism Value: A. thaliana
  misc_feature: MA Experiment 20001911 PARAMETER Experiment Name: At_Drought_Reproduction_P Parameter: Plant Line Value: WS
  misc_feature: MA Experiment 20001911 PARAMETER Experiment Name: At_Drought_Reproduction_P Parameter: Timepoint (day) Value: 10
  misc_feature: MA Experiment 20001911 PARAMETER Experiment Name: At_Drought_Reproduction_P Parameter: Tissue Value: Flowers
  misc_feature: MA Experiment 20001911 PARAMETER Experiment Name: At_Drought_Reproduction_P Parameter: Treatment Value: Drought vs. No Drought
cttctcctctgccatgaaaatcgcagttcctcaagacaaaacctcctcagaaatctcccatctttgatgacttttgcttccttagttttcactttcttgtccgaacgctctcaaaaactttgagaccaccccaataaacgaattaaacagactattatcaatcaatacacaacacaacaatcaaaccaaaccccatggctgagaatcttgcttgtggtgaaaccagcgagtcatggatcattgacaacgacgatgatgatatcaactatggcggcggatttacgaacgagattgattacaatcaccaactttttgctaaagacgacaactttggcggcaacggatcaattccgatgatgggttcttcttcatcgtccttgagtgaagacagaatcaaagagatgttggtgagagagattgagttttgccctggaactgattatgttaagagattgctttctggtgatttggatttgtctgttcgaaaccaagctcttgattggattctaaaggtttgtgctcattaccattttggacatctgtgcatatgcctatccatgaactacttggatcggttcttaacatcctatgaattgccgaaagacaaggattgggctgctcagttactagctgtgtcttgcttatcattagcatccaaaatggaagaaactgatgtgcctcacattgttgatttacaggtggaagatcccaagtttgtttttgaggccaaaacaataaaaaggatggagcttttggttgtcaccactttgaattggagattgcaagctctaactccattctccttcattgattatttcgttgacaagatcagtggtcacgtgtcggagaatttgatctatagatcgtcaagattcatcttaaacaccaccaaagcaattgaattcttagacttcaggccttctgagatagctgcagctgctgcagtgtctgtttccatttcaggagaaacagaatgcattgatgaggaaaaggcactgtctagtctcatatatgtaaaacaggagagggtgaagagatgtttgaatctgatgagaagtctcactggggaggagaatgtgcggggaactagtttatcgcaggagcaggcgcgagttgcggtaagagctgtacctgcaagtccagttggagtgttggaagcaacatgtttgagctataggagtgaagagagaacagttgagtcatgtacaaattcctcacagagtagtccagacaacaacaacaacaacaacaacagcaacaagaggaggagaaaacaatgagagagaataaaagagtcatacattgctttttacaacccaaaaccacaagtactcatgacatttgaggttcttatttatttttttggttttttttttctacataaattttctttttctttctttgatttctcattttcaatctgaaaattggattgaatatgagagttttgtgagaaaggaaaaaagaaaataagagagagagagagagctctttggaaggcggcaaaattaataagtcattattgatgatgatgagagacatccctgttcttgctccaagggacttttttttttctacataatgtcagagatataattaaaaaaaaaagaaatagaaagagaattaatttt

SEQ ID NO: 76989 - protein, 361 aa, Arabidopsis thaliana
  peptide (1)..(361): Ceres Seq. ID no. 12482401
  misc_feature (65)..(197): Pfam Name: Cyclin, N-terminal domain Pfam Description: Cyclin, N-terminal domain
  misc_feature (1)..(361): Homolog of NCBI NO: 15227224 NR Description: Cyclin D2;1; protein id: At2g22490.1 [Arabidopsis
  misc_feature (1)..(361): Homolog of NCBI NO: 1076312 NR Description: cyclin delta-2 - Arabidopsis thaliana
  misc_feature (1)..(343): Homolog of NCBI NO: 4160298 NR Description: cyclin D2.1 protein [Nicotiana tabacum]
  misc_feature (44)..(345): Homolog of NCBI NO: 22091622 NR Description: cyclin D2 [Daucus carota]
  misc_feature (80)..(345): Homolog of NCBI NO: 7484663 NR Description: cyclin D-like protein - red goosefoot
  misc_feature (62)..(344): Homolog of NCBI NO: 19070611 NR Description: D-type cyclin [Zea mays]
  misc_feature (51)..(288): Homolog of NCBI NO: 4688615 NR Description: D-type cyclin [Arabidopsis thaliana]
  misc_feature (51)..(288): Homolog of NCBI NO: 15238462 NR Description: Cyclin D4;1; protein id: At5g65420.1, supported
  misc_feature (51)..(288): Homolog of NCBI NO: 21536631 NR Description: D-type cyclin [Arabidopsis thaliana]
  misc_feature (63)..(358): Homolog of NCBI NO: 18916916 NR Description: cyclin [Oryza sativa (japonica cultivar-group)]
MAENLACGETSESWIIDNDDDDINYGGGFTNEIDYNHQLFAKDDNFGGNGSIPMMGSSSSSLSEDRIKEMLVREIEFCPGTDYVKRLLSGDLDLSVRNQALDWILKVCAHYHFGHLCICLSMNYLDRFLTSYELPKDKDWAAQLLAVSCLSLASKMEETDVPHIVDLQVEDPKFVFEAKTIKRMELLVVTTLNWRLQALTPFSFIDYFVDKISGHVSENLIYRSSRFILNTTKAIEFLDFRPSEIAAAAAVSVSISGETECIDEEKALSSLIYVKQERVKRCLNLMRSLTGEENVRGTSLSQEQARVAVRAVPASPVGVLEATCLSYRSEERTVESCTNSSQSSPDNNNNNNNSNKRRRKQ

SEQ ID NO: 76990 - protein, 308 aa, Arabidopsis thaliana
  peptide (1)..(308): Ceres Seq. ID no. 12482402
  misc_feature (12)..(144): Pfam Name: Cyclin, N-terminal domain Pfam Description: Cyclin, N-terminal domain
  misc_feature (1)..(308): Homolog of NCBI NO: 15227224 NR Description: Cyclin D2;1; protein id: At2g22490.1 [Arabidopsis
  misc_feature (1)..(308): Homolog of NCBI NO: 1076312 NR Description: cyclin delta-2 - Arabidopsis thaliana
  misc_feature (1)..(290): Homolog of NCBI NO: 4160298 NR Description: cyclin D2.1 protein [Nicotiana tabacum]
  misc_feature (1)..(292): Homolog of NCBI NO: 22091622 NR Description: cyclin D2 [Daucus carota]
  misc_feature (27)..(292): Homolog of NCBI NO: 7484663 NR Description: cyclin D-like protein - red goosefoot
  misc_feature (9)..(291): Homolog of NCBI NO: 19070611 NR Description: D-type cyclin [Zea mays]
  misc_feature (1)..(235): Homolog of NCBI NO: 4688615 NR Description: D-type cyclin [Arabidopsis thaliana]
  misc_feature (1)..(235): Homolog of NCBI NO: 15238462 NR Description: Cyclin D4;1; protein id: At5g65420.1, supported
  misc_feature (1)..(235): Homolog of NCBI NO: 21536631 NR Description: D-type cyclin [Arabidopsis thaliana]
  misc_feature (10)..(305): Homolog of NCBI NO: 18916916 NR Description: cyclin [Oryza sativa (japonica cultivar-group)]
MMGSSSSSLSEDRIKEMLVREIEFCPGTDYVKRLLSGDLDLSVRNQALDWILKVCAHYHFGHLCICLSMNYLDRFLTSYELPKDKDWAAQLLAVSCLSLASKMEETDVPHIVDLQVEDPKFVFEAKTIKRMELLVVTTLNWRLQALTPFSFIDYFVDKISGHVSENLIYRSSRFILNTTKAIEFLDFRPSEIAAAAAVSVSISGETECIDEEKALSSLIYVKQERVKRCLNLMRSLTGEENVRGTSLSQEQARVAVRAVPASPVGVLEATCLSYRSEERTVESCTNSSQSSPDNNNNNNNSNKRRRKQ

SEQ ID NO: 76991 - protein, 307 aa, Arabidopsis thaliana
  peptide (1)..(307): Ceres Seq. ID no. 12482403
  misc_feature (11)..(143): Pfam Name: Cyclin, N-terminal domain Pfam Description: Cyclin, N-terminal domain
  misc_feature (1)..(307): Homolog of NCBI NO: 15227224 NR Description: Cyclin D2;1; protein id: At2g22490.1 [Arabidopsis
  misc_feature (1)..(307): Homolog of NCBI NO: 1076312 NR Description: cyclin delta-2 - Arabidopsis thaliana
  misc_feature (1)..(289): Homolog of NCBI NO: 4160298 NR Description: cyclin D2.1 protein [Nicotiana tabacum]
  misc_feature (1)..(291): Homolog of NCBI NO: 22091622 NR Description: cyclin D2 [Daucus carota]
  misc_feature (26)..(291): Homolog of NCBI NO: 7484663 NR Description: cyclin D-like protein - red goosefoot
  misc_feature (8)..(290): Homolog of NCBI NO: 19070611 NR Description: D-type cyclin [Zea mays]
  misc_feature (1)..(234): Homolog of NCBI NO: 4688615 NR Description: D-type cyclin [Arabidopsis thaliana]
  misc_feature (1)..(234): Homolog of NCBI NO: 15238462 NR Description: Cyclin D4;1; protein id: At5g65420.1, supported
  misc_feature (1)..(234): Homolog of NCBI NO: 21536631 NR Description: D-type cyclin [Arabidopsis thaliana]
  misc_feature (9)..(304): Homolog of NCBI NO: 18916916 NR Description: cyclin [Oryza sativa (japonica cultivar-group)]
MGSSSSSLSEDRIKEMLVREIEFCPGTDYVKRLLSGDLDLSVRNQALDWILKVCAHYHFGHLCICLSMNYLDRFLTSYELPKDKDWAAQLLAVSCLSLASKMEETDVPHIVDLQVEDPKFVFEAKTIKRMELLVVTTLNWRLQALTPFSFIDYFVDKISGHVSENLIYRSSRFILNTTKAIEFLDFRPSEIAAAAAVSVSISGETECIDEEKALSSLIYVKQERVKRCLNLMRSLTGEENVRGTSLSQEQARVAVRAVPASPVGVLEATCLSYRSEERTVESCTNSSQSSPDNNNNNNNSNKRRRKQ

SEQ ID NO: 76992 - DNA, 2484 bp, Arabidopsis thaliana
  misc_feature (1)..(2484): Ceres Seq. ID no. 12482432
gtcagaatattttgaaaatcacgttgaagctttatggttatctttttaatataatcgtgttagtggagtacagtttgtaaagcaaagcttgcgaggttatgattcatcatcagatccagactctctgattcatcatctgcaatggctcgttggttgcttcagatcctgatcatctcttctcttcatctgagctctgtatcaagtcaacaagagacaagctttgtctatgaaagcttcctcgaccgacaaaatctttatcttgacaaatctgcaatagtacttcccagtggattattgcagttgacaaatgcttcagagcaccagatgggtcatgctttccacaagaaaccaattgagttcagttcatctggaccactctccttctcaacacactttgtgtgtgctttggtgcctaagccaggttttgaaggtggccatggtattgtctttgtattgtctccttctatggactttactcacgcagaatcaactagatacttggggattttcaatgcttcaacaaatggatcttcctcttatcacgtacttgctgttgagcttgacactatttggaacccagatttcaaagatattgaccacaatcatgtggggattgatgtgaacagtcctatatctgtcgcaatagcttcagcatcttactattccgacatgaaagggagtaatgaaagcataaacctcttgagtggaaaccctatacaggtctgggtggattatgaaggcactttgctcaatgtttcggttgctcctcttgaagtccagaagccaactcgacctcttttatcacaccccatcaaccttacagaactttttccaaatagatcaagtctgtttgctgggttctctgcagcaacagggacagcgatcagtgatcaatatattctctggtggagttttagcatagacagaggatcgctgcagcgacttgatatctcaaaacttcctgaagttcctcatcctagagctccacataagaaagtatctacactgattattctcctacccgtttgtctggctattttggtgttggctgttcttgcaggactttatttccgcaggagacgcaagtattcagaagtatctgaaacatgggaaaaggagtttgatgcgcatcggttctcttacaggtccttgttcaaagcaacaaaggggttcagcaaagatgaatttctgggaaaaggaggttttggagaagtttatagaggaaatctcccacaaggcagagaaatagcagtgaaaagagtgtcccataatggtgatgaaggtgtgaagcagtttgtggctgaagtcgtgagcatgagatgtctgaaacacaggaatcttgtaccactgtttgggtattgcagaagaaaacgagaacttcttcttgtctcagagtacatgcccaatggtagtcttgacgagcatttgtttgatgaccagaaaccggttctttcttggtcacagagacttgtggtcgttaagggtatagcctctgctctctggtacctgcatacaggtgctgaccaagttgttctgcaccgagatgtcaaagcttccaacattatgttagacgcggagttccatggaaggttaggggattttggcatggccaggtttcatgagcacggaggcaatgcagctacaacagcagctgttgggactgtagggtacatggccccggagctaatcacaatgggagcttccactggaactgatgtttacgcatttggtgttttcatgcttgaagtaacctgtgggaggagacccgtggaaccgcagttgcaagttgagaaacgacatatgatcaaatgggtttgtgagtgctggaaaaaggattctttgcttgatgctactgacccgagattgggaggtaaatttgtagctgaggaagtcgagatggttatgaaactgggtctgctctgttcaaatatagtgccagaatccagacccacaatggaacaagtggtcctgtacctaaacaaaaacctacctttgccagatttctcaccatacactttggggattggcacatttgctccggttctggtagatgcatcctcccttgtagtctcttccgcttcatggagtttgtcaggtccatcgatgtcttcatcctcgcccaaccactcaccttacgcttggcagtcaacagatcagccatggggacagacaatagacactaagaactctcttcacatagttgcagaaccagagaagccctcacccgctgtcaaaatggtcacattgcctgcagaagatcctcagtccaatcattccagcatcagcagtcagaggtaaattagtgatgtacatatcagcaagaagatatcattattagctctcaatattgttttcatctgtctcacttgtcgcaacaaaatctgtttgttcgttgtataatcagttaatgattatacaattctcatattacaacttgtactcctcaatatgattttatacatgatttggtccatatttgggttc

SEQ ID NO: 76993 - protein, 718 aa, Arabidopsis thaliana
  peptide (1)..(718): Ceres Seq. ID no. 12482433
  misc_feature (344)..(612): Pfam Name: Protein kinase domain Pfam Description: Protein kinase domain
  misc_feature (1)..(560): Homolog of NCBI NO: 15239265 NR Description: receptor like protein kinase; protein id:
  misc_feature (598)..(660): Homolog of NCBI NO: 15239265 NR Description: receptor like protein kinase; protein id:
  misc_feature (62)..(663): Homolog of NCBI NO: 15230698 NR Description: receptor like protein kinase; protein id:
  misc_feature (8)..(658): Homolog of NCBI NO: 15239268 NR Description: receptor-like protein kinase; protein id:
  misc_feature (1)..(663): Homolog of NCBI NO: 15230700 NR Description: receptor like protein kinase; protein id:
  misc_feature (5)..(665): Homolog of NCBI NO: 15230670 NR Description: receptor-like protein kinase; protein id:
  misc_feature (9)..(647): Homolog of NCBI NO: 15239261 NR Description: receptor like protein kinase; protein id:
  misc_feature (1)..(645): Homolog of NCBI NO: 15230694 NR Description: receptor-like protein kinase; protein id:
  misc_feature (8)..(642): Homolog of NCBI NO: 15230696 NR Description: receptor-like protein kinase; protein id:
  misc_feature (8)..(661): Homolog of NCBI NO: 34899518 NR Description: putative receptor-like protein kinase [Oryza
MARWLLQILIISSLHLSSVSSQQETSFVYESFLDRQNLYLDKSAIVLPSGLLQLTNASEHQMGHAFHKKPIEFSSSGPLSFSTHFVCALVPKPGFEGGHGIVFVLSPSMDFTHAESTRYLGIFNASTNGSSSYHVLAVELDTIWNPDFKDIDHNHVGIDVNSPISVAIASASYYSDMKGSNESINLLSGNPIQVWVDYEGTLLNVSVAPLEVQKPTRPLLSHPINLTELFPNRSSLFAGFSAATGTAISDQYILWWSFSIDRGSLQRLDISKLPEVPHPRAPHKKVSTLIILLPVCLAILVLAVLAGLYFRRRRKYSEVSETWEKEFDAHRFSYRSLFKATKGFSKDEFLGKGGFGEVYRGNLPQGREIAVKRVSHNGDEGVKQFVAEVVSMRCLKHRNLVPLFGYCRRKRELLLVSEYMPNGSLDEHLFDDQKPVLSWSQRLVVVKGIASALWYLHTGADQVVLHRDVKASNIMLDAEFHGRLGDFGMARFHEHGGNAATTAAVGTVGYMAPELITMGASTGTDVYAFGVFMLEVTCGRRPVEPQLQVEKRHMIKWVCECWKKDSLLDATDPRLGGKFVAEEVEMVMKLGLLCSNIVPESRPTMEQVVLYLNKNLPLPDFSPYTLGIGTFAPVLVDASSLVVSSASWSLSGPSMSSSSPNHSPYAWQSTDQPWGQTIDTKNSLHIVAEPEKPSPAVKMVTLPAEDPQSNHSSISSQR

SEQ ID NO: 76994 - protein, 657 aa, Arabidopsis thaliana
  peptide (1)..(657): Ceres Seq. ID no. 12482434
  misc_feature (283)..(551): Pfam Name: Protein kinase domain Pfam Description: Protein kinase domain
  misc_feature (1)..(499): Homolog of NCBI NO: 15239265 NR Description: receptor like protein kinase; protein id:
  misc_feature (537)..(599): Homolog of NCBI NO: 15239265 NR Description: receptor like protein kinase; protein id:
  misc_feature (1)..(602): Homolog of NCBI NO: 15230698 NR Description: receptor like protein kinase; protein id:
  misc_feature (1)..(597): Homolog of NCBI NO: 15239268 NR Description: receptor-like protein kinase; protein id:
  misc_feature (1)..(602): Homolog of NCBI NO: 15230700 NR Description: receptor like protein kinase; protein id:
  misc_feature (1)..(604): Homolog of NCBI NO: 15230670 NR Description: receptor-like protein kinase; protein id:
  misc_feature (1)..(586): Homolog of NCBI NO: 15239261 NR Description: receptor like protein kinase; protein id:
  misc_feature (1)..(584): Homolog of NCBI NO: 15230694 NR Description: receptor-like protein kinase; protein id:
  misc_feature (1)..(581): Homolog of NCBI NO: 15230696 NR Description: receptor-like protein kinase; protein id:
  misc_feature (1)..(600): Homolog of NCBI NO: 34899518 NR Description: putative receptor-like protein kinase [Oryza
MGHAFHKKPIEFSSSGPLSFSTHFVCALVPKPGFEGGHGIVFVLSPSMDFTHAESTRYLGIFNASTNGSSSYHVLAVELDTIWNPDFKDIDHNHVGIDVNSPISVAIASASYYSDMKGSNESINLLSGNPIQVWVDYEGTLLNVSVAPLEVQKPTRPLLSHPINLTELFPNRSSLFAGFSAATGTAISDQYILWWSFSIDRGSLQRLDISKLPEVPHPRAPHKKVSTLIILLPVCLAILVLAVLAGLYFRRRRKYSEVSETWEKEFDAHRFSYRSLFKATKGFSKDEFLGKGGFGEVYRGNLPQGREIAVKRVSHNGDEGVKQFVAEVVSMRCLKHRNLVPLFGYCRRKRELLLVSEYMPNGSLDEHLFDDQKPVLSWSQRLVVVKGIASALWYLHTGADQVVLHRDVKASNIMLDAEFHGRLGDFGMARFHEHGGNAATTAAVGTVGYMAPELITMGASTGTDVYAFGVFMLEVTCGRRPVEPQLQVEKRHMIKWVCECWKKDSLLDATDPRLGGKFVAEEVEMVMKLGLLCSNIVPESRPTMEQVVLYLNKNLPLPDFSPYTLGIGTFAPVLVDASSLVVSSASWSLSGPSMSSSSPNHSPYAWQSTDQPWGQTIDTKNSLHIVAEPEKPSPAVKMVTLPAEDPQSNHSSISSQR

SEQ ID NO: 76995 - protein, 610 aa, Arabidopsis thaliana
  peptide (1)..(610): Ceres Seq. ID no. 12482435
  misc_feature (236)..(504): Pfam Name: Protein kinase domain Pfam Description: Protein kinase domain
  misc_feature (1)..(452): Homolog of NCBI NO: 15239265 NR Description: receptor like protein kinase; protein id:
  misc_feature (490)..(552): Homolog of NCBI NO: 15239265 NR Description: receptor like protein kinase; protein id:
  misc_feature (1)..(555): Homolog of NCBI NO: 15230698 NR Description: receptor like protein kinase; protein id:
  misc_feature (1)..(550): Homolog of NCBI NO: 15239268 NR Description: receptor-like protein kinase; protein id:
  misc_feature (1)..(555): Homolog of NCBI NO: 15230700 NR Description: receptor like protein kinase; protein id:
  misc_feature (1)..(557): Homolog of NCBI NO: 15230670 NR Description: receptor-like protein kinase; protein id:
  misc_feature (1)..(539): Homolog of NCBI NO: 15239261 NR Description: receptor like protein kinase; protein id:
  misc_feature (1)..(537): Homolog of NCBI NO: 15230694 NR Description: receptor-like protein kinase; protein id:
  misc_feature (1)..(534): Homolog of NCBI NO: 15230696 NR Description: receptor-like protein kinase; protein id:
  misc_feature (1)..(553): Homolog of NCBI NO: 34899518 NR Description: putative receptor-like protein kinase [Oryza
MDFTHAESTRYLGIFNASTNGSSSYHVLAVELDTIWNPDFKDIDHNHVGIDVNSPISVAIASASYYSDMKGSNESINLLSGNPIQVWVDYEGTLLNVSVAPLEVQKPTRPLLSHPINLTELFPNRSSLFAGFSAATGTAISDQYILWWSFSIDRGSLQRLDISKLPEVPHPRAPHKKVSTLIILLPVCLAILVLAVLAGLYFRRRRKYSEVSETWEKEFDAHRFSYRSLFKATKGFSKDEFLGKGGFGEVYRGNLPQGREIAVKRVSHNGDEGVKQFVAEVVSMRCLKHRNLVPLFGYCRRKRELLLVSEYMPNGSLDEHLFDDQKPVLSWSQRLVVVKGIASALWYLHTGADQVVLHRDVKASNIMLDAEFHGRLGDFGMARFHEHGGNAATTAAVGTVGYMAPELITMGASTGTDVYAFGVFMLEVTCGRRPVEPQLQVEKRHMIKWVCECWKKDSLLDATDPRLGGKFVAEEVEMVMKLGLLCSNIVPESRPTMEQVVLYLNKNLPLPDFSPYTLGIGTFAPVLVDASSLVVSSASWSLSGPSMSSSSPNHSPYAWQSTDQPWGQTIDTKNSLHIVAEPEKPSPAVKMVTLPAEDPQSNHSSISSQR

SEQ ID NO: 76996 - DNA, 1116 bp, Arabidopsis thaliana
  misc_feature (1)..(1116): Ceres Seq. ID no. 12482488
aaagattctcaaaacatttcatcactctccaacaactattcaccacattcaatggagtcaccaccactatacgagatatcctcaagctcttcttctgaaaaacctagacaccatttccaatcccttgatctcttccctaacctcaaccaaaactcttgtatcaacaataccctaattgagcctttaccgcttattgatcgcataaacttgaactcaaacctagacctaaaccctaatcccttgtatgcggaagaaggagagcaagaggaggaagaagaagaagaagaagaccgtgaagtggacgtggacttacacatcggccttcctggttttggtaaaccaagcaatgatgctaaacagctgaagaagagaaatgggaaggagatcgccacatatgacgccggaaaaggcatcgagaatgaactttccggaaaggcatactggatcccggcgccggagcaaattctcatagggttcactcatttttcttgccatgtatgcttcaagacattcaatcgctacaacaatcttcagatgcacatgtggggacatggttcacaatacaggaaaggaccggagtcactgaaaggcacacagccacgagccatgttagggatcccttgttactgctgcgttgaagggtgcaggaacaacattgaccatcctcgttccaagccactgaaagactttaggacgctccaaacgcactacaaacgcaaacacggacacaaacccttctcgtgtcgcctttgcggtaagcttttggctgtcaagggcgattggcgaacacatgagaagaattgtggaaaacgttgggtttgcgtttgcggttctgattttaaacacaaacgttcccttaaggaccatgttaaggcgtttgggtctggtcatgggccttatccaactggtttgtttgaagagcaggcttctaattcatctgtctccgagactttttttttttaaatttgggtatctttttcttttcacttatggaatatctatttactttagaaaaataatacaatgtggtatctaattgttccaaattaggaacacgaagtgtaccattatatttttcatcactatattagttaataaatgaaagatatgaatgag

SEQ ID NO: 76997 - protein, 320 aa, Arabidopsis thaliana
  peptide (1)..(320): Ceres Seq. ID no. 12482489
  misc_feature (162)..(184): Pfam Name: Zinc finger, C2H2 type Pfam Description: Zinc finger, C2H2 type
  misc_feature (18)..(320): Homolog of NCBI NO: 18253283 NR Description: transparent testa 1 [Arabidopsis thaliana]
  misc_feature (18)..(320): Homolog of NCBI NO: 30693123 NR Description: transparent testa 1 (TT1) protein [Arabidopsis >gi|27151706|sp|Q8VWG3|TT1_ARATH TRANSPARENT TESTA 1 protein finger protein TT1) (TTL1) >gi|18253279|gb|AAL66405.1|AF190297_1
  misc_feature (18)..(178): Homolog of NCBI NO: 18026946 NR Description: mutant transparent testa 1 protein TT1 thaliana] >gi|18253285|gb|AAL66408.1|AF190300_1 mutant
  misc_feature (133)..(316): Homolog of NCBI NO: 15230370 NR Description: zinc finger - like protein; protein id: supported by cDNA: gi_18027011 [Arabidopsis thaliana]
  misc_feature (133)..(316): Homolog of NCBI NO: 28973719 NR Description: putative zinc finger protein [Arabidopsis
  misc_feature (58)..(299): Homolog of NCBI NO: 15223781 NR Description: hypothetical protein; protein id: At1g51220.1 thaliana] >gi|18376498|emb|CAC86167.1| WIP5 protein [Arabidopsis
KDSQNISSLSNNYSPHSMESPPLYEISSSSSSEKPRHHFQSLDLFPNLNQNSCINNTLIEPLPLIDRINLNSNLDLNPNPLYAEEGEQEEEEEEEEDREVDVDLHIGLPGFGKPSNDAKQLKKRNGKEIATYDAGKGIENELSGKAYWIPAPEQILIGFTHFSCHVCFKTFNRYNNLQMHMWGHGSQYRKGPESLKGTQPRAMLGIPCYCCVEGCRNNIDHPRSKPLKDFRTLQTHYKRKHGHKPFSCRLCGKLLAVKGDWRTHEKNCGKRWVCVCGSDFKHKRSLKDHVKAFGSGHGPYPTGLFEEQASNSSVSETFFF

SEQ ID NO: 76998 - protein, 303 aa, Arabidopsis thaliana
  peptide (1)..(303): Ceres Seq. ID no. 12482490
  misc_feature (145)..(167): Pfam Name: Zinc finger, C2H2 type Pfam Description: Zinc finger, C2H2 type
  misc_feature (1)..(303): Homolog of NCBI NO: 18253283 NR Description: transparent testa 1 [Arabidopsis thaliana]
  misc_feature (1)..(303): Homolog of NCBI NO: 30693123 NR Description: transparent testa 1 (TT1) protein [Arabidopsis >gi|27151706|sp|Q8VWG3|TT1_ARATH TRANSPARENT TESTA 1 protein finger protein TT1) (TTL1) >gi|18253279|gb|AAL66405.1|AF190297_1
  misc_feature (1)..(161): Homolog of NCBI NO: 18026946 NR Description: mutant transparent testa 1 protein TT1 thaliana] >gi|18253285|gb|AAL66408.1|AF190300_1 mutant
  misc_feature (116)..(299): Homolog of NCBI NO: 15230370 NR Description: zinc finger - like protein; protein id: supported by cDNA: gi_18027011 [Arabidopsis thaliana]
  misc_feature (116)..(299): Homolog of NCBI NO: 28973719 NR Description: putative zinc finger protein [Arabidopsis
  misc_feature (41)..(282): Homolog of NCBI NO: 15223781 NR Description: hypothetical protein; protein id: At1g51220.1 thaliana] >gi|18376498|emb|CAC86167.1| WIP5 protein [Arabidopsis
MESPPLYEISSSSSSEKPRHHFQSLDLFPNLNQNSCINNTLIEPLPLIDRINLNSNLDLNPNPLYAEEGEQEEEEEEEEDREVDVDLHIGLPGFGKPSNDAKQLKKRNGKEIATYDAGKGIENELSGKAYWIPAPEQILIGFTHFSCHVCFKTFNRYNNLQMHMWGHGSQYRKGPESLKGTQPRAMLGIPCYCCVEGCRNNIDHPRSKPLKDFRTLQTHYKRKHGHKPFSCRLCGKLLAVKGDWRTHEKNCGKRWVCVCGSDFKHKRSLKDHVKAFGSGHGPYPTGLFEEQASNSSVSETFFF

SEQ ID NO: 76999 - DNA, 1720 bp, Arabidopsis thaliana
  misc_feature (1)..(1720): Ceres Seq. ID no. 12482567
  misc_feature: MA Experiment ID: 20000314 Result: Down-regulated in Transcription
  misc_feature: MA Experiment 20000314 PARAMETER Experiment Name: At_14day_Shoots-Roots_Sub_P Parameter: Age (day) Value: 14
  misc_feature: MA Experiment 20000314 PARAMETER Experiment Name: At_14day_Shoots-Roots_Sub_P Parameter: Organism Value: A. thaliana
  misc_feature: MA Experiment 20000314 PARAMETER Experiment Name: At_14day_Shoots-Roots_Sub_P Parameter: Plant Line Value: WS
  misc_feature: MA Experiment 20000314 PARAMETER Experiment Name: At_14day_Shoots-Roots_Sub_P Parameter: Tissue Value: Roots vs. Whole Plant
  misc_feature: MA Experiment ID: 20000355 Result: Down-regulated in Transcription
  misc_feature: MA Experiment 20000355 PARAMETER Experiment Name: At_Siliques_Sub_P Parameter: Age (day) Value: 21
  misc_feature: MA Experiment 20000355 PARAMETER Experiment Name: At_Siliques_Sub_P Parameter: Organism Value: A. thaliana
  misc_feature: MA Experiment 20000355 PARAMETER Experiment Name: At_Siliques_Sub_P Parameter: Plant Line Value: WS
  misc_feature: MA Experiment 20000355 PARAMETER Experiment Name: At_Siliques_Sub_P Parameter: Tissue Value: Less Than 5mm Siliques vs. Whole Plant
  misc_feature: MA Experiment ID: 20000440 Result: Down-regulated in Transcription
  misc_feature: MA Experiment 20000440 PARAMETER Experiment Name: At_Closed-Flower__Sub_P Parameter: Tissue Value: Closed Flower vs. Whole Plant
aagagcgcagaacgcacggtacaactactcccgcccttgatgatctgaatccaggaaaacaggatccaagtggggttgaattatggaggatgagacgagatcaacgtcatcactttccgatatagctattagtattatcgacgaaggtcctctttctccattacgacaacgtagtgaaagaagtgttgtatctcatatcaaacgcaacttacagtcatcggggaaaccactgattcttttggaatcagctggtaaggcgtcctgctgcatcttcagaatccctgatagcctcgcagaggtgaatcctaaagcctataagcccaaagttgtttccattggtccttatcattacggagaaaatcacctccaaatgattcagcagcacaagtttcggtttctggagcttttcgtagacagggcaacaaagaaaggaatggacgaaaacgtcttgtatgcggcagtaggtgctttgcaacacaagataagagcttcttattctgaggaacttaggatagaaaaatcagaactggtgtctatgatgattttggatgggtgcttcattctcatgttgttacttatcgtgtcaagaaagatagatttggatatgaataaggatccaatcttcacgatcccctggattttggcatctattcagagtgatcttctcctcttggaaaatcaggtccctttctttgttcttcgaactatatttgataaatcaggaatagggtcacctggtgatctaaacaggatggcgtttagcttcttcaacctctcaatagataaaccagatacatattgggcgaaacacagagaccgcggggctaaacatcttcttgacctcaaccgtaagaccttcatacctagcatgagatctatgggtgaatcagaaacaacaccatcctcgaaatttcaacactctaagggtaaatccggagaagtatcatcgtcagagtctacatttccgttgatactgtcggccaaaagacttcgcctccaagggataaagttcaggttaaggagtgatgctgaatcaatattagatataaaattaaagaagaacaagcttcagataccactgttaagattggatggtttcatcagctcaatcttcctcaactgtgttgcctttgaacagttttacacagagagtaccaacgacataacaagctacgtggttttcatgggatgtcttctaaacgatcaggaagatgctactttcttgaacaacgacaagcggatcatagagaactactttggcaacgagaatgaggtatcacagtttttcaaaactatatgtaaagatgttgtatttgacacacgtagaagttacttacggaatgtgtttgagggagttaacgagtacacctccaaaacgtacaatggagtatgggctggctttaggcacacgcactttgagtcaccatggactgctctgtcatcctttgctgttgttttcgttattcttcttaccatgacgcaagccgcttatgcgattcgttcctactatcacgatacagagtgagatggaaactcagcttctccataggggcttccttcgggaaaatcacgtgaactacttgttctgttttatccgctacaaatgtcattcgcgctttaattagacccgcacatacgtgcaggatttcatatttttaaaaatatggtgtattaaatttatattcaatttagttttttctaaagtagtatttaatttatt

SEQ ID NO: 77000 - protein, 480 aa, Arabidopsis thaliana
  peptide (1)..(480): Ceres Seq. ID no. 12482568
  misc_feature (56)..(465): Pfam Name: Plant protein of unknown function Pfam Description: Plant protein of unknown function
  misc_feature (1)..(480): Homolog of NCBI NO: 15232754 NR Description: putative protein; protein id: At3g47250.1, by cDNA: gi_17528937, supported by cDNA: gi_20465944 [Arabidopsis >gi|6706134|emb|CAB61971.2| putative protein [Arabidopsis
  misc_feature (1)..(480): Homolog of NCBI NO: 22655194 NR Description: unknown protein [Arabidopsis thaliana]
  misc_feature (1)..(480): Homolog of NCBI NO: 11291796 NR Description: hypothetical protein F13I12.300 - Arabidopsis
  misc_feature (41)..(480): Homolog of NCBI NO: 15232748 NR Description: putative protein; protein id: At3g47200.1
  misc_feature (23)..(434): Homolog of NCBI NO: 15232749 NR Description: putative protein; protein id: At3g47210.1, by cDNA: gi_17978925 [Arabidopsis thaliana]
  misc_feature (35)..(476): Homolog of NCBI NO: 15242911 NR Description: putative protein; protein id: At5g22540.1 thaliana] >gi|9758660|dbj|BAB09126.1|
  misc_feature (245)..(477): Homolog of NCBI NO: 15230487 NR Description: putative protein; protein id: At3g44710.1
  misc_feature (44)..(263): Homolog of NCBI NO: 15230487 NR Description: putative protein; protein id: At3g44710.1
  misc_feature (264)..(476): Homolog of NCBI NO: 9758661 NR Description: emb|CAB72473.1~gene_id:MQJ16.9~strong similarity
  misc_feature (49)..(262): Homolog of NCBI NO: 9758661 NR Description: emb|CAB72473.1~gene_id:MQJ16.9~strong similarity
MEDETRSTSSLSDIAISIIDEGPLSPLRQRSERSVVSHIKRNLQSSGKPLILLESAGKASCCIFRIPDSLAEVNPKAYKPKVVSIGPYHYGENHLQMIQQHKFRFLELFVDRATKKGMDENVLYAAVGALQHKIRASYSEELRIEKSELVSMMILDGCFILMLLLIVSRKIDLDMNKDPIFTIPWILASIQSDLLLLENQVPFFVLRTIFDKSGIGSPGDLNRMAFSFFNLSIDKPDTYWAKHRDRGAKHLLDLNRKTFIPSMRSMGESETTPSSKFQHSKGKSGEVSSSESTFPLILSAKRLRLQGIKFRLRSDAESILDIKLKKNKLQIPLLRLDGFISSIFLNCVAFEQFYTESTNDITSYVVFMGCLLNDQEDATFLNNDKRIIENYFGNENEVSQFFKTICKDVVFDTRRSYLRNVFEGVNEYTSKTYNGVWAGFRHTHFESPWTALSSFAVVFVILLTMTQAAYAIRSYYHDTE

SEQ ID NO: 77001 - protein, 384 aa, Arabidopsis thaliana
  peptide (1)..(384): Ceres Seq. ID no. 12482569
  misc_feature (1)..(369): Pfam Name: Plant protein of unknown function Pfam Description: Plant protein of unknown function
  misc_feature (1)..(384): Homolog of NCBI NO: 15232754 NR Description: putative protein; protein id: At3g47250.1, by cDNA: gi_17528937, supported by cDNA: gi_20465944 [Arabidopsis >gi|6706134|emb|CAB61971.2| putative protein [Arabidopsis
  misc_feature (1)..(384): Homolog of NCBI NO: 22655194 NR Description: unknown protein [Arabidopsis thaliana]
  misc_feature (1)..(384): Homolog of NCBI NO: 11291796 NR Description: hypothetical protein F13I12.300 - Arabidopsis
  misc_feature (1)..(384): Homolog of NCBI NO: 15232748 NR Description: putative protein; protein id: At3g47200.1
  misc_feature (1)..(338): Homolog of NCBI NO: 15232749 NR Description: putative protein; protein id: At3g47210.1, by cDNA: gi_17978925 [Arabidopsis thaliana]
  misc_feature (1)..(380): Homolog of NCBI NO: 15242911 NR Description: putative protein; protein id: At5g22540.1 thaliana] >gi|9758660|dbj|BAB09126.1|
  misc_feature (149)..(381): Homolog of NCBI NO: 15230487 NR Description: putative protein; protein id: At3g44710.1
  misc_feature (1)..(167): Homolog of NCBI NO: 15230487 NR Description: putative protein; protein id: At3g44710.1
  misc_feature (168)..(380): Homolog of NCBI NO: 9758661 NR Description: emb|CAB72473.1~gene_id:MQJ16.9~strong similarity
  misc_feature (1)..(166): Homolog of NCBI NO: 9758661 NR Description: emb|CAB72473.1~gene_id:MQJ16.9~strong similarity
MIQQHKFRFLELFVDRATKKGMDENVLYAAVGALQHKIRASYSEELRIEKSELVSMMILDGCFILMLLLIVSRKIDLDMNKDPIFTIPWILASIQSDLLLLENQVPFFVLRTIFDKSGIGSPGDLNRMAFSFFNLSIDKPDTYWAKHRDRGAKHLLDLNRKTFIPSMRSMGESETTPSSKFQHSKGKSGEVSSSESTFPLILSAKRLRLQGIKFRLRSDAESILDIKLKKNKLQIPLLRLDGFISSIFLNCVAFEQFYTESTNDITSYVVFMGCLLNDQEDATFLNNDKRIIENYFGNENEVSQFFKTICKDVVFDTRRSYLRNVFEGVNEYTSKTYNGVWAGFRHTHFESPWTALSSFAVVFVILLTMTQAAYAIRSYYHDTE

SEQ ID NO: 77002 - protein, 363 aa, Arabidopsis thaliana
  peptide (1)..(363): Ceres Seq. ID no. 12482570
  misc_feature (1)..(348): Pfam Name: Plant protein of unknown function Pfam Description: Plant protein of unknown function
  misc_feature (1)..(363): Homolog of NCBI NO: 15232754 NR Description: putative protein; protein id: At3g47250.1, by cDNA: gi_17528937, supported by cDNA: gi_20465944 [Arabidopsis >gi|6706134|emb|CAB61971.2| putative protein [Arabidopsis
  misc_feature (1)..(363): Homolog of NCBI NO: 22655194 NR Description: unknown protein [Arabidopsis thaliana]
  misc_feature (1)..(363): Homolog of NCBI NO: 11291796 NR Description: hypothetical protein F13I12.300 - Arabidopsis
  misc_feature (1)..(363): Homolog of NCBI NO: 15232748 NR Description: putative protein; protein id: At3g47200.1
  misc_feature (1)..(317): Homolog of NCBI NO: 15232749 NR Description: putative protein; protein id: At3g47210.1, by cDNA: gi_17978925 [Arabidopsis thaliana]
  misc_feature (1)..(359): Homolog of NCBI NO: 15242911 NR Description: putative protein; protein id: At5g22540.1 thaliana] >gi|9758660|dbj|BAB09126.1|
  misc_feature (128)..(360): Homolog of NCBI NO: 15230487 NR Description: putative protein; protein id: At3g44710.1
  misc_feature (1)..(146): Homolog of NCBI NO: 15230487 NR Description: putative protein; protein id: At3g44710.1
  misc_feature (147)..(359): Homolog of NCBI NO: 9758661 NR Description: emb|CAB72473.1~gene_id:MQJ16.9~strong similarity
  misc_feature (1)..(145): Homolog of NCBI NO: 9758661 NR Description: emb|CAB72473.1~gene_id:MQJ16.9~strong similarity
MDENVLYAAVGALQHKIRASYSEELRIEKSELVSMMILDGCFILMLLLIVSRKIDLDMNKDPIFTIPWILASIQSDLLLLENQVPFFVLRTIFDKSGIGSPGDLNRMAFSFFNLSIDKPDTYWAKHRDRGAKHLLDLNRKTFIPSMRSMGESETTPSSKFQHSKGKSGEVSSSESTFPLILSAKRLRLQGIKFRLRSDAESILDIKLKKNKLQIPLLRLDGFISSIFLNCVAFEQFYTESTNDITSYVVFMGCLLNDQEDATFLNNDKRIIENYFGNENEVSQFFKTICKDVVFDTRRSYLRNVFEGVNEYTSKTYNGVWAGFRHTHFESPWTALSSFAVVFVILLTMTQAAYAIRSYYHDTE

SEQ ID NO: 77003 - DNA, 1273 bp, Arabidopsis thaliana
  misc_feature (1)..(1273): Ceres Seq. ID no. 12482582
  misc_feature: MA Experiment ID: 20000171 Result: Up-regulated in Transcription
  misc_feature: MA Experiment 20000171 PARAMETER Experiment Name: At_42deg_Heat_P Parameter: Age (day) Value: 14
  misc_feature: MA Experiment 20000171 PARAMETER Experiment Name: At_42deg_Heat_P Parameter: Organism Value: A. thaliana
  misc_feature: MA Experiment 20000171 PARAMETER Experiment Name: At_42deg_Heat_P Parameter: Plant Line Value: WS
  misc_feature: MA Experiment 20000171 PARAMETER Experiment Name: At_42deg_Heat_P Parameter: Temperature (deg C) Value: 42 vs. 22
  misc_feature: MA Experiment 20000171 PARAMETER Experiment Name: At_42deg_Heat_P Parameter: Timepoint (hr) Value: 1
  misc_feature: MA Experiment 20000171 PARAMETER Experiment Name: At_42deg_Heat_P Parameter: Tissue Value: Aerial
  misc_feature: MA Experiment ID: 20000173 Result: Up-regulated in Transcription
  misc_feature: MA Experiment 20000173 PARAMETER Experiment Name: At_42deg_Heat_P Parameter: Age (day) Value: 14
  misc_feature: MA Experiment 20000173 PARAMETER Experiment Name: At_42deg_Heat_P Parameter: Organism Value: A. thaliana
  misc_feature: MA Experiment 20000173 PARAMETER Experiment Name: At_42deg_Heat_P Parameter: Plant Line Value: WS
  misc_feature: MA Experiment 20000173 PARAMETER Experiment Name: At_42deg_Heat_P Parameter: Temperature (deg C) Value: 42 vs. 22
  misc_feature: MA Experiment 20000173 PARAMETER Experiment Name: At_42deg_Heat_P Parameter: Timepoint (hr) Value: 6
  misc_feature: MA Experiment 20000173 PARAMETER Experiment Name: At_42deg_Heat_P Parameter: Tissue Value: Aerial
  misc_feature: MA Experiment ID: 20000180 Result: Up-regulated in Transcription
  misc_feature: MA Experiment 20000180 PARAMETER Experiment Name: At_Germinating_Seeds_P Parameter: Age (hr) Value: 24 vs. 0
  misc_feature: MA Experiment 20000180 PARAMETER Experiment Name: At_Germinating_Seeds_P Parameter: Tissue Value: Germinating Seeds
  misc_feature: MA Experiment ID: 20000182 Result: Up-regulated in Transcription
  misc_feature: MA Experiment 20000182 PARAMETER Experiment Name: At_2mM_SA_P Parameter: Age (day) Value: 14
  misc_feature: MA Experiment 20000182 PARAMETER Experiment Name: At_2mM_SA_P Parameter: Organism Value: A. thaliana
  misc_feature: MA Experiment 20000182 PARAMETER Experiment Name: At_2mM_SA_P Parameter: Plant Line Value: WS
  misc_feature: MA Experiment 20000182 PARAMETER Experiment Name: At_2mM_SA_P Parameter: Timepoint (hr) Value: 6
  misc_feature: MA Experiment 20000182 PARAMETER Experiment Name: At_2mM_SA_P Parameter: Tissue Value: Aerial
  misc_feature: MA Experiment 20000182 PARAMETER Experiment Name: At_2mM_SA_P Parameter: Treatment Value: 2mM SA vs. No Treatment
  misc_feature: MA Experiment ID: 20000184 Result: Down-regulated in Transcription
  misc_feature: MA Experiment 20000184 PARAMETER Experiment Name: At_Shoots__P Parameter: Age (day) Value: 7
  misc_feature: MA Experiment 20000184 PARAMETER Experiment Name: At_Shoots__P Parameter: Tissue Value: Shoots vs. Whole Plant
  misc_feature: MA Experiment ID: 20000227 Result: Down-regulated in Transcription
  misc_feature: MA Experiment 20000227 PARAMETER Experiment Name: At_Root-Tips-vs-Tops_P Parameter: Tissue Value: Root Tips vs. Root Tops
  misc_feature: MA Experiment ID: 20000234 Result: Down-regulated in Transcription
  misc_feature: MA Experiment 20000234 PARAMETER Experiment Name: At_Siliques_P Parameter: Age (day) Value: 21
  misc_feature: MA Experiment 20000234 PARAMETER Experiment Name: At_Siliques_P Parameter: Organism Value: A. thaliana
  misc_feature: MA Experiment 20000234 PARAMETER Experiment Name: At_Siliques_P Parameter: Plant Line Value: WS
  misc_feature: MA Experiment 20000234 PARAMETER Experiment Name: At_Siliques_P Parameter: Tissue Value: Less Than 5mm Siliques vs. Whole Plant
  misc_feature: MA Experiment ID: 20000235 Result: Down-regulated in Transcription
  misc_feature: MA Experiment 20000235 PARAMETER Experiment Name: At_Siliques_P Parameter: Age (day) Value: 21
  misc_feature: MA Experiment 20000235 PARAMETER Experiment Name: At_Siliques_P Parameter: Organism Value: A. thaliana
  misc_feature: MA Experiment 20000235 PARAMETER Experiment Name: At_Siliques_P Parameter: Plant Line Value: WS
  misc_feature: MA Experiment 20000235 PARAMETER Experiment Name: At_Siliques_P Parameter: Tissue Value: 5-10mm Siliques vs. Whole Plant
  misc_feature: MA Experiment ID: 20000264 Result: Down-regulated in Transcription
  misc_feature: MA Experiment 20000264 PARAMETER Experiment Name: At_Open_Flower_P Parameter: Age (day) Value: 21
  misc_feature: MA Experiment 20000264 PARAMETER Experiment Name: At_Open_Flower_P Parameter: Plant Line Value: WS
  misc_feature: MA Experiment 20000264 PARAMETER Experiment Name: At_Open_Flower_P Parameter: Tissue Value: Open Flower vs. Whole Plant
  misc_feature: MA Experiment ID: 20000265 Result: Down-regulated in Transcription
  misc_feature: MA Experiment 20000265 PARAMETER Experiment Name: At_Open_Flower_P Parameter: Age (day) Value: 21
  misc_feature: MA Experiment 20000265 PARAMETER Experiment Name: At_Open_Flower_P Parameter: Plant Line Value: WS
  misc_feature: MA Experiment 20000265 PARAMETER Experiment Name: At_Open_Flower_P Parameter: Tissue Value: Closed Flower vs. Whole Plant
  misc_feature: MA Experiment ID: 20000286 Result: Down-regulated in Transcription
  misc_feature: MA Experiment 20000286 PARAMETER Experiment Name: At_Open_Flower_P Parameter: Age (day) Value: 21
  misc_feature: MA Experiment 20000286 PARAMETER Experiment Name: At_Open_Flower_P Parameter: Plant Line Value: WS
  misc_feature: MA Experiment 20000286 PARAMETER Experiment Name: At_Open_Flower_P Parameter: Tissue Value: Half Open vs. Whole Plant
  misc_feature: MA Experiment ID: 20000439 Result: Down-regulated in Transcription
  misc_feature: MA Experiment 20000439 PARAMETER Experiment Name: At_Roots__P Parameter: Age (day) Value: 14 vs. 21
  misc_feature: MA Experiment 20000439 PARAMETER Experiment Name: At_Roots__P Parameter: Organism Value: A. thaliana
  misc_feature: MA Experiment 20000439 PARAMETER Experiment Name: At_Roots__P Parameter: Tissue Value: Roots vs. Whole Plant
  misc_feature: MA Experiment ID: 20000441 Result: Up-regulated in Transcription
  misc_feature: MA Experiment 20000441 PARAMETER Experiment Name: At_1uM_BR-BRZ__P Parameter: Tissue Value: Shoot Apices
  misc_feature: MA Experiment 20000441 PARAMETER Experiment Name: At_1uM_BR-BRZ__P Parameter: Treatment Value: 1uM BR vs. No Treatment
  misc_feature: MA Experiment ID: 20000443 Result: Up-regulated in Transcription
  misc_feature: MA Experiment 20000443 PARAMETER Experiment Name: At_1uM_BR-BRZ__P Parameter: Tissue Value: Shoot Apices
  misc_feature: MA Experiment 20000443 PARAMETER Experiment Name: At_1uM_BR-BRZ__P Parameter: Treatment Value: 1uM BRZ vs. No Treatment
  misc_feature: MA Experiment ID: 20000794 Result: Down-regulated in Transcription
  misc_feature: MA Experiment 20000794 PARAMETER Experiment Name: At_Petals_P Parameter: Age (day) Value: 23-25 days
  misc_feature: MA Experiment 20000794 PARAMETER Experiment Name: At_Petals_P Parameter: Plant Line Value: WS
  misc_feature: MA Experiment 20000794 PARAMETER Experiment Name: At_Petals_P Parameter: Tissue Value: Petals vs. Whole plant
  misc_feature: MA Experiment ID: 20001248 Result: Down-regulated in Transcription
  misc_feature: MA Experiment 20001248 PARAMETER Experiment Name: At_Far-red-induction_P Parameter: Age (day) Value: 7
  misc_feature: MA Experiment 20001248 PARAMETER Experiment Name: At_Far-red-induction_P Parameter: Light Value: Far-red vs. White
  misc_feature: MA Experiment 20001248 PARAMETER Experiment Name: At_Far-red-induction_P Parameter: Organism Value: A. thaliana
  misc_feature: MA Experiment 20001248 PARAMETER Experiment Name: At_Far-red-induction_P Parameter: Plant Line Value: Columbia
  misc_feature: MA Experiment 20001248 PARAMETER Experiment Name: At_Far-red-induction_P Parameter: Timepoint (hr) Value: 4
  misc_feature: MA Experiment 20001248 PARAMETER Experiment Name: At_Far-red-induction_P Parameter: Tissue Value: Whole Plant
  misc_feature: MA Experiment ID: 20001450 Result: Down-regulated in Transcription
  misc_feature: MA Experiment 20001450 PARAMETER Experiment Name: At_Far-red-induction_P Parameter: Age (day) Value: 7
  misc_feature: MA Experiment 20001450 PARAMETER Experiment Name: At_Far-red-induction_P Parameter: Light Value: Far-red vs. White
  misc_feature: MA Experiment 20001450 PARAMETER Experiment Name: At_Far-red-induction_P Parameter: Organism Value: A. thaliana
  misc_feature: MA Experiment 20001450 PARAMETER Experiment Name: At_Far-red-induction_P Parameter: Plant Line Value: Columbia
  misc_feature: MA Experiment 20001450 PARAMETER Experiment Name: At_Far-red-induction_P Parameter: Timepoint (hr) Value: 8
  misc_feature: MA Experiment 20001450 PARAMETER Experiment Name: At_Far-red-induction_P Parameter: Tissue Value: Whole Plant
  misc_feature: MA Experiment ID: 20001904 Result: Down-regulated in Transcription
  misc_feature: MA Experiment 20001904 PARAMETER Experiment Name: At_Drought_Reproduction_P Parameter: Age (day) Value: 37
  misc_feature: MA Experiment 20001904 PARAMETER Experiment Name: At_Drought_Reproduction_P Parameter: Organism Value: A. thaliana
  misc_feature: MA Experiment 20001904 PARAMETER Experiment Name: At_Drought_Reproduction_P Parameter: Plant Line Value: WS
  misc_feature: MA Experiment 20001904 PARAMETER Experiment Name: At_Drought_Reproduction_P Parameter: Timepoint (day) Value: 7
  misc_feature: MA Experiment 20001904 PARAMETER Experiment Name: At_Drought_Reproduction_P Parameter: Tissue Value: Rosettes
  misc_feature: MA Experiment 20001904 PARAMETER Experiment Name: At_Drought_Reproduction_P Parameter: Treatment Value: Drought vs. No Drought
  misc_feature: MA Experiment ID: 20001905 Result: Down-regulated in Transcription
  misc_feature: MA Experiment 20001905 PARAMETER Experiment Name: At_Drought_Reproduction_P Parameter: Age (day) Value: 40
  misc_feature: MA Experiment 20001905 PARAMETER Experiment Name: At_Drought_Reproduction_P Parameter: Organism Value: A. thaliana
  misc_feature: MA Experiment 20001905 PARAMETER Experiment Name: At_Drought_Reproduction_P Parameter: Plant Line Value: WS
  misc_feature: MA Experiment 20001905 PARAMETER Experiment Name: At_Drought_Reproduction_P Parameter: Timepoint (day) Value: 10
  misc_feature: MA Experiment 20001905 PARAMETER Experiment Name: At_Drought_Reproduction_P Parameter: Tissue Value: Rosettes
  misc_feature: MA Experiment 20001905 PARAMETER Experiment Name: At_Drought_Reproduction_P Parameter: Treatment Value: Drought vs. No Drought
gaacaatctagaagaagaacgataacatccaatctctctttatattccttccttccattgtggcaataatcaatcgatggcgaaggagcttgctgataaggctaaagaggctttcgtagacgatgacttcgatgttgctgttgacttgtactccaaagccattgacttggatcctaattgcgctgagttcttcgctgatcgtgctcaggcctatatcaaactcgaaagcttcactgaggccgtggcagatgcgaacaaagcaattgagttggatccttcattgaccaaagcttacctaagaaaaggaactgcctgtatgaagcttgaagagtatcggactgctaaaacagctcttgaaaagggtgcctctatcacgccgagtgaatccaaatttaagaagttgatagatgaatgcaattttctaatcacagaagaagagaaagatttggttcaaccggtgccttcgactttgccttcaagtgtgacagcaccaccagtatctgaacttgatgtcacccctacagccaagtacaggcacgagtactaccaaaagccagaggaagttgtggtaactgtttttgcaaaaggaatacccaagcagaatgttaacatcgactttggtgaacaaattctgagtgttgtgattgaggttcctggagaggatgcgtattatctccaaccgagattgtttggaaagataataccagataagtgcaaatatgaagtattgtcgaccaaaattgagatctgtcttgcaaaagccgatataatcacatgggcctccctcgaacacggcaaagggccagcggttttgccaaagcctaatgtctcatcagaggtttcacagaggccagcttatccatcttctaagaaagttaaggactgggacaagctggaagctgaagtgaagaagcaggaaaaagatgagaagctggaaggagacgcagctttgaacaaattcttccgggagatataccagaatgcggatgaggatatgaggcgagcgatgagcaaatcatttgtggaatcgaatgggacagtgctgtcaacaaactggcaagaggttgggactaagacaatcgagagtactcctccggatggcatggagctcaagaaatgggagatctgatctgatatgatatgatgatcctttcctttttatgcagttgtgaattttgcctaaatgtagacaaatcttgaaacctggtccctttcttcctgtaatgaggatcctaaggtttttgcttttttgttaaatatggctttctacctc

SEQ ID NO: 77004 - protein, 350 aa, Arabidopsis thaliana; identical to SEQ ID NO: 48150
  peptide (1)..(350): Ceres Seq. ID no. 12482583
  misc_feature (150)..(237): Pfam Name: CS domain Pfam Description: CS domain
  misc_feature (1)..(350): Homolog of NCBI NO: 15236528 NR Description: phosphatase like protein; protein id: supported by cDNA: gi_17017307, supported by cDNA: gi_17381043, by cDNA: gi_20465860 [Arabidopsis thaliana]
  misc_feature (1)..(350): Homolog of NCBI NO: 17017308 NR Description: SGT1a [Arabidopsis thaliana]
  misc_feature (1)..(349): Homolog of NCBI NO: 40974915 NR Description: SGT1-like protein [Brassica oleracea]
  misc_feature (1)..(349): Homolog of NCBI NO: 40974917 NR Description: SGT1-like protein [Brassica oleracea]
  misc_feature (1)..(349): Homolog of NCBI NO: 15237122 NR Description: putative protein; protein id: At4g11260.1, by cDNA: 152712., supported by cDNA: gi_13877932, supported by gi_16226817, supported by cDNA: gi_17017309 [Arabidopsis
  misc_feature (78)..(350): Homolog of NCBI NO: 30524966 NR Description: SGT1-like protein [Arabidopsis thaliana]
  misc_feature (2)..(349): Homolog of NCBI NO: 34912836 NR Description: Sgt1 [Oryza sativa (japonica cultivar-group)]
  misc_feature (2)..(349): Homolog of NCBI NO: 6581058 NR Description: Sgt1 [Oryza sativa]
  misc_feature (33)..(350): Homolog of NCBI NO: 6468695 NR Description: putative protein phosphatase [Rubus idaeus]
  misc_feature (2)..(350): Homolog of NCBI NO: 29468339 NR Description: SGT1 [Nicotiana benthamiana]

SEQ ID NO: 77005 - protein, 270 aa, Arabidopsis thaliana; identical to SEQ ID NO: 48151
  peptide (1)..(270): Ceres Seq. ID no. 12482584
  misc_feature (70)..(157): Pfam Name: CS domain Pfam Description: CS domain
  misc_feature (1)..(270): Homolog of NCBI NO: 15236528 NR Description: phosphatase like protein; protein id: supported by cDNA: gi_17017307, supported by cDNA: gi_17381043, by cDNA: gi_20465860 [Arabidopsis thaliana]
  misc_feature (1)..(270): Homolog of NCBI NO: 17017308 NR Description: SGT1a [Arabidopsis thaliana]
  misc_feature (1)..(269): Homolog of NCBI NO: 40974915 NR Description: SGT1-like protein [Brassica oleracea]
  misc_feature (1)..(269): Homolog of NCBI NO: 40974917 NR Description: SGT1-like protein [Brassica oleracea]
  misc_feature (1)..(269): Homolog of NCBI NO: 15237122 NR Description: putative protein; protein id: At4g11260.1, by cDNA: 152712., supported by cDNA: gi_13877932, supported by gi_16226817, supported by cDNA: gi_17017309 [Arabidopsis
  misc_feature (1)..(270): Homolog of NCBI NO: 30524966 NR Description: SGT1-like protein [Arabidopsis thaliana]
  misc_feature (1)..(269): Homolog of NCBI NO: 34912836 NR Description: Sgt1 [Oryza sativa (japonica cultivar-group)]
  misc_feature (1)..(269): Homolog of NCBI NO: 6581058 NR Description: Sgt1 [Oryza sativa]
  misc_feature (1)..(270): Homolog of NCBI NO: 6468695 NR Description: putative protein phosphatase [Rubus idaeus]
  misc_feature (1)..(270): Homolog of NCBI NO: 29468339 NR Description: SGT1 [Nicotiana benthamiana]

SEQ ID NO: 77006 - DNA, 1073 bp, Arabidopsis thaliana
  misc_feature (1)..(1073): Ceres Seq. ID no. 12482680
  misc_feature: MA Experiment ID: 108434 Result: Up-regulated in Transcription
  misc_feature: MA Experiment 108434 PARAMETER Experiment Name: At_Root_Tips_cDNA_P Parameter: Tissue Value: Root Tips
  misc_feature: MA Experiment ID: 108462 Result: Down-regulated in Transcription
  misc_feature: MA Experiment 108462 PARAMETER Experiment Name: At_Germinating_Seeds_cDNA_P Parameter: Age (day) Value: 2 vs. 0
  misc_feature: MA Experiment 108462 PARAMETER Experiment Name: At_Germinating_Seeds_cDNA_P Parameter: Tissue Value: Germinating Seeds
  misc_feature: MA Experiment ID: 108463 Result: Down-regulated in Transcription
  misc_feature: MA Experiment 108463 PARAMETER Experiment Name: At_Germinating_Seeds_cDNA_P Parameter: Age (day) Value: 3 vs. 0
  misc_feature: MA Experiment 108463 PARAMETER Experiment Name: At_Germinating_Seeds_cDNA_P Parameter: Tissue Value: Germinating Seeds
  misc_feature: MA Experiment ID: 108464 Result: Down-regulated in Transcription
  misc_feature: MA Experiment 108464 PARAMETER Experiment Name: At_Germinating_Seeds_cDNA_P Parameter: Age (day) Value: 4 vs. 0
  misc_feature: MA Experiment 108464 PARAMETER Experiment Name: At_Germinating_Seeds_cDNA_P Parameter: Tissue Value: Germinating Seeds
  misc_feature: MA Experiment ID: 108573 Result: Up-regulated in Transcription
  misc_feature: MA Experiment 108573 PARAMETER Experiment Name: At_Drought_cDNA_P Parameter: Timepoint (hr) Value: 6
  misc_feature: MA Experiment 108573 PARAMETER Experiment Name: At_Drought_cDNA_P Parameter: Tissue Value: Aerial
  misc_feature: MA Experiment 108573 PARAMETER Experiment Name: At_Drought_cDNA_P Parameter: Treatment Value: Drought vs. No Drought
aggcgagagagatgagcgcgacggagctgccgacgaaggaggcacacatacttaaaggccacgagggggcggttttagcggcgaggtttaacggtgacggaaactacgctctcacctgtggcaaggatcgaactatccgcctctggaacccgcaccgtggaatcttaatcaagacctacaaatctcatggccgcgaagtccgcgacgttcatgttacttcagacaatgccaaattttgctcatgtggtggtgatcggcaagtttactactgggatgtttcaactggacgtgtaatccgtaaattccgtggtcatgatggagaggtcaatgcagtgaagttcaatgattcgtcgtctgtggttgtatcagctgggttcgatcgttcgctacgtgtatgggactgcagatctcacagtgttgagccagtacagatcattgatacatttttggatacagtcatgtctgttgttttaacaaagactgagattattggtggtagtgtcgatggaacagttcgcacatttgacatgcgtatcggtagggagatgtcagataacctaggccaaccggttaactgtatatcgatatcaaatgatggaaactgcgttttagctggttgcttggattctactctgcgtctacttgacaggaccacaggagagctactccaagtctataaaggtcatatttccaagtcatttaaaacggattgttgcctcacgaattcggatgcacatgtgattggaggatcagaggatggattggttttcttttgggatttggtagatgcaaaagtgctatcgaaatttagagctcacgatttagtggtgacaagcgtgagttaccacccgaaggaagactgtatgttgacttcttcggtcgatggtacaattcgtgtctggaaaaaatgaagaaacaacaaatcttgacttcgattgattttgttatttacgtctcaaactcacctttcttcttctactataggctatagctggttttttggagttggaaagttgaaatattttgtagagtacttgtatcattgtatgtgaaggaaaactttttttaggcct

SEQ ID NO: 77007 - protein, 302 aa, Arabidopsis thaliana
  peptide (1)..(302): Ceres Seq. ID no. 12482681
  misc_feature (4)..(275): Homolog of NCBI NO: 10177204 NR Description: contains similarity to unknown
  misc_feature (4)..(302): Homolog of NCBI NO: 18424859 NR Description: G-protein beta-subunit (transducin) family; id: At5g64730.1, supported by cDNA: gi_15028246, supported by gi_21281168 [Arabidopsis thaliana] >gi|15028247|gb|AAK76712.1|
  misc_feature (6)..(302): Homolog of NCBI NO: 12838548 NR Description: unnamed protein product [Mus musculus]
  misc_feature (8)..(302): Homolog of NCBI NO: 14150114 NR Description: hypothetical protein MGC4238 [Homo sapiens]
  misc_feature (6)..(302): Homolog of NCBI NO: 34851410 NR Description: similar to RIKEN cDNA 1500041N16 [Rattus
  misc_feature (6)..(302): Homolog of NCBI NO: 18044039 NR Description: RIKEN cDNA 1500041N16 gene [Mus musculus]
  misc_feature (6)..(302): Homolog of NCBI NO: 13385884 NR Description: RIKEN cDNA 1500041N16 [Mus musculus]
  misc_feature (7)..(300): Homolog of NCBI NO: 39596796 NR Description: Hypothetical protein CBG02300 [Caenorhabditis
  misc_feature (7)..(300): Homolog of NCBI NO: 17533647 NR Description: Deoxyhypusine synthase [Caenorhabditis elegans]
  misc_feature (21)..(289): Homolog of NCBI NO: 24584567 NR Description: CG4935-PA [Drosophila melanogaster] symbol=BG:DS02740.2; cDNA=method:''sim4'', score:''1000.0'',
AREMSATELPTKEAHILKGHEGAVLAARFNGDGNYALTCGKDRTIRLWNPHRGILIKTYKSHGREVRDVHVTSDNAKFCSCGGDRQVYYWDVSTGRVIRKFRGHDGEVNAVKFNDSSSVVVSAGFDRSLRVWDCRSHSVEPVQIIDTFLDTVMSVVLTKTEIIGGSVDGTVRTFDMRIGREMSDNLGQPVNCISISNDGNCVLAGCLDSTLRLLDRTTGELLQVYKGHISKSFKTDCCLTNSDAHVIGGSEDGLVFFWDLVDAKVLSKFRAHDLVVTSVSYHPKEDCMLTSSVDGTIRVWKK

SEQ ID NO: 77008 - protein, 299 aa, Arabidopsis thaliana; identical to SEQ ID NO: 23167
  peptide (1)..(299): Ceres Seq. ID no. 12482682
  misc_feature (1)..(272): Homolog of NCBI NO: 10177204 NR Description: contains similarity to unknown
  misc_feature (1)..(299): Homolog of NCBI NO: 18424859 NR Description: G-protein beta-subunit (transducin) family; id: At5g64730.1, supported by cDNA: gi_15028246, supported by gi_21281168 [Arabidopsis thaliana] >gi|15028247|gb|AAK76712.1|
  misc_feature (3)..(299): Homolog of NCBI NO: 12838548 NR Description: unnamed protein product [Mus musculus]
  misc_feature (5)..(299): Homolog of NCBI NO: 14150114 NR Description: hypothetical protein MGC4238 [Homo sapiens]
  misc_feature (3)..(299): Homolog of NCBI NO: 34851410 NR Description: similar to RIKEN cDNA 1500041N16 [Rattus
  misc_feature (3)..(299): Homolog of NCBI NO: 18044039 NR Description: RIKEN cDNA 1500041N16 gene [Mus musculus]
  misc_feature (3)..(299): Homolog of NCBI NO: 13385884 NR Description: RIKEN cDNA 1500041N16 [Mus musculus]
  misc_feature (4)..(297): Homolog of NCBI NO: 39596796 NR Description: Hypothetical protein CBG02300 [Caenorhabditis
  misc_feature (4)..(297): Homolog of NCBI NO: 17533647 NR Description: Deoxyhypusine synthase [Caenorhabditis elegans]
  misc_feature (18)..(286): Homolog of NCBI NO: 24584567 NR Description: CG4935-PA [Drosophila melanogaster] symbol=BG:DS02740.2; cDNA=method:''sim4'', score:''1000.0'',

SEQ ID NO: 77009 - DNA, 1341 bp, Arabidopsis thaliana
  misc_feature (1)..(1341): Ceres Seq. ID no. 12482687
  misc_feature: MA Experiment ID: 108434 Result: Up-regulated in Transcription
  misc_feature: MA Experiment 108434 PARAMETER Experiment Name: At_Root_Tips_cDNA_P Parameter: Tissue Value: Root Tips
  misc_feature: MA Experiment ID: 108463 Result: Down-regulated in Transcription
  misc_feature: MA Experiment 108463 PARAMETER Experiment Name: At_Germinating_Seeds_cDNA_P Parameter: Age (day) Value: 3 vs. 0
  misc_feature: MA Experiment 108463 PARAMETER Experiment Name: At_Germinating_Seeds_cDNA_P Parameter: Tissue Value: Germinating Seeds
  misc_feature: MA Experiment ID: 108464 Result: Down-regulated in Transcription
  misc_feature: MA Experiment 108464 PARAMETER Experiment Name: At_Germinating_Seeds_cDNA_P Parameter: Age (day) Value: 4 vs. 0
  misc_feature: MA Experiment 108464 PARAMETER Experiment Name: At_Germinating_Seeds_cDNA_P Parameter: Tissue Value: Germinating Seeds
  misc_feature: MA Experiment ID: 108595 Result: Down-regulated in Transcription
  misc_feature: MA Experiment 108595 PARAMETER Experiment Name: At_Ler-pi_Ovule_cDNA_P Parameter: Plant Line Value: null
  misc_feature: MA Experiment ID: 20000224 Result: Up-regulated in Transcription
  misc_feature: MA Experiment ID: 20000227 Result: Up-regulated in Transcription
  misc_feature: MA Experiment 20000227 PARAMETER Experiment Name: At_Root-Tips-vs-Tops_P Parameter: Tissue Value: Root Tips vs. Root Tops
  misc_feature: MA Experiment ID: 20000234 Result: Up-regulated in Transcription
  misc_feature: MA Experiment 20000234 PARAMETER Experiment Name: At_Siliques_P Parameter: Age (day) Value: 21
  misc_feature: MA Experiment 20000234 PARAMETER Experiment Name: At_Siliques_P Parameter: Organism Value: A. thaliana
  misc_feature: MA Experiment 20000234 PARAMETER Experiment Name: At_Siliques_P Parameter: Plant Line Value: WS
  misc_feature: MA Experiment 20000234 PARAMETER Experiment Name: At_Siliques_P Parameter: Tissue Value: Less Than 5mm Siliques vs. Whole Plant
  misc_feature: MA Experiment ID: 20000264 Result: Up-regulated in Transcription
  misc_feature: MA Experiment 20000264 PARAMETER Experiment Name: At_Open_Flower_P Parameter: Age (day) Value: 21
  misc_feature: MA Experiment 20000264 PARAMETER Experiment Name: At_Open_Flower_P Parameter: Plant Line Value: WS
  misc_feature: MA Experiment 20000264 PARAMETER Experiment Name: At_Open_Flower_P Parameter: Tissue Value: Open Flower vs. Whole Plant
  misc_feature: MA Experiment ID: 20000265 Result: Up-regulated in Transcription
  misc_feature: MA Experiment 20000265 PARAMETER Experiment Name: At_Open_Flower_P Parameter: Age (day) Value: 21
  misc_feature: MA Experiment 20000265 PARAMETER Experiment Name: At_Open_Flower_P Parameter: Plant Line Value: WS
  misc_feature: MA Experiment 20000265 PARAMETER Experiment Name: At_Open_Flower_P Parameter: Tissue Value: Closed Flower vs. Whole Plant
  misc_feature: MA Experiment ID: 20000286 Result: Up-regulated in Transcription
  misc_feature: MA Experiment 20000286 PARAMETER Experiment Name: At_Open_Flower_P Parameter: Age (day) Value: 21
  misc_feature: MA Experiment 20000286 PARAMETER Experiment Name: At_Open_Flower_P Parameter: Plant Line Value: WS
  misc_feature: MA Experiment 20000286 PARAMETER Experiment Name: At_Open_Flower_P Parameter: Tissue Value: Half Open vs. Whole Plant
agcaccgtctccaatggcgggtttcagttctctaattcctagaacgcttctgaaacgcgccgttagtagcgcaacaagaaatctaacggcgccgttagcttctatttcagcagcaagaaatctcttcattggaggaggatgtgacgaaaattatggtgagccaggagtgttttctcattccaatggaataagaaagtacaacaccgttggtaatgctggcgcactaactggtccatttcatcatcttcttggggtcaaccagacaaacaagcccgcctttttaagggtccaatctatgagctatcagtttgtcgctgattctcattcatctcctaaacgtattgtgaagaatgaggatgaggaagatttttctgattcatcaaagaagggaaacgctgaaaaccctaggaaacatcaaattggggagaacatacccaagaaggataaaataaagtttcttgtgaacactcttcttgatattgaagataataaagaggctgtttatggagctctggatgcttgggttgcttgggagcgcaatttccccattgcttccctcaaaatagtaatagctagtcttgaaaaggaacatcaatggcatcgaatggtccaggtgataaagtggatcctaagtaagggacaagggaacacgatggggacgtacggacagttgatacgggcgttagatatggatcgtagagcagaagaggctcatgttatctggcgaaagaaagttgggaacgatctgcattctgtgccttggcaattatgcttacaaatgatgcgcatatatttccggaacaacatgttacaggaacttgttaagctattcaaggatctggagagttatgaccgtaagcctccggacaagcacattgtgcagaccgtggctgatgcttatgagcttttgggaatgcttgatgagaaagaacgggtagtgacgaagtatagccatcttttacttggtacaccatccgatgataaaccaagtagatcttcgaggaagaagaagaaaccagaactgaggattccagaagcaacgacagaaggcgcagttgatgcagcaaaagctgaaatccaagaagagcgaaaagaaaatctggataatcaccaagaatcagaagctgccactgaaaaacaattcgaacatggagcgtaagttgtagtatttaatcgataaagtatcactgcaagagaaacatggactgtaaggatgtatttaatcgatggattgttgacaatgctcacatcccttgggatttgtcgcaatggatggatatagagtttagggtttgagtgcggcactagtattactgagaaataagataacaaaatcacatc

SEQ ID NO: 77010 - protein, 385 aa, Arabidopsis thaliana
  peptide (1)..(385): Ceres Seq. ID no. 12482688
  misc_feature (5)..(385): Homolog of NCBI NO: 18390413 NR Description: expressed protein; protein id: At1g04590.1, by cDNA: gi_13430645 [Arabidopsis thaliana] unknown protein [Arabidopsis thaliana]
  misc_feature (5)..(385): Homolog of NCBI NO: 30678929 NR Description: expressed protein [Arabidopsis thaliana]
  misc_feature (157)..(385): Homolog of NCBI NO: 25406795 NR Description: hypothetical protein [imported] - Arabidopsis >gi|2494119|gb|AAB80628.1| EST gb|T04104 comes from this gene.
  misc_feature (5)..(157): Homolog of NCBI NO: 25406795 NR Description: hypothetical protein [imported] - Arabidopsis >gi|2494119|gb|AAB80628.1| EST gb|T04104 comes from this gene.
  misc_feature (98)..(385): Homolog of NCBI NO: 18415645 NR Description: putative protein; protein id: At4g21190.1, by cDNA: 106883. [Arabidopsis thaliana]
  misc_feature (152)..(376): Homolog of NCBI NO: 34909686 NR Description: B1131G08.1 [Oryza sativa (japonica
  misc_feature (92)..(316): Homolog of NCBI NO: 18415213 NR Description: putative protein; protein id: At4g18975.1
  misc_feature (153)..(346): Homolog of NCBI NO: 7485419 NR Description: hypothetical protein F13C5.140 - Arabidopsis >gi|2832625|emb|CAA16754.1| putative protein [Arabidopsis >gi|7268691|emb|CAB78899.1| putative protein [Arabidopsis
  misc_feature (164)..(385): Homolog of NCBI NO: 7486589 NR Description: hypothetical protein F7J7.130 - Arabidopsis >gi|2911076|emb|CAA17538.1| putative protein [Arabidopsis >gi|7268916|emb|CAB79119.1| putative protein [Arabidopsis
  misc_feature (127)..(316): Homolog of NCBI NO: 34393638 NR Description: pentatricopeptide (PPR) repeat-containing
APSPMAGFSSLIPRTLLKRAVSSATRNLTAPLASISAARNLFIGGGCDENYGEPGVFSHSNGIRKYNTVGNAGALTGPFHHLLGVNQTNKPAFLRVQSMSYQFVADSHSSPKRIVKNEDEEDFSDSSKKGNAENPRKHQIGENIPKKDKIKFLVNTLLDIEDNKEAVYGALDAWVAWERNFPIASLKIVIASLEKEHQWHRMVQVIKWILSKGQGNTMGTYGQLIRALDMDRRAEEAHVIWRKKVGNDLHSVPWQLCLQMMRIYFRNNMLQELVKLFKDLESYDRKPPDKHIVQTVADAYELLGMLDEKERVVTKYSHLLLGTPSDDKPSRSSRKKKKPELRIPEATTEGAVDAAKAEIQEERKENLDNHQESEAATEKQFEHGA

SEQ ID NO: 77011 - protein, 381 aa, Arabidopsis thaliana
  peptide (1)..(381): Ceres Seq. ID no. 12482689
  misc_feature (1)..(381): Homolog of NCBI NO: 18390413 NR Description: expressed protein; protein id: At1g04590.1, by cDNA: gi_13430645 [Arabidopsis thaliana] unknown protein [Arabidopsis thaliana]
  misc_feature (1)..(381): Homolog of NCBI NO: 30678929 NR Description: expressed protein [Arabidopsis thaliana]
  misc_feature (153)..(381): Homolog of NCBI NO: 25406795 NR Description: hypothetical protein [imported] - Arabidopsis >gi|2494119|gb|AAB80628.1| EST gb|T04104 comes from this gene.
  misc_feature (1)..(153): Homolog of NCBI NO: 25406795 NR Description: hypothetical protein [imported] - Arabidopsis >gi|2494119|gb|AAB80628.1| EST gb|T04104 comes from this gene.
  misc_feature (94)..(381): Homolog of NCBI NO: 18415645 NR Description: putative protein; protein id: At4g21190.1, by cDNA: 106883. [Arabidopsis thaliana]
  misc_feature (148)..(372): Homolog of NCBI NO: 34909686 NR Description: B1131G08.1 [Oryza sativa (japonica
  misc_feature (88)..(312): Homolog of NCBI NO: 18415213 NR Description: putative protein; protein id: At4g18975.1
  misc_feature (149)..(342): Homolog of NCBI NO: 7485419 NR Description: hypothetical protein F13C5.140 - Arabidopsis >gi|2832625|emb|CAA16754.1| putative protein [Arabidopsis >gi|7268691|emb|CAB78899.1| putative protein [Arabidopsis
  misc_feature (160)..(381): Homolog of NCBI NO: 7486589 NR Description: hypothetical protein F7J7.130 - Arabidopsis >gi|2911076|emb|CAA17538.1| putative protein [Arabidopsis >gi|7268916|emb|CAB79119.1| putative protein [Arabidopsis
  misc_feature (123)..(312): Homolog of NCBI NO: 34393638 NR Description: pentatricopeptide (PPR) repeat-containing
MAGFSSLIPRTLLKRAVSSATRNLTAPLASISAARNLFIGGGCDENYGEPGVFSHSNGIRKYNTVGNAGALTGPFHHLLGVNQTNKPAFLRVQSMSYQFVADSHSSPKRIVKNEDEEDFSDSSKKGNAENPRKHQIGENIPKKDKIKFLVNTLLDIEDNKEAVYGALDAWVAWERNFPIASLKIVIASLEKEHQWHRMVQVIKWILSKGQGNTMGTYGQLIRALDMDRRAEEAHVIWRKKVGNDLHSVPWQLCLQMMRIYFRNNMLQELVKLFKDLESYDRKPPDKHIVQTVADAYELLGMLDEKERVVTKYSHLLLGTPSDDKPSRSSRKKKKPELRIPEATTEGAVDAAKAEIQEERKENLDNHQESEAATEKQFEHGA

SEQ ID NO: 77012 - protein, 287 aa, Arabidopsis thaliana
  peptide (1)..(287): Ceres Seq. ID no. 12482690
  misc_feature (1)..(287): Homolog of NCBI NO: 18390413 NR Description: expressed protein; protein id: At1g04590.1, by cDNA: gi_13430645 [Arabidopsis thaliana] unknown protein [Arabidopsis thaliana]
  misc_feature (1)..(287): Homolog of NCBI NO: 30678929 NR Description: expressed protein [Arabidopsis thaliana]
  misc_feature (59)..(287): Homolog of NCBI NO: 25406795 NR Description: hypothetical protein [imported] - Arabidopsis >gi|2494119|gb|AAB80628.1| EST gb|T04104 comes from this gene.
  misc_feature (1)..(59): Homolog of NCBI NO: 25406795 NR Description: hypothetical protein [imported] - Arabidopsis >gi|2494119|gb|AAB80628.1| EST gb|T04104 comes from this gene.
  misc_feature (1)..(287): Homolog of NCBI NO: 18415645 NR Description: putative protein; protein id: At4g21190.1, by cDNA: 106883. [Arabidopsis thaliana]
  misc_feature (54)..(278): Homolog of NCBI NO: 34909686 NR Description: B1131G08.1 [Oryza sativa (japonica
  misc_feature (1)..(218): Homolog of NCBI NO: 18415213 NR Description: putative protein; protein id: At4g18975.1
  misc_feature (55)..(248): Homolog of NCBI NO: 7485419 NR Description: hypothetical protein F13C5.140 - Arabidopsis >gi|2832625|emb|CAA16754.1| putative protein [Arabidopsis >gi|7268691|emb|CAB78899.1| putative protein [Arabidopsis
  misc_feature (66)..(287): Homolog of NCBI NO: 7486589 NR Description: hypothetical protein F7J7.130 - Arabidopsis >gi|2911076|emb|CAA17538.1| putative protein [Arabidopsis >gi|7268916|emb|CAB79119.1| putative protein [Arabidopsis
  misc_feature (29)..(218): Homolog of NCBI NO: 34393638 NR Description: pentatricopeptide (PPR) repeat-containing
MSYQFVADSHSSPKRIVKNEDEEDFSDSSKKGNAENPRKHQIGENIPKKDKIKFLVNTLLDIEDNKEAVYGALDAWVAWERNFPIASLKIVIASLEKEHQWHRMVQVIKWILSKGQGNTMGTYGQLIRALDMDRRAEEAHVIWRKKVGNDLHSVPWQLCLQMMRIYFRNNMLQELVKLFKDLESYDRKPPDKHIVQTVADAYELLGMLDEKERVVTKYSHLLLGTPSDDKPSRSSRKKKKPELRIPEATTEGAVDAAKAEIQEERKENLDNHQESEAATEKQFEHGA

SEQ ID NO: 77013 - DNA, 1192 bp, Arabidopsis thaliana
  misc_feature (1)..(1192): Ceres Seq. ID no. 12482703
  misc_feature: MA Experiment ID: 20000173 Result: Up-regulated in Transcription
  misc_feature: MA Experiment 20000173 PARAMETER Experiment Name: At_42deg_Heat_P Parameter: Age (day) Value: 14
  misc_feature: MA Experiment 20000173 PARAMETER Experiment Name: At_42deg_Heat_P Parameter: Organism Value: A. thaliana
  misc_feature: MA Experiment 20000173 PARAMETER Experiment Name: At_42deg_Heat_P Parameter: Plant Line Value: WS
  misc_feature: MA Experiment 20000173 PARAMETER Experiment Name: At_42deg_Heat_P Parameter: Temperature (deg C) Value: 42 vs. 22
  misc_feature: MA Experiment 20000173 PARAMETER Experiment Name: At_42deg_Heat_P Parameter: Timepoint (hr) Value: 6
  misc_feature: MA Experiment 20000173 PARAMETER Experiment Name: At_42deg_Heat_P Parameter: Tissue Value: Aerial
  misc_feature: MA Experiment ID: 20000185 Result: Down-regulated in Transcription
  misc_feature: MA Experiment 20000185 PARAMETER Experiment Name: At_Roots__P Parameter: Age (day) Value: 7 vs. 21
  misc_feature: MA Experiment 20000185 PARAMETER Experiment Name: At_Roots__P Parameter: Organism Value: A. thaliana
  misc_feature: MA Experiment 20000185 PARAMETER Experiment Name: At_Roots__P Parameter: Tissue Value: Roots vs. Whole Plant
  misc_feature: MA Experiment ID: 20000227 Result: Down-regulated in Transcription
  misc_feature: MA Experiment 20000227 PARAMETER Experiment Name: At_Root-Tips-vs-Tops_P Parameter: Tissue Value: Root Tips vs. Root Tops
  misc_feature: MA Experiment ID: 20000439 Result: Down-regulated in Transcription
  misc_feature: MA Experiment 20000439 PARAMETER Experiment Name: At_Roots__P Parameter: Age (day) Value: 14 vs. 21
  misc_feature: MA Experiment 20000439 PARAMETER Experiment Name: At_Roots__P Parameter: Organism Value: A. thaliana
  misc_feature: MA Experiment 20000439 PARAMETER Experiment Name: At_Roots__P Parameter: Tissue Value: Roots vs. Whole Plant
  misc_feature: MA Experiment ID: 20000495 Result: Down-regulated in Transcription
  misc_feature: MA Experiment 20000495 PARAMETER Experiment Name: At_Guard_Cells_P Parameter: Harvest Date Value: 8/2/2002
  misc_feature: MA Experiment 20000495 PARAMETER Experiment Name: At_Guard_Cells_P Parameter: Organism Value: A. thaliana
  misc_feature: MA Experiment 20000495 PARAMETER Experiment Name: At_Guard_Cells_P Parameter: Tissue Value: Guard Cells vs. Leaves
  misc_feature: MA Experiment ID: 20000709 Result: Up-regulated in Transcription
  misc_feature: MA Experiment 20000709 PARAMETER Experiment Name: At_15mM_NH4NO3_L-to-H_P Parameter: Age (hr) Value: 14
  misc_feature: MA Experiment 20000709 PARAMETER Experiment Name: At_15mM_NH4NO3_L-to-H_P Parameter: Organism Value: A. thaliana
  misc_feature: MA Experiment 20000709 PARAMETER Experiment Name: At_15mM_NH4NO3_L-to-H_P Parameter: Plant Line Value: WS
  misc_feature: MA Experiment 20000709 PARAMETER Experiment Name: At_15mM_NH4NO3_L-to-H_P Parameter: Timepoint (hr) Value: 4
  misc_feature: MA Experiment 20000709 PARAMETER Experiment Name: At_15mM_NH4NO3_L-to-H_P Parameter: Tissue Value: Aerial
  misc_feature: MA Experiment 20000709 PARAMETER Experiment Name: At_15mM_NH4NO3_L-to-H_P Parameter: Treatment Value: 15mM NH4NO3 vs. 30mM Mannitol
  misc_feature: MA Experiment ID: 20001451 Result: Down-regulated in Transcription
  misc_feature: MA Experiment 20001451 PARAMETER Experiment Name: At_Far-red-induction_P Parameter: Age (day) Value: 7
  misc_feature: MA Experiment 20001451 PARAMETER Experiment Name: At_Far-red-induction_P Parameter: Light Value: Far-red vs. White
  misc_feature: MA Experiment 20001451 PARAMETER Experiment Name: At_Far-red-induction_P Parameter: Organism Value: A. thaliana
  misc_feature: MA Experiment 20001451 PARAMETER Experiment Name: At_Far-red-induction_P Parameter: Plant Line Value: Columbia
  misc_feature: MA Experiment 20001451 PARAMETER Experiment Name: At_Far-red-induction_P Parameter: Timepoint (hr) Value: 24
  misc_feature: MA Experiment 20001451 PARAMETER Experiment Name: At_Far-red-induction_P Parameter: Tissue Value: Whole Plant
ggagagacatgatgagagaaatatcactggaatctgaaccagacagtttctgatcttcttctccttagaggatctctcggagaagattcaaaaccaagaacaatctcagtctctatctctctctctgggtgcatttagatggctggagttgtgcgattaacgacgacgtcggttcaagccattcgtgtctcctcgtccttcagctcctttgccaccgctcttaatcctctgcaaccttgcttacctccaaactcgaatctgaattccgacaagagattgcgtcttctctcatcttctccttcctgctcgtcttctcattaccacccatcttctggtctcggaagccatctcccccttagacgacccaagagccaagtggttcgtgtcaagatgaaaatgtagccgagacagagccaccgaaatggtgggagaggaatgctccaaacatggtcgatattcattctactgaagagttcttgagcgctttaagcggtgcgggtgaaagattagttattgtagagttttatggaacttggtgtgcttcttgcagagcattgttcccaaagctttgcaagacagcggtggaacatcccgatatagtgttccttaaagtaaactttgatgagaataaaccgatgtgcaagagtttgaacgtgagagtgcttccttttttccacttttaccgtggagctgatggtcagcttgagtcattctcatgttctcttgctaaggtaaagaaggctatttcggtttcaccttttccgcaactagagcttggcataacgcttcaaacaaagagaactacttcgttgttctttttcgataggatctatcaaatattatagaccctttgctgatattgataccaaaaccggttgaatgcatttggtctgtctctgattactatttgacatcctcttcttttgaatatttgtgtgtattcagtttcagaagataaaagatgcaatccaactgcacaataccgatcgttgcagcctcggtccagccaaggtacctgaaggcttaacattagccaaaccagctgcatcaagttgaagtgccagatttttagatatattactaaggcaacaatctttggttgctcaagcaaatactcagcttaaaattctgtatatcgtcatatttttgggtgtaaaagaatacttcctaaagccagttacgattcttctgc

SEQ ID NO: 77014 - protein, 132 aa, Arabidopsis thaliana
  peptide (1)..(132): Ceres Seq. ID no. 12482704
  misc_feature (1)..(132): Homolog of NCBI NO: 30688403 NR Description: thioredoxin family [Arabidopsis thaliana]
  misc_feature (1)..(111): Homolog of NCBI NO: 21554313 NR Description: thioredoxin-like protein [Arabidopsis thaliana]
  misc_feature (1)..(111): Homolog of NCBI NO: 18417441 NR Description: Thioredoxin - like protein; protein id:
  misc_feature (1)..(132): Homolog of NCBI NO: 14423392 NR Description: Thioredoxin-like protein [Arabidopsis thaliana]
  misc_feature (1)..(98): Homolog of NCBI NO: 21553512 NR Description: putative thioredoxin [Arabidopsis thaliana]
  misc_feature (1)..(98): Homolog of NCBI NO: 4973258 NR Description: thioredoxin-like 2 [Arabidopsis thaliana]
  misc_feature (1)..(98): Homolog of NCBI NO: 15236134 NR Description: putative thioredoxin; protein id: At4g26160.1, by cDNA: 148597. [Arabidopsis thaliana] >gi|7488216|pir||T04271
  misc_feature (1)..(98): Homolog of NCBI NO: 15223262 NR Description: putative thioredoxin; protein id: At1g08570.1, by cDNA: gi_17104800, supported by cDNA: gi_4973255 [Arabidopsis
  misc_feature (1)..(98): Homolog of NCBI NO: 15225825 NR Description: putative thioredoxin; protein id: At2g33270.1
  misc_feature (1)..(122): Homolog of NCBI NO: 308906 NR Description: thioredoxin
MVDIHSTEEFLSALSGAGERLVIVEFYGTWCASCRALFPKLCKTAVEHPDIVFLKVNFDENKPMCKSLNVRVLPFFHFYRGADGQLESFSCSLAKVKKAISVSPFPQLELGITLQTKRTTSLFFFDRIYQIL

SEQ ID NO: 77015 - protein, 87 aa, Arabidopsis thaliana
  peptide (1)..(87): Ceres Seq. ID no. 12482705
  misc_feature (1)..(85): Homolog of NCBI NO: 30688403 NR Description: thioredoxin family [Arabidopsis thaliana]
  misc_feature (1)..(85): Homolog of NCBI NO: 21554313 NR Description: thioredoxin-like protein [Arabidopsis thaliana]
  misc_feature (1)..(85): Homolog of NCBI NO: 18417441 NR Description: Thioredoxin - like protein; protein id:
MAGVVRLTTTSVQAIRVSSSFSSFATALNPLQPCLPPNSNLNSDKRLRLLSSSPSCSSSHYHPSSGLGSHLPLRRPKSQVVRVKMKM

SEQ ID NO: 77016 - protein, 69 aa, Arabidopsis thaliana
  peptide (1)..(69): Ceres Seq. ID no. 12482706
  misc_feature (1)..(69): Homolog of NCBI NO: 30688403 NR Description: thioredoxin family [Arabidopsis thaliana]
  misc_feature (1)..(48): Homolog of NCBI NO: 21554313 NR Description: thioredoxin-like protein [Arabidopsis thaliana]
  misc_feature (1)..(48): Homolog of NCBI NO: 18417441 NR Description: Thioredoxin - like protein; protein id:
  misc_feature (1)..(69): Homolog of NCBI NO: 14423392 NR Description: Thioredoxin-like protein [Arabidopsis thaliana]
  misc_feature (1)..(35): Homolog of NCBI NO: 21553512 NR Description: putative thioredoxin [Arabidopsis thaliana]
  misc_feature (1)..(35): Homolog of NCBI NO: 4973258 NR Description: thioredoxin-like 2 [Arabidopsis thaliana]
  misc_feature (1)..(35): Homolog of NCBI NO: 15236134 NR Description: putative thioredoxin; protein id: At4g26160.1, by cDNA: 148597. [Arabidopsis thaliana] >gi|7488216|pir||T04271
  misc_feature (1)..(35): Homolog of NCBI NO: 15223262 NR Description: putative thioredoxin; protein id: At1g08570.1, by cDNA: gi_17104800, supported by cDNA: gi_4973255 [Arabidopsis
  misc_feature (1)..(35): Homolog of NCBI NO: 15225825 NR Description: putative thioredoxin; protein id: At2g33270.1
  misc_feature (1)..(59): Homolog of NCBI NO: 308906 NR Description: thioredoxin
MCKSLNVRVLPFFHFYRGADGQLESFSCSLAKVKKAISVSPFPQLELGITLQTKRTTSLFFFDRIYQIL

SEQ ID NO: 77017 - DNA, 1360 bp, Arabidopsis thaliana
  misc_feature (1)..(1360): Ceres Seq. ID no. 12482838
  misc_feature: MA Experiment ID: 108462 Result: Up-regulated in Transcription
  misc_feature: MA Experiment 108462 PARAMETER Experiment Name: At_Germinating_Seeds_cDNA_P Parameter: Age (day) Value: 2 vs. 0
  misc_feature: MA Experiment 108462 PARAMETER Experiment Name: At_Germinating_Seeds_cDNA_P Parameter: Tissue Value: Germinating Seeds
  misc_feature: MA Experiment ID: 108464 Result: Up-regulated in Transcription
  misc_feature: MA Experiment 108464 PARAMETER Experiment Name: At_Germinating_Seeds_cDNA_P Parameter: Age (day) Value: 4 vs. 0
  misc_feature: MA Experiment 108464 PARAMETER Experiment Name: At_Germinating_Seeds_cDNA_P Parameter: Tissue Value: Germinating Seeds
  misc_feature: MA Experiment ID: 108488 Result: Down-regulated in Transcription
  misc_feature: MA Experiment ID: 108569 Result: Up-regulated in Transcription
  misc_feature: MA Experiment 108569 PARAMETER Experiment Name: At_0.001%_MeJA__cDNA_P Parameter: Timepoint (hr) Value: 6
  misc_feature: MA Experiment 108569 PARAMETER Experiment Name: At_0.001%_MeJA__cDNA_P Parameter: Tissue Value: Aerial
  misc_feature: MA Experiment 108569 PARAMETER Experiment Name: At_0.001%_MeJA__cDNA_P Parameter: Treatment Value: 0.001% MeJA vs. No Treatment
  misc_feature: MA Experiment ID: 108577 Result: Down-regulated in Transcription
  misc_feature: MA Experiment 108577 PARAMETER Experiment Name: At_42deg_Heat_cDNA_P Parameter: Temperature (deg C) Value: 42 vs. 22
  misc_feature: MA Experiment 108577 PARAMETER Experiment Name: At_42deg_Heat_cDNA_P Parameter: Timepoint (hr) Value: 6
  misc_feature: MA Experiment 108577 PARAMETER Experiment Name: At_42deg_Heat_cDNA_P Parameter: Tissue Value: Aerial
  misc_feature: MA Experiment ID: 108668 Result: Up-regulated in Transcription
  misc_feature: MA Experiment 108668 PARAMETER Experiment Name: At_2mM_SA_cDNA_P Parameter: Plant Line Value: WS
  misc_feature: MA Experiment 108668 PARAMETER Experiment Name: At_2mM_SA_cDNA_P Parameter: Timepoint (hr) Value: 6
  misc_feature: MA Experiment 108668 PARAMETER Experiment Name: At_2mM_SA_cDNA_P Parameter: Treatment Value: 2mM SA vs. No Treatment
  misc_feature: MA Experiment ID: 20000069 Result: Up-regulated in Transcription
  misc_feature: MA Experiment 20000069 PARAMETER Experiment Name: At_100uM_ABA_Mutants_cDNA_P Parameter: Plant Line Value: CS23
  misc_feature: MA Experiment 20000069 PARAMETER Experiment Name: At_100uM_ABA_Mutants_cDNA_P Parameter: Timepoint (hr) Value: 6
  misc_feature: MA Experiment 20000069 PARAMETER Experiment Name: At_100uM_ABA_Mutants_cDNA_P Parameter: Tissue Value: Aerial
  misc_feature: MA Experiment 20000069 PARAMETER Experiment Name: At_100uM_ABA_Mutants_cDNA_P Parameter: Treatment Value: 100uM ABA vs. No Treatment
  misc_feature: MA Experiment ID: 20000070 Result: Up-regulated in Transcription
  misc_feature: MA Experiment 20000070 PARAMETER Experiment Name: At_100uM_ABA_Mutants_cDNA_P Parameter: Plant Line Value: CS24
  misc_feature: MA Experiment 20000070 PARAMETER Experiment Name: At_100uM_ABA_Mutants_cDNA_P Parameter: Timepoint (hr) Value: 6
  misc_feature: MA Experiment 20000070 PARAMETER Experiment Name: At_100uM_ABA_Mutants_cDNA_P Parameter: Tissue Value: Aerial
  misc_feature: MA Experiment 20000070 PARAMETER Experiment Name: At_100uM_ABA_Mutants_cDNA_P Parameter: Treatment Value: 100uM ABA vs. No Treatment
  misc_feature: MA Experiment ID: 20000071 Result: Up-regulated in Transcription
  misc_feature: MA Experiment 20000071 PARAMETER Experiment Name: At_100uM_ABA_Mutants_cDNA_P Parameter: Plant Line Value: CS8104
  misc_feature: MA Experiment 20000071 PARAMETER Experiment Name: At_100uM_ABA_Mutants_cDNA_P Parameter: Timepoint (hr) Value: 6
  misc_feature: MA Experiment 20000071 PARAMETER Experiment Name: At_100uM_ABA_Mutants_cDNA_P Parameter: Tissue Value: Aerial
  misc_feature: MA Experiment 20000071 PARAMETER Experiment Name: At_100uM_ABA_Mutants_cDNA_P Parameter: Treatment Value: 100uM ABA vs. No Treatment
  misc_feature: MA Experiment ID: 20000089 Result: Up-regulated in Transcription
  misc_feature: MA Experiment ID: 20000090 Result: Up-regulated in Transcription
  misc_feature: MA Experiment ID: 20000111 Result: Down-regulated in Transcription
  misc_feature: MA Experiment 20000111 PARAMETER Experiment Name: At_42deg_Heat_cDNA_P Parameter: Temperature (deg C) Value: 42 vs. 22
  misc_feature: MA Experiment 20000111 PARAMETER Experiment Name: At_42deg_Heat_cDNA_P Parameter: Timepoint (hr) Value: 6
  misc_feature: MA Experiment 20000111 PARAMETER Experiment Name: At_42deg_Heat_cDNA_P Parameter: Tissue Value: Aerial
  misc_feature: MA Experiment ID: 20000112 Result: Down-regulated in Transcription
  misc_feature: MA Experiment 20000112 PARAMETER Experiment Name: At_42deg_Heat_cDNA_P Parameter: Temperature (deg C) Value: 42 vs. 22
  misc_feature: MA Experiment 20000112 PARAMETER Experiment Name: At_42deg_Heat_cDNA_P Parameter: Timepoint (hr) Value: 2
  misc_feature: MA Experiment 20000112 PARAMETER Experiment Name: At_42deg_Heat_cDNA_P Parameter: Tissue Value: Aerial
  misc_feature: MA Experiment ID: 20000113 Result: Down-regulated in Transcription
  misc_feature: MA Experiment 20000113 PARAMETER Experiment Name: At_42deg_Heat_cDNA_P Parameter: Temperature (deg C) Value: 42 vs. 22
  misc_feature: MA Experiment 20000113 PARAMETER Experiment Name: At_42deg_Heat_cDNA_P Parameter: Timepoint (hr) Value: 8
  misc_feature: MA Experiment 20000113 PARAMETER Experiment Name: At_42deg_Heat_cDNA_P Parameter: Tissue Value: Aerial
  misc_feature: MA Experiment ID: 20000117 Result: Up-regulated in Transcription
  misc_feature: MA Experiment 20000117 PARAMETER Experiment Name: At_100uM_ABA_Mutants_cDNA_P Parameter: Plant Line Value: Columbia
  misc_feature: MA Experiment 20000117 PARAMETER Experiment Name: At_100uM_ABA_Mutants_cDNA_P Parameter: Timepoint (hr) Value: 6
  misc_feature: MA Experiment 20000117 PARAMETER Experiment Name: At_100uM_ABA_Mutants_cDNA_P Parameter: Tissue Value: Aerial
  misc_feature: MA Experiment 20000117 PARAMETER Experiment Name: At_100uM_ABA_Mutants_cDNA_P Parameter: Treatment Value: 100uM ABA vs. No Treatment
  misc_feature: MA Experiment ID: 20000173 Result: Down-regulated in Transcription
  misc_feature: MA Experiment 20000173 PARAMETER Experiment Name: At_42deg_Heat_P Parameter: Age (day) Value: 14
  misc_feature: MA Experiment 20000173 PARAMETER Experiment Name: At_42deg_Heat_P Parameter: Organism Value: A. thaliana
  misc_feature: MA Experiment 20000173 PARAMETER Experiment Name: At_42deg_Heat_P Parameter: Plant Line Value: WS
  misc_feature: MA Experiment 20000173 PARAMETER Experiment Name: At_42deg_Heat_P Parameter: Temperature (deg C) Value: 42 vs. 22
  misc_feature: MA Experiment 20000173 PARAMETER Experiment Name: At_42deg_Heat_P Parameter: Timepoint (hr) Value: 6
  misc_feature: MA Experiment 20000173 PARAMETER Experiment Name: At_42deg_Heat_P Parameter: Tissue Value: Aerial
  misc_feature: MA Experiment ID: 20000182 Result: Up-regulated in Transcription
  misc_feature: MA Experiment 20000182 PARAMETER Experiment Name: At_2mM_SA_P Parameter: Age (day) Value: 14
  misc_feature: MA Experiment 20000182 PARAMETER Experiment Name: At_2mM_SA_P Parameter: Organism Value: A. thaliana
  misc_feature: MA Experiment 20000182 PARAMETER Experiment Name: At_2mM_SA_P Parameter: Plant Line Value: WS
  misc_feature: MA Experiment 20000182 PARAMETER Experiment Name: At_2mM_SA_P Parameter: Timepoint (hr) Value: 6
  misc_feature: MA Experiment 20000182 PARAMETER Experiment Name: At_2mM_SA_P Parameter: Tissue Value: Aerial
  misc_feature: MA Experiment 20000182 PARAMETER Experiment Name: At_2mM_SA_P Parameter: Treatment Value: 2mM SA vs. No Treatment
  misc_feature: MA Experiment ID: 20000184 Result: Down-regulated in Transcription
  misc_feature: MA Experiment 20000184 PARAMETER Experiment Name: At_Shoots__P Parameter: Age (day) Value: 7
  misc_feature: MA Experiment 20000184 PARAMETER Experiment Name: At_Shoots__P Parameter: Tissue Value: Shoots vs. Whole Plant
  misc_feature: MA Experiment ID: 20000227 Result: Up-regulated in Transcription
  misc_feature: MA Experiment 20000227 PARAMETER Experiment Name: At_Root-Tips-vs-Tops_P Parameter: Tissue Value: Root Tips vs. Root Tops
  misc_feature: MA Experiment ID: 20000264 Result: Up-regulated in Transcription
  misc_feature: MA Experiment 20000264 PARAMETER Experiment Name: At_Open_Flower_P Parameter: Age (day) Value: 21
  misc_feature: MA Experiment 20000264 PARAMETER Experiment Name: At_Open_Flower_P Parameter: Plant Line Value: WS
  misc_feature: MA Experiment 20000264 PARAMETER Experiment Name: At_Open_Flower_P Parameter: Tissue Value: Open Flower vs. Whole Plant
  misc_feature: MA Experiment ID: 20000438 Result: Down-regulated in Transcription
  misc_feature: MA Experiment 20000438 PARAMETER Experiment Name: At_Shoots__P Parameter: Age (day) Value: 14
  misc_feature: MA Experiment 20000438 PARAMETER Experiment Name: At_Shoots__P Parameter: Tissue Value: Shoots vs. Whole Plant
  misc_feature: MA Experiment ID: 20000456 Result: Up-regulated in Transcription
  misc_feature: MA Experiment 20000456 PARAMETER Experiment Name: At_100uM_BA_P Parameter: Age (day) Value: 14
  misc_feature: MA Experiment 20000456 PARAMETER Experiment Name: At_100uM_BA_P Parameter: Organism Value: A. thaliana
  misc_feature: MA Experiment 20000456 PARAMETER Experiment Name: At_100uM_BA_P Parameter: Plant Line Value: WS
  misc_feature: MA Experiment 20000456 PARAMETER Experiment Name: At_100uM_BA_P Parameter: Timepoint (hr) Value: 6
  misc_feature: MA Experiment 20000456 PARAMETER Experiment Name: At_100uM_BA_P Parameter: Tissue Value: Aerial
  misc_feature: MA Experiment 20000456 PARAMETER Experiment Name: At_100uM_BA_P Parameter: Treatment Value: 100uM BA vs. No Treatment
  misc_feature: MA Experiment ID: 20000527 Result: Down-regulated in Transcription
  misc_feature: MA Experiment 20000527 PARAMETER Experiment Name: At_10percent_PEG_P Parameter: Age (day) Value: 20
  misc_feature: MA Experiment 20000527 PARAMETER Experiment Name: At_10percent_PEG_P Parameter: Organism Value: A. thaliana
  misc_feature: MA Experiment 20000527 PARAMETER Experiment Name: At_10percent_PEG_P Parameter: Plant Line Value: WS
  misc_feature: MA Experiment 20000527 PARAMETER Experiment Name: At_10percent_PEG_P Parameter: Timepoint (day) Value: 20
  misc_feature: MA Experiment 20000527 PARAMETER Experiment Name: At_10percent_PEG_P Parameter: Tissue Value: Whole Plant
  misc_feature: MA Experiment 20000527 PARAMETER Experiment Name: At_10percent_PEG_P Parameter: Treatment Value: 10percent PEG vs. No Treatment
  misc_feature: MA Experiment ID: 20000709 Result: Down-regulated in Transcription
  misc_feature: MA Experiment 20000709 PARAMETER Experiment Name: At_15mM_NH4NO3_L-to-H_P Parameter: Age (hr) Value: 14
  misc_feature: MA Experiment 20000709 PARAMETER Experiment Name: At_15mM_NH4NO3_L-to-H_P Parameter: Organism Value: A. thaliana
  misc_feature: MA Experiment 20000709 PARAMETER Experiment Name: At_15mM_NH4NO3_L-to-H_P Parameter: Plant Line Value: WS
  misc_feature: MA Experiment 20000709 PARAMETER Experiment Name: At_15mM_NH4NO3_L-to-H_P Parameter: Timepoint (hr) Value: 4
  misc_feature: MA Experiment 20000709 PARAMETER Experiment Name: At_15mM_NH4NO3_L-to-H_P Parameter: Tissue Value: Aerial
  misc_feature: MA Experiment 20000709 PARAMETER Experiment Name: At_15mM_NH4NO3_L-to-H_P Parameter: Treatment Value: 15mM NH4NO3 vs. 30mM Mannitol
  misc_feature: MA Experiment ID: 20000794 Result: Up-regulated in Transcription
  misc_feature: MA Experiment 20000794 PARAMETER Experiment Name: At_Petals_P Parameter: Age (day) Value: 23-25 days
  misc_feature: MA Experiment 20000794 PARAMETER Experiment Name: At_Petals_P Parameter: Plant Line Value: WS
  misc_feature: MA Experiment 20000794 PARAMETER Experiment Name: At_Petals_P Parameter: Tissue Value: Petals vs. Whole plant
  misc_feature: MA Experiment ID: 20001555 Result: Down-regulated in Transcription
  misc_feature: MA Experiment 20001555 PARAMETER Experiment Name: At_Drought_Soil_Dry_P Parameter: Age (day) Value: 24
  misc_feature: MA Experiment 20001555 PARAMETER Experiment Name: At_Drought_Soil_Dry_P Parameter: Organism Value: A. thaliana
  misc_feature: MA Experiment 20001555 PARAMETER Experiment Name: At_Drought_Soil_Dry_P Parameter: Plant Line Value: WS
  misc_feature: MA Experiment 20001555 PARAMETER Experiment Name: At_Drought_Soil_Dry_P Parameter: Post Timepoint (hr) Value: None
  misc_feature: MA Experiment 20001555 PARAMETER Experiment Name: At_Drought_Soil_Dry_P Parameter: Post-Treatment Value: None
  misc_feature: MA Experiment 20001555 PARAMETER Experiment Name: At_Drought_Soil_Dry_P Parameter: Timepoint (day) Value: 10
  misc_feature: MA Experiment 20001555 PARAMETER Experiment Name: At_Drought_Soil_Dry_P Parameter: Treatment Value: Drought vs. No Drought
  misc_feature: MA Experiment ID: 20001556 Result: Down-regulated in Transcription
  misc_feature: MA Experiment 20001556 PARAMETER Experiment Name: At_Drought_Soil_Dry_P Parameter: Age (day) Value: 26
  misc_feature: MA Experiment 20001556 PARAMETER Experiment Name: At_Drought_Soil_Dry_P Parameter: Organism Value: A. thaliana
  misc_feature: MA Experiment 20001556 PARAMETER Experiment Name: At_Drought_Soil_Dry_P Parameter: Plant Line Value: WS
  misc_feature: MA Experiment 20001556 PARAMETER Experiment Name: At_Drought_Soil_Dry_P Parameter: Post Timepoint (hr) Value: None
  misc_feature: MA Experiment 20001556 PARAMETER Experiment Name: At_Drought_Soil_Dry_P Parameter: Post-Treatment Value: None
  misc_feature: MA Experiment 20001556 PARAMETER Experiment Name: At_Drought_Soil_Dry_P Parameter: Timepoint (day) Value: 12
  misc_feature: MA Experiment 20001556 PARAMETER Experiment Name: At_Drought_Soil_Dry_P Parameter: Treatment Value: Drought vs. No Drought
  misc_feature: MA Experiment ID: 20001560 Result: Down-regulated in Transcription
  misc_feature: MA Experiment 20001560 PARAMETER Experiment Name: At_Drought_Soil_Dry_P Parameter: Age (day) Value: 28
  misc_feature: MA Experiment 20001560 PARAMETER Experiment Name: At_Drought_Soil_Dry_P Parameter: Organism Value: A. thaliana
  misc_feature: MA Experiment 20001560 PARAMETER Experiment Name: At_Drought_Soil_Dry_P Parameter: Plant Line Value: WS
  misc_feature: MA Experiment 20001560 PARAMETER Experiment Name: At_Drought_Soil_Dry_P Parameter: Post Timepoint (hr) Value: None
  misc_feature: MA Experiment 20001560 PARAMETER Experiment Name: At_Drought_Soil_Dry_P Parameter: Post-Treatment Value: None
  misc_feature: MA Experiment 20001560 PARAMETER Experiment Name: At_Drought_Soil_Dry_P Parameter: Timepoint (day) Value: 14
  misc_feature: MA Experiment 20001560 PARAMETER Experiment Name: At_Drought_Soil_Dry_P Parameter: Treatment Value: Drought vs. No Drought
aaaatatcaaaacacgagacagatttgattccatttttattactgttactatcatccaaacccttggtatttgtagccatgagtcttgtttcagatctcatcaaccttaacctctcagactccactgacaaaatcattgctgaatacatatgggttggtggttctggaatggacatgagaagcaaagccaggactctacctggaccagtgactgacccttcgcagctaccaaagtggaactatgatggttcaagcacaggccaagctcctggtgaagacagtgaagtcatcttataccctcaagccatattcaaggatcctttccgtagaggaaacaacattcttgtcatgtgcgatgcgtacactcccgcgggtgaaccaatcccgactaacaaaagacacgctgcggctaaggtctttagcaaccctgatgttgcagctgaagtgccatggtatggtattgagcaagaatacactttactccagaaagatgtgaagtggcctgttggttggcctattggtggttatcccggccctcagggaccgtactattgcggtattggagcagacaaatcttttggcagagatgttgttgattctcactacaaggcctgcttatacgctgggatcaacattagtggcatcaatggagaagtcatgccgggtcagtgggagttccaggtcggtccagctgttggtatctcggctgctgatgaaatttgggtcgctcgttacattttggagaggatcacagagattgctggtgtagtggtatcttttgacccgaaaccgattcccggtgactggaacggtgctggtgctcactgcaactacagtaccaagtcaatgagggaagaaggcggttacgagatcatcaagaaagcaatcgataaattgggactgagacacaaagaacacattgctgcttacggtgaaggcaatgagcgtcgtctcacaggacaccacgagactgctgacatcaacactttcctttggggtgttgcgaaccgtggagcatcgatccgagtaggacgtgatacggagaaagaagggaaaggatactttgaggacaggaggccagcttcgaacatggatccttacattgtcacttccatgattgcagagactacaatcctctggaatccttgatgatcatcagatcaagaaaaaatcttgaatgtcactcaaatttgtgtttcttgcaagattcaaagtttgtgttctctatcaagcaatgtcttaggataagtcaaagatttgctctgcttattctgctttttatttacttcacatcctattgaaaacatttctgtgtattatttatgaataaacattatcttaaaagggctgatttatttac

SEQ ID NO: 77018 - protein, 382 aa, Arabidopsis thaliana; identical to SEQ ID NO: 22775
  peptide (1)..(382): Ceres Seq. ID no. 12482839
  misc_feature (129)..(381): Pfam Name: Glutamine synthetase, catalytic domain Pfam Description: Glutamine synthetase, catalytic domain
  misc_feature (27)..(382): Homolog of NCBI NO: 15240288 NR Description: glutamate--ammonia ligase; protein id: supported by cDNA: gi_16226386, supported by cDNA: gi_16930508, by cDNA: gi_19310526 [Arabidopsis thaliana]
  misc_feature (27)..(382): Homolog of NCBI NO: 99699 NR Description: glutamate-ammonia ligase (EC 6.3.1.2), cytosolic
  misc_feature (27)..(382): Homolog of NCBI NO: 228454 NR Description: Gln synthetase
  misc_feature (27)..(382): Homolog of NCBI NO: 1076475 NR Description: Gln 1.3 protein - radish
  misc_feature (27)..(382): Homolog of NCBI NO: 1084350 NR Description: glutamate-ammonia ligase (EC 6.3.1.2) - rape
  misc_feature (27)..(382): Homolog of NCBI NO: 1934756 NR Description: cytosolic glutamine synthetase [Brassica napus]
  misc_feature (27)..(382): Homolog of NCBI NO: 1076474 NR Description: Gln 1.2 protein - radish
  misc_feature (27)..(382): Homolog of NCBI NO: 481914 NR Description: glutamate-ammonia ligase (EC 6.3.1.2) - rape
  misc_feature (27)..(382): Homolog of NCBI NO: 15219598 NR Description: glutamine synthetase, putative; protein id: supported by cDNA: 2662., supported by cDNA: gi_20268695
  misc_feature (27)..(382): Homolog of NCBI NO: 21554857 NR Description: glutamine synthetase, putative [Arabidopsis

SEQ ID NO: 77019 - protein, 356 aa, Arabidopsis thaliana; identical to SEQ ID NO: 22776
  peptide (1)..(356): Ceres Seq. ID no. 12482840
  misc_feature (103)..(355): Pfam Name: Glutamine synthetase, catalytic domain Pfam Description: Glutamine synthetase, catalytic domain
  misc_feature (1)..(356): Homolog of NCBI NO: 15240288 NR Description: glutamate--ammonia ligase; protein id: supported by cDNA: gi_16226386, supported by cDNA: gi_16930508, by cDNA: gi_19310526 [Arabidopsis thaliana]
  misc_feature (1)..(356): Homolog of NCBI NO: 99699 NR Description: glutamate-ammonia ligase (EC 6.3.1.2), cytosolic
  misc_feature (1)..(356): Homolog of NCBI NO: 228454 NR Description: Gln synthetase
  misc_feature (1)..(356): Homolog of NCBI NO: 1076475 NR Description: Gln 1.3 protein - radish
  misc_feature (1)..(356): Homolog of NCBI NO: 1084350 NR Description: glutamate-ammonia ligase (EC 6.3.1.2) - rape
  misc_feature (1)..(356): Homolog of NCBI NO: 1934756 NR Description: cytosolic glutamine synthetase [Brassica napus]
  misc_feature (1)..(356): Homolog of NCBI NO: 1076474 NR Description: Gln 1.2 protein - radish
  misc_feature (1)..(356): Homolog of NCBI NO: 481914 NR Description: glutamate-ammonia ligase (EC 6.3.1.2) - rape
  misc_feature (1)..(356): Homolog of NCBI NO: 15219598 NR Description: glutamine synthetase, putative; protein id: supported by cDNA: 2662., supported by cDNA: gi_20268695
  misc_feature (1)..(356): Homolog of NCBI NO: 21554857 NR Description: glutamine synthetase, putative [Arabidopsis

SEQ ID NO: 77020 - protein, 326 aa, Arabidopsis thaliana; identical to SEQ ID NO: 22777
  peptide (1)..(326): Ceres Seq. ID no. 12482841
  misc_feature (73)..(325): Pfam Name: Glutamine synthetase, catalytic domain Pfam Description: Glutamine synthetase, catalytic domain
  misc_feature (1)..(326): Homolog of NCBI NO: 15240288 NR Description: glutamate--ammonia ligase; protein id: supported by cDNA: gi_16226386, supported by cDNA: gi_16930508, by cDNA: gi_19310526 [Arabidopsis thaliana]
  misc_feature (1)..(326): Homolog of NCBI NO: 99699 NR Description: glutamate-ammonia ligase (EC 6.3.1.2), cytosolic
  misc_feature (1)..(326): Homolog of NCBI NO: 228454 NR Description: Gln synthetase
  misc_feature (1)..(326): Homolog of NCBI NO: 1076475 NR Description: Gln 1.3 protein - radish
  misc_feature (1)..(326): Homolog of NCBI NO: 1084350 NR Description: glutamate-ammonia ligase (EC 6.3.1.2) - rape
  misc_feature (1)..(326): Homolog of NCBI NO: 1934756 NR Description: cytosolic glutamine synthetase [Brassica napus]
  misc_feature (1)..(326): Homolog of NCBI NO: 1076474 NR Description: Gln 1.2 protein - radish
  misc_feature (1)..(326): Homolog of NCBI NO: 481914 NR Description: glutamate-ammonia ligase (EC 6.3.1.2) - rape
  misc_feature (1)..(326): Homolog of NCBI NO: 15219598 NR Description: glutamine synthetase, putative; protein id: supported by cDNA: 2662., supported by cDNA: gi_20268695
  misc_feature (1)..(326): Homolog of NCBI NO: 21554857 NR Description: glutamine synthetase, putative [Arabidopsis

SEQ ID NO: 77021 - DNA, 1377 bp, Arabidopsis thaliana
  misc_feature (1)..(1377): Ceres Seq. ID no. 12482886
  misc_feature: MA Experiment ID: 108464 Result: Down-regulated in Transcription
  misc_feature: MA Experiment 108464 PARAMETER Experiment Name: At_Germinating_Seeds_cDNA_P Parameter: Age (day) Value: 4 vs. 0
  misc_feature: MA Experiment 108464 PARAMETER Experiment Name: At_Germinating_Seeds_cDNA_P Parameter: Tissue Value: Germinating Seeds
  misc_feature: MA Experiment ID: 108573 Result: Up-regulated in Transcription
  misc_feature: MA Experiment 108573 PARAMETER Experiment Name: At_Drought_cDNA_P Parameter: Timepoint (hr) Value: 6
  misc_feature: MA Experiment 108573 PARAMETER Experiment Name: At_Drought_cDNA_P Parameter: Tissue Value: Aerial
  misc_feature: MA Experiment 108573 PARAMETER Experiment Name: At_Drought_cDNA_P Parameter: Treatment Value: Drought vs. No Drought
  misc_feature: MA Experiment ID: 108576 Result: Down-regulated in Transcription
  misc_feature: MA Experiment 108576 PARAMETER Experiment Name: At_42deg_Heat_cDNA_P Parameter: Temperature (deg C) Value: 42 vs. 22
  misc_feature: MA Experiment 108576 PARAMETER Experiment Name: At_42deg_Heat_cDNA_P Parameter: Timepoint (hr) Value: 1
  misc_feature: MA Experiment 108576 PARAMETER Experiment Name: At_42deg_Heat_cDNA_P Parameter: Tissue Value: Aerial
  misc_feature: MA Experiment ID: 108577 Result: Down-regulated in Transcription
  misc_feature: MA Experiment 108577 PARAMETER Experiment Name: At_42deg_Heat_cDNA_P Parameter: Temperature (deg C) Value: 42 vs. 22
  misc_feature: MA Experiment 108577 PARAMETER Experiment Name: At_42deg_Heat_cDNA_P Parameter: Timepoint (hr) Value: 6
  misc_feature: MA Experiment 108577 PARAMETER Experiment Name: At_42deg_Heat_cDNA_P Parameter: Tissue Value: Aerial
  misc_feature: MA Experiment ID: 108595 Result: Down-regulated in Transcription
  misc_feature: MA Experiment 108595 PARAMETER Experiment Name: At_Ler-pi_Ovule_cDNA_P Parameter: Plant Line Value: null
  misc_feature: MA Experiment ID: 20000224 Result: Down-regulated in Transcription
  misc_feature: MA Experiment ID: 20000286 Result: Up-regulated in Transcription
  misc_feature: MA Experiment 20000286 PARAMETER Experiment Name: At_Open_Flower_P Parameter: Age (day) Value: 21
  misc_feature: MA Experiment 20000286 PARAMETER Experiment Name: At_Open_Flower_P Parameter: Plant Line Value: WS
  misc_feature: MA Experiment 20000286 PARAMETER Experiment Name: At_Open_Flower_P Parameter: Tissue Value: Half Open vs. Whole Plant
  misc_feature: MA Experiment ID: 20000573 Result: Up-regulated in Transcription
  misc_feature: MA Experiment 20000573 PARAMETER Experiment Name: At_100uM_ABA_Mutants__P Parameter: Organism Value: A. thaliana
  misc_feature: MA Experiment 20000573 PARAMETER Experiment Name: At_100uM_ABA_Mutants__P Parameter: Plant Line Value: CS22 vs. Ler wt
  misc_feature: MA Experiment 20000573 PARAMETER Experiment Name: At_100uM_ABA_Mutants__P Parameter: Timepoint (hr) Value: N/A
  misc_feature: MA Experiment 20000573 PARAMETER Experiment Name: At_100uM_ABA_Mutants__P Parameter: Tissue Value: Whole Plant
  misc_feature: MA Experiment 20000573 PARAMETER Experiment Name: At_100uM_ABA_Mutants__P Parameter: Treatment Value: None
ggggacttaaaataaaaacgctgtctttccctatctttgagatctctctctcttcttgtgttttttttttcttatcttctttctcataaaaagtctctctcctctctcttccttgcgtcttctctttccccaatctctctcaggtttctctttcctctctcaccagaagggcaaaaaaattcccttaaagagtcccccgtttttgtttaaccccctcttctctcatatctttgaaatggatgacgatgggtttcgtaattggggttactatgaaccagctgctgctacctttaaaggtaatctcggtttgcagctaatgtctaccattgatcggaacactaaaccgtttttacctgggcgggatccgaatctaatgatggggcctaacgggtcatatcaccaccaagagcctcctatccacatgagctacaattggattaaccaacagaaggataagttcttcaatatgttgcctgttacaacagccactcctaactacggtaatgtccttcccgaaacttcgtctgctccgtcgatgcagatgaatctccatcatcatcttcaaaccgaggagaatccggttaagttggaagaagagattgttgttcagactaagaagagaaagaccaatgcaaaagctggctcgactccaaaggctaagaagccaaggaaaccaaaggatgagaacagtaacaacaacaacaacaacaacacgaatgttactcgagttaaacccgctaagaaaagtgttgacttggtgatcaatggagtgagtatggacatttcgggtcttcctgttcctatctgcacttgcactggagctcctcagcaatgctaccgttggggatgtggcggttggcagtctgcttgttgtaccacaaacatctcaatgcatccattaccaatgagtactaaacgccgtggagcgaggatctcgggaaggaagatgagtcaaggcgcgtttaagaaggttcttgagaaacttgcttctgatgggtttaactttgggaatccgattgatcttaagagccattgggcaagacatggaactaacaagttcgtcacaatcagatgattagttgcttgattagtaaaacagaacaagtgagtgtttctcttccgggatggaatctctcaatgatggtgtatgtatatacaacaaatctgaaatctgtgaccttttcaaaaattctgtctgcaatctgagttcgattctgttttcaggtaaaccatcttcgttgtagggtttggaagcagagttctctgttttctttaccacttttttttatcacacttttgctttgttttttgtttgtttgtctatctgtgtgtctgaggaagaagaaggtgtctgagaaaaaatgggaaatttgcatc

SEQ ID NO: 77022 - protein, 279 aa, Arabidopsis thaliana; identical to SEQ ID NO: 44176
  peptide (1)..(279): Ceres Seq. ID no. 12482887
  misc_feature (1)..(279): Homolog of NCBI NO: 18394147 NR Description: expressed protein; protein id: At1g14685.1, by cDNA: gi_16604349 [Arabidopsis thaliana] T5E21.17 [Arabidopsis thaliana]
  misc_feature (1)..(279): Homolog of NCBI NO: 18391534 NR Description: expressed protein; protein id: At2g01930.1, by cDNA: 6899., supported by cDNA: gi_17528981, supported by gi_20465480 [Arabidopsis thaliana] >gi|25410944|pir||H84430
  misc_feature (1)..(279): Homolog of NCBI NO: 21594368 NR Description: unknown [Arabidopsis thaliana]

SEQ ID NO: 77023 - protein, 252 aa, Arabidopsis thaliana; identical to SEQ ID NO: 44177
  peptide (1)..(252): Ceres Seq. ID no. 12482888
  misc_feature (1)..(252): Homolog of NCBI NO: 18394147 NR Description: expressed protein; protein id: At1g14685.1, by cDNA: gi_16604349 [Arabidopsis thaliana] T5E21.17 [Arabidopsis thaliana]
  misc_feature (1)..(252): Homolog of NCBI NO: 18391534 NR Description: expressed protein; protein id: At2g01930.1, by cDNA: 6899., supported by cDNA: gi_17528981, supported by gi_20465480 [Arabidopsis thaliana] >gi|25410944|pir||H84430
  misc_feature (1)..(252): Homolog of NCBI NO: 21594368 NR Description: unknown [Arabidopsis thaliana]

SEQ ID NO: 77024 - protein, 233 aa, Arabidopsis thaliana
  peptide (1)..(233): Ceres Seq. ID no. 12482889
  misc_feature (1)..(233): Homolog of NCBI NO: 18394147 NR Description: expressed protein; protein id: At1g14685.1, by cDNA: gi_16604349 [Arabidopsis thaliana] T5E21.17 [Arabidopsis thaliana]
  misc_feature (1)..(233): Homolog of NCBI NO: 18391534 NR Description: expressed protein; protein id: At2g01930.1, by cDNA: 6899., supported by cDNA: gi_17528981, supported by gi_20465480 [Arabidopsis thaliana] >gi|25410944|pir||H84430
  misc_feature (1)..(233): Homolog of NCBI NO: 21594368 NR Description: unknown [Arabidopsis thaliana]
MMGPNGSYHHQEPPIHMSYNWINQQKDKFFNMLPVTTATPNYGNVLPETSSAPSMQMNLHHHLQTEENPVKLEEEIVVQTKKRKTNAKAGSTPKAKKPRKPKDENSNNNNNNNTNVTRVKPAKKSVDLVINGVSMDISGLPVPICTCTGAPQQCYRWGCGGWQSACCTTNISMHPLPMSTKRRGARISGRKMSQGAFKKVLEKLASDGFNFGNPIDLKSHWARHGTNKFVTIR

SEQ ID NO: 77025 - DNA, 1621 bp, Arabidopsis thaliana
  misc_feature (1)..(1621): Ceres Seq. ID no. 12488562
  misc_feature: MA Experiment ID: 108667 Result: Up-regulated in Transcription
  misc_feature: MA Experiment 108667 PARAMETER Experiment Name: At_2mM_SA_cDNA_P Parameter: Plant Line Value: WS
  misc_feature: MA Experiment 108667 PARAMETER Experiment Name: At_2mM_SA_cDNA_P Parameter: Timepoint (hr) Value: 1
  misc_feature: MA Experiment 108667 PARAMETER Experiment Name: At_2mM_SA_cDNA_P Parameter: Treatment Value: 2mM SA vs. No Treatment
  misc_feature: MA Experiment ID: 20000087 Result: Down-regulated in Transcription
  misc_feature: MA Experiment 20000087 PARAMETER Experiment Name: At_100uM_ABA_Mutants_cDNA_P Parameter: Plant Line Value: WS
  misc_feature: MA Experiment 20000087 PARAMETER Experiment Name: At_100uM_ABA_Mutants_cDNA_P Parameter: Timepoint (hr) Value: 6
  misc_feature: MA Experiment 20000087 PARAMETER Experiment Name: At_100uM_ABA_Mutants_cDNA_P Parameter: Tissue Value: Aerial
  misc_feature: MA Experiment 20000087 PARAMETER Experiment Name: At_100uM_ABA_Mutants_cDNA_P Parameter: Treatment Value: 100uM ABA vs. No Treatment
  misc_feature: MA Experiment ID: 20000112 Result: Up-regulated in Transcription
  misc_feature: MA Experiment 20000112 PARAMETER Experiment Name: At_42deg_Heat_cDNA_P Parameter: Temperature (deg C) Value: 42 vs. 22
  misc_feature: MA Experiment 20000112 PARAMETER Experiment Name: At_42deg_Heat_cDNA_P Parameter: Timepoint (hr) Value: 2
  misc_feature: MA Experiment 20000112 PARAMETER Experiment Name: At_42deg_Heat_cDNA_P Parameter: Tissue Value: Aerial
  misc_feature: MA Experiment ID: 20000113 Result: Up-regulated in Transcription
  misc_feature: MA Experiment 20000113 PARAMETER Experiment Name: At_42deg_Heat_cDNA_P Parameter: Temperature (deg C) Value: 42 vs. 22
  misc_feature: MA Experiment 20000113 PARAMETER Experiment Name: At_42deg_Heat_cDNA_P Parameter: Timepoint (hr) Value: 8
  misc_feature: MA Experiment 20000113 PARAMETER Experiment Name: At_42deg_Heat_cDNA_P Parameter: Tissue Value: Aerial
  misc_feature: MA Experiment ID: 20000185 Result: Down-regulated in Transcription
  misc_feature: MA Experiment 20000185 PARAMETER Experiment Name: At_Roots__P Parameter: Age (day) Value: 7 vs. 21
  misc_feature: MA Experiment 20000185 PARAMETER Experiment Name: At_Roots__P Parameter: Organism Value: A. thaliana
  misc_feature: MA Experiment 20000185 PARAMETER Experiment Name: At_Roots__P Parameter: Tissue Value: Roots vs. Whole Plant
  misc_feature: MA Experiment ID: 20000268 Result: Down-regulated in Transcription
  misc_feature: MA Experiment 20000268 PARAMETER Experiment Name: At_100mM_NaCl__P Parameter: Age (day) Value: 14
  misc_feature: MA Experiment 20000268 PARAMETER Experiment Name: At_100mM_NaCl__P Parameter: Organism Value: A. thaliana
  misc_feature: MA Experiment 20000268 PARAMETER Experiment Name: At_100mM_NaCl__P Parameter: Plant Line Value: WS
  misc_feature: MA Experiment 20000268 PARAMETER Experiment Name: At_100mM_NaCl__P Parameter: Timepoint (hr) Value: 6
  misc_feature: MA Experiment 20000268 PARAMETER Experiment Name: At_100mM_NaCl__P Parameter: Tissue Value: Whole Plant
  misc_feature: MA Experiment 20000268 PARAMETER Experiment Name: At_100mM_NaCl__P Parameter: Treatment Value: 100mM NaCl vs. No Treatment
  misc_feature: MA Experiment ID: 20000439 Result: Down-regulated in Transcription
  misc_feature: MA Experiment 20000439 PARAMETER Experiment Name: At_Roots__P Parameter: Age (day) Value: 14 vs. 21
  misc_feature: MA Experiment 20000439 PARAMETER Experiment Name: At_Roots__P Parameter: Organism Value: A. thaliana
  misc_feature: MA Experiment 20000439 PARAMETER Experiment Name: At_Roots__P Parameter: Tissue Value: Roots vs. Whole Plant
  misc_feature: MA Experiment ID: 20000495 Result: Down-regulated in Transcription
  misc_feature: MA Experiment 20000495 PARAMETER Experiment Name: At_Guard_Cells_P Parameter: Harvest Date Value: 8/2/2002
  misc_feature: MA Experiment 20000495 PARAMETER Experiment Name: At_Guard_Cells_P Parameter: Organism Value: A. thaliana
  misc_feature: MA Experiment 20000495 PARAMETER Experiment Name: At_Guard_Cells_P Parameter: Tissue Value: Guard Cells vs. Leaves
  misc_feature: MA Experiment ID: 20000794 Result: Down-regulated in Transcription
  misc_feature: MA Experiment 20000794 PARAMETER Experiment Name: At_Petals_P Parameter: Age (day) Value: 23-25 days
  misc_feature: MA Experiment 20000794 PARAMETER Experiment Name: At_Petals_P Parameter: Plant Line Value: WS
  misc_feature: MA Experiment 20000794 PARAMETER Experiment Name: At_Petals_P Parameter: Tissue Value: Petals vs. Whole plant
  misc_feature: MA Experiment ID: 20001554 Result: Down-regulated in Transcription
  misc_feature: MA Experiment 20001554 PARAMETER Experiment Name: At_Drought_Soil_Dry_P Parameter: Age (day) Value: 21
  misc_feature: MA Experiment 20001554 PARAMETER Experiment Name: At_Drought_Soil_Dry_P Parameter: Organism Value: A. thaliana
  misc_feature: MA Experiment 20001554 PARAMETER Experiment Name: At_Drought_Soil_Dry_P Parameter: Plant Line Value: WS
  misc_feature: MA Experiment 20001554 PARAMETER Experiment Name: At_Drought_Soil_Dry_P Parameter: Post Timepoint (hr) Value: None
  misc_feature: MA Experiment 20001554 PARAMETER Experiment Name: At_Drought_Soil_Dry_P Parameter: Post-Treatment Value: None
  misc_feature: MA Experiment 20001554 PARAMETER Experiment Name: At_Drought_Soil_Dry_P Parameter: Timepoint (day) Value: 7
  misc_feature: MA Experiment 20001554 PARAMETER Experiment Name: At_Drought_Soil_Dry_P Parameter: Treatment Value: Drought vs. No Drought
  misc_feature: MA Experiment ID: 20001555 Result: Down-regulated in Transcription
  misc_feature: MA Experiment 20001555 PARAMETER Experiment Name: At_Drought_Soil_Dry_P Parameter: Age (day) Value: 24
  misc_feature: MA Experiment 20001555 PARAMETER Experiment Name: At_Drought_Soil_Dry_P Parameter: Organism Value: A. thaliana
  misc_feature: MA Experiment 20001555 PARAMETER Experiment Name: At_Drought_Soil_Dry_P Parameter: Plant Line Value: WS
  misc_feature: MA Experiment 20001555 PARAMETER Experiment Name: At_Drought_Soil_Dry_P Parameter: Post Timepoint (hr) Value: None
  misc_feature: MA Experiment 20001555 PARAMETER Experiment Name: At_Drought_Soil_Dry_P Parameter: Post-Treatment Value: None
  misc_feature: MA Experiment 20001555 PARAMETER Experiment Name: At_Drought_Soil_Dry_P Parameter: Timepoint (day) Value: 10
  misc_feature: MA Experiment 20001555 PARAMETER Experiment Name: At_Drought_Soil_Dry_P Parameter: Treatment Value: Drought vs. No Drought
  misc_feature: MA Experiment ID: 20001556 Result: Down-regulated in Transcription
  misc_feature: MA Experiment 20001556 PARAMETER Experiment Name: At_Drought_Soil_Dry_P Parameter: Age (day) Value: 26
  misc_feature: MA Experiment 20001556 PARAMETER Experiment Name: At_Drought_Soil_Dry_P Parameter: Organism Value: A. thaliana
  misc_feature: MA Experiment 20001556 PARAMETER Experiment Name: At_Drought_Soil_Dry_P Parameter: Plant Line Value: WS
  misc_feature: MA Experiment 20001556 PARAMETER Experiment Name: At_Drought_Soil_Dry_P Parameter: Post Timepoint (hr) Value: None
  misc_feature: MA Experiment 20001556 PARAMETER Experiment Name: At_Drought_Soil_Dry_P Parameter: Post-Treatment Value: None
  misc_feature: MA Experiment 20001556 PARAMETER Experiment Name: At_Drought_Soil_Dry_P Parameter: Timepoint (day) Value: 12
  misc_feature: MA Experiment 20001556 PARAMETER Experiment Name: At_Drought_Soil_Dry_P Parameter: Treatment Value: Drought vs. No Drought
  misc_feature: MA Experiment ID: 20001557 Result: Up-regulated in Transcription
  misc_feature: MA Experiment 20001557 PARAMETER Experiment Name: At_Drought_Soil_Dry_P Parameter: Age (day) Value: 27
  misc_feature: MA Experiment 20001557 PARAMETER Experiment Name: At_Drought_Soil_Dry_P Parameter: Organism Value: A. thaliana
  misc_feature: MA Experiment 20001557 PARAMETER Experiment Name: At_Drought_Soil_Dry_P Parameter: Plant Line Value: WS
  misc_feature: MA Experiment 20001557 PARAMETER Experiment Name: At_Drought_Soil_Dry_P Parameter: Post Timepoint (hr) Value: 3
  misc_feature: MA Experiment 20001557 PARAMETER Experiment Name: At_Drought_Soil_Dry_P Parameter: Post-Treatment Value: Re-Water vs. No Drought
  misc_feature: MA Experiment 20001557 PARAMETER Experiment Name: At_Drought_Soil_Dry_P Parameter: Timepoint (day) Value: 13
  misc_feature: MA Experiment 20001557 PARAMETER Experiment Name: At_Drought_Soil_Dry_P Parameter: Treatment Value: Drought vs. No Drought
  misc_feature: MA Experiment ID: 20001558 Result: Up-regulated in Transcription
  misc_feature: MA Experiment 20001558 PARAMETER Experiment Name: At_Drought_Soil_Dry_P Parameter: Age (day) Value: 27
  misc_feature: MA Experiment 20001558 PARAMETER Experiment Name: At_Drought_Soil_Dry_P Parameter: Organism Value: A. thaliana
  misc_feature: MA Experiment 20001558 PARAMETER Experiment Name: At_Drought_Soil_Dry_P Parameter: Plant Line Value: WS
  misc_feature: MA Experiment 20001558 PARAMETER Experiment Name: At_Drought_Soil_Dry_P Parameter: Post Timepoint (hr) Value: 6
  misc_feature: MA Experiment 20001558 PARAMETER Experiment Name: At_Drought_Soil_Dry_P Parameter: Post-Treatment Value: Re-Water vs. No Drought
  misc_feature: MA Experiment 20001558 PARAMETER Experiment Name: At_Drought_Soil_Dry_P Parameter: Timepoint (day) Value: 13
  misc_feature: MA Experiment 20001558 PARAMETER Experiment Name: At_Drought_Soil_Dry_P Parameter: Treatment Value: Drought vs. No Drought
  misc_feature: MA Experiment ID: 20001560 Result: Up-regulated in Transcription
  misc_feature: MA Experiment 20001560 PARAMETER Experiment Name: At_Drought_Soil_Dry_P Parameter: Age (day) Value: 28
  misc_feature: MA Experiment 20001560 PARAMETER Experiment Name: At_Drought_Soil_Dry_P Parameter: Organism Value: A. thaliana
  misc_feature: MA Experiment 20001560 PARAMETER Experiment Name: At_Drought_Soil_Dry_P Parameter: Plant Line Value: WS
  misc_feature: MA Experiment 20001560 PARAMETER Experiment Name: At_Drought_Soil_Dry_P Parameter: Post Timepoint (hr) Value: None
  misc_feature: MA Experiment 20001560 PARAMETER Experiment Name: At_Drought_Soil_Dry_P Parameter: Post-Treatment Value: None
  misc_feature: MA Experiment 20001560 PARAMETER Experiment Name: At_Drought_Soil_Dry_P Parameter: Timepoint (day) Value: 14
  misc_feature: MA Experiment 20001560 PARAMETER Experiment Name: At_Drought_Soil_Dry_P Parameter: Treatment Value: Drought vs. No Drought
atcttcttgctttcttcacttctttaactctttgagttatttatttccagaagcttcatagtttctggaaaatgctaatccactagcggaataaaagacagatctttaatccactttagaaaccgcgttttctgaaaatgcggttgcgttttccgatgaaatctgccgttttagcgtttgctatctttctggtgtttattccactgttttccgtcggtatacggatgattccgggaagactcaccgccgtatccgccaccgtcggaaatggctttgatctggggtcgttcgtggaagctccggagtacagaaacggcaaggagtgcgtgtctcaatcgttgaacagagaaaacttcgtgtcgtcttgcgacgcttcgttagttcatgtagctatgacgcttgactcggagtacttacgtggctcaatcgcagccgtacattcaatgctccgccacgcgtcgtgtccagaaaacgtcttcttccatctcatcgctgcagagtttgacccggcgagtccacgcgttctgagtcaactcgtccgatctactttcccgtcgctaaacttcaaagtctacattttccgggaagatacggtgatcaaccttatctcttcttcaatcagacaagctttagagaatccattgaactatgctcggaactacctcggagatattcttgatccatgcgtagacagagtcatttacctagactcggacatcatcgtcgtcgatgacataacaaagctttggaacacgagtttgacagggtcaagaatcatcggagctccggagtattgtcacgctaacttcacaaagtacttcacttcaggtttctggtccgacccggctttacccggtttcttctcgggtcgaaagccttgttatttcaacacgggtgtgatggtgatggatctagttagatggagagaaggaaactacagagaaaagcttgaaacttggatgcagatacagaagaagaagagaatctacgatttgggttctttgcctccgtttcttcttgtcttcgcagggaacgttgaagcaattgatcataggtggaaccaacatggtttaggaggagacaatgtacgaggaagttgtaggtctttgcataaaggaccagtgagtttgttgcattggagtggtaaaggtaagccatgggtgagacttgatgagaagagaccgtgtccgttggatcatttatgggaaccgtatgatttatatgagcataagattgaaagagctaaagatcagtctttgttcgggttctcttctttgtctgagttaacagaagattcaagctttttctgaagagtttgtgtaagtcaacaacattctttttacttgttattgtagttttgggttattacaaatacattgttgagttgttgagagatatatttttttgactgttggttgtgtaaaaaattgactagtgagaaaagagtttgtagaagctattgatgaggactagttaggagaattttttgtttggaatttgtattttgttgtgttctttccctaaatggttatgttgatctcaattttctgtatgtggagtcttttcaagaatatgcagcaagtgttgttagcctgaaataaaacccaagtttgttaaactg

SEQ ID NO: 77026 - protein, 390 aa, Arabidopsis thaliana
  peptide (1)..(390): Ceres Seq. ID no. 12488563
  misc_feature (1)..(390): Homolog of NCBI NO: 18409445 NR Description: expressed protein; protein id: At1g70090.1, by cDNA: gi_13878002, supported by cDNA: gi_17104732 [Arabidopsis
  misc_feature (12)..(389): Homolog of NCBI NO: 15221684 NR Description: putative glycosyl transferase; protein id: [Arabidopsis thaliana] >gi|7484989|pir||T00647 glycosyl
  misc_feature (16)..(362): Homolog of NCBI NO: 12003394 NR Description: Avr9/Cf-9 rapidly elicited protein 231 [Nicotiana
  misc_feature (44)..(368): Homolog of NCBI NO: 30689156 NR Description: galactinol synthase, putative [Arabidopsis
  misc_feature (50)..(364): Homolog of NCBI NO: 11281926 NR Description: hypothetical protein F26K9.90 - Arabidopsis >gi|7362746|emb|CAB83116.1| putative protein [Arabidopsis
  misc_feature (50)..(364): Homolog of NCBI NO: 22331906 NR Description: putative protein; protein id: At3g62660.1, by cDNA: gi_20465548 [Arabidopsis thaliana] unknown protein [Arabidopsis thaliana]
  misc_feature (51)..(364): Homolog of NCBI NO: 15235247 NR Description: predicted glycosyl transferase; protein id: supported by cDNA: 21952. [Arabidopsis thaliana]
  misc_feature (51)..(364): Homolog of NCBI NO: 21554300 NR Description: putative glycosyl transferase [Arabidopsis
  misc_feature (47)..(364): Homolog of NCBI NO: 15217851 NR Description: hypothetical protein; protein id: At1g02720.1
  misc_feature (25)..(363): Homolog of NCBI NO: 34898906 NR Description: putative glycosyl transferase [Oryza sativa
MRLRFPMKSAVLAFAIFLVFIPLFSVGIRMIPGRLTAVSATVGNGFDLGSFVEAPEYRNGKECVSQSLNRENFVSSCDASLVHVAMTLDSEYLRGSIAAVHSMLRHASCPENVFFHLIAAEFDPASPRVLSQLVRSTFPSLNFKVYIFREDTVINLISSSIRQALENPLNYARNYLGDILDPCVDRVIYLDSDIIVVDDITKLWNTSLTGSRIIGAPEYCHANFTKYFTSGFWSDPALPGFFSGRKPCYFNTGVMVMDLVRWREGNYREKLETWMQIQKKKRIYDLGSLPPFLLVFAGNVEAIDHRWNQHGLGGDNVRGSCRSLHKGPVSLLHWSGKGKPWVRLDEKRPCPLDHLWEPYDLYEHKIERAKDQSLFGFSSLSELTEDSSFF

SEQ ID NO: 77027 - protein, 384 aa, Arabidopsis thaliana
  peptide (1)..(384): Ceres Seq. ID no. 12488564
  misc_feature (1)..(384): Homolog of NCBI NO: 18409445 NR Description: expressed protein; protein id: At1g70090.1, by cDNA: gi_13878002, supported by cDNA: gi_17104732 [Arabidopsis
  misc_feature (6)..(383): Homolog of NCBI NO: 15221684 NR Description: putative glycosyl transferase; protein id: [Arabidopsis thaliana] >gi|7484989|pir||T00647 glycosyl
  misc_feature (10)..(356): Homolog of NCBI NO: 12003394 NR Description: Avr9/Cf-9 rapidly elicited protein 231 [Nicotiana
  misc_feature (38)..(362): Homolog of NCBI NO: 30689156 NR Description: galactinol synthase, putative [Arabidopsis
  misc_feature (44)..(358): Homolog of NCBI NO: 11281926 NR Description: hypothetical protein F26K9.90 - Arabidopsis >gi|7362746|emb|CAB83116.1| putative protein [Arabidopsis
  misc_feature (44)..(358): Homolog of NCBI NO: 22331906 NR Description: putative protein; protein id: At3g62660.1, by cDNA: gi_20465548 [Arabidopsis thaliana] unknown protein [Arabidopsis thaliana]
  misc_feature (45)..(358): Homolog of NCBI NO: 15235247 NR Description: predicted glycosyl transferase; protein id: supported by cDNA: 21952. [Arabidopsis thaliana]
  misc_feature (45)..(358): Homolog of NCBI NO: 21554300 NR Description: putative glycosyl transferase [Arabidopsis
  misc_feature (41)..(358): Homolog of NCBI NO: 15217851 NR Description: hypothetical protein; protein id: At1g02720.1
  misc_feature (19)..(357): Homolog of NCBI NO: 34898906 NR Description: putative glycosyl transferase [Oryza sativa
MKSAVLAFAIFLVFIPLFSVGIRMIPGRLTAVSATVGNGFDLGSFVEAPEYRNGKECVSQSLNRENFVSSCDASLVHVAMTLDSEYLRGSIAAVHSMLRHASCPENVFFHLIAAEFDPASPRVLSQLVRSTFPSLNFKVYIFREDTVINLISSSIRQALENPLNYARNYLGDILDPCVDRVIYLDSDIIVVDDITKLWNTSLTGSRIIGAPEYCHANFTKYFTSGFWSDPALPGFFSGRKPCYFNTGVMVMDLVRWREGNYREKLETWMQIQKKKRIYDLGSLPPFLLVFAGNVEAIDHRWNQHGLGGDNVRGSCRSLHKGPVSLLHWSGKGKPWVRLDEKRPCPLDHLWEPYDLYEHKIERAKDQSLFGFSSLSELTEDSSFF

SEQ ID NO: 77028 - protein, 361 aa, Arabidopsis thaliana
  peptide (1)..(361): Ceres Seq. ID no. 12488565
  misc_feature (1)..(361): Homolog of NCBI NO: 18409445 NR Description: expressed protein; protein id: At1g70090.1, by cDNA: gi_13878002, supported by cDNA: gi_17104732 [Arabidopsis
  misc_feature (1)..(360): Homolog of NCBI NO: 15221684 NR Description: putative glycosyl transferase; protein id: [Arabidopsis thaliana] >gi|7484989|pir||T00647 glycosyl
  misc_feature (1)..(333): Homolog of NCBI NO: 12003394 NR Description: Avr9/Cf-9 rapidly elicited protein 231 [Nicotiana
  misc_feature (15)..(339): Homolog of NCBI NO: 30689156 NR Description: galactinol synthase, putative [Arabidopsis
  misc_feature (21)..(335): Homolog of NCBI NO: 11281926 NR Description: hypothetical protein F26K9.90 - Arabidopsis >gi|7362746|emb|CAB83116.1| putative protein [Arabidopsis
  misc_feature (21)..(335): Homolog of NCBI NO: 22331906 NR Description: putative protein; protein id: At3g62660.1, by cDNA: gi_20465548 [Arabidopsis thaliana] unknown protein [Arabidopsis thaliana]
  misc_feature (22)..(335): Homolog of NCBI NO: 15235247 NR Description: predicted glycosyl transferase; protein id: supported by cDNA: 21952. [Arabidopsis thaliana]
  misc_feature (22)..(335): Homolog of NCBI NO: 21554300 NR Description: putative glycosyl transferase [Arabidopsis
  misc_feature (18)..(335): Homolog of NCBI NO: 15217851 NR Description: hypothetical protein; protein id: At1g02720.1
  misc_feature (1)..(334): Homolog of NCBI NO: 34898906 NR Description: putative glycosyl transferase [Oryza sativa
MIPGRLTAVSATVGNGFDLGSFVEAPEYRNGKECVSQSLNRENFVSSCDASLVHVAMTLDSEYLRGSIAAVHSMLRHASCPENVFFHLIAAEFDPASPRVLSQLVRSTFPSLNFKVYIFREDTVINLISSSIRQALENPLNYARNYLGDILDPCVDRVIYLDSDIIVVDDITKLWNTSLTGSRIIGAPEYCHANFTKYFTSGFWSDPALPGFFSGRKPCYFNTGVMVMDLVRWREGNYREKLETWMQIQKKKRIYDLGSLPPFLLVFAGNVEAIDHRWNQHGLGGDNVRGSCRSLHKGPVSLLHWSGKGKPWVRLDEKRPCPLDHLWEPYDLYEHKIERAKDQSLFGFSSLSELTEDSSFF

SEQ ID NO: 77029 - DNA, 1334 bp, Arabidopsis thaliana
  misc_feature (1)..(1334): Ceres Seq. ID no. 12488951
  misc_feature: MA Experiment ID: 20000166 Result: Up-regulated in Transcription
  misc_feature: MA Experiment 20000166 PARAMETER Experiment Name: At_100uM_ABA_P Parameter: Age (day) Value: 14
  misc_feature: MA Experiment 20000166 PARAMETER Experiment Name: At_100uM_ABA_P Parameter: Organism Value: A. thaliana
  misc_feature: MA Experiment 20000166 PARAMETER Experiment Name: At_100uM_ABA_P Parameter: Plant Line Value: WS
  misc_feature: MA Experiment 20000166 PARAMETER Experiment Name: At_100uM_ABA_P Parameter: Timepoint (hr) Value: 1
  misc_feature: MA Experiment 20000166 PARAMETER Experiment Name: At_100uM_ABA_P Parameter: Tissue Value: Aerial
  misc_feature: MA Experiment 20000166 PARAMETER Experiment Name: At_100uM_ABA_P Parameter: Treatment Value: 100uM ABA vs. No Treatment
  misc_feature: MA Experiment ID: 20000171 Result: Down-regulated in Transcription
  misc_feature: MA Experiment 20000171 PARAMETER Experiment Name: At_42deg_Heat_P Parameter: Age (day) Value: 14
  misc_feature: MA Experiment 20000171 PARAMETER Experiment Name: At_42deg_Heat_P Parameter: Organism Value: A. thaliana
  misc_feature: MA Experiment 20000171 PARAMETER Experiment Name: At_42deg_Heat_P Parameter: Plant Line Value: WS
  misc_feature: MA Experiment 20000171 PARAMETER Experiment Name: At_42deg_Heat_P Parameter: Temperature (deg C) Value: 42 vs. 22
  misc_feature: MA Experiment 20000171 PARAMETER Experiment Name: At_42deg_Heat_P Parameter: Timepoint (hr) Value: 1
  misc_feature: MA Experiment 20000171 PARAMETER Experiment Name: At_42deg_Heat_P Parameter: Tissue Value: Aerial
  misc_feature: MA Experiment ID: 20000173 Result: Down-regulated in Transcription
  misc_feature: MA Experiment 20000173 PARAMETER Experiment Name: At_42deg_Heat_P Parameter: Age (day) Value: 14
  misc_feature: MA Experiment 20000173 PARAMETER Experiment Name: At_42deg_Heat_P Parameter: Organism Value: A. thaliana
  misc_feature: MA Experiment 20000173 PARAMETER Experiment Name: At_42deg_Heat_P Parameter: Plant Line Value: WS
  misc_feature: MA Experiment 20000173 PARAMETER Experiment Name: At_42deg_Heat_P Parameter: Temperature (deg C) Value: 42 vs. 22
  misc_feature: MA Experiment 20000173 PARAMETER Experiment Name: At_42deg_Heat_P Parameter: Timepoint (hr) Value: 6
  misc_feature: MA Experiment 20000173 PARAMETER Experiment Name: At_42deg_Heat_P Parameter: Tissue Value: Aerial
  misc_feature: MA Experiment ID: 20000180 Result: Up-regulated in Transcription
  misc_feature: MA Experiment 20000180 PARAMETER Experiment Name: At_Germinating_Seeds_P Parameter: Age (hr) Value: 24 vs. 0
  misc_feature: MA Experiment 20000180 PARAMETER Experiment Name: At_Germinating_Seeds_P Parameter: Tissue Value: Germinating Seeds
  misc_feature: MA Experiment ID: 20000185 Result: Up-regulated in Transcription
  misc_feature: MA Experiment 20000185 PARAMETER Experiment Name: At_Roots__P Parameter: Age (day) Value: 7 vs. 21
  misc_feature: MA Experiment 20000185 PARAMETER Experiment Name: At_Roots__P Parameter: Organism Value: A. thaliana
  misc_feature: MA Experiment 20000185 PARAMETER Experiment Name: At_Roots__P Parameter: Tissue Value: Roots vs. Whole Plant
  misc_feature: MA Experiment ID: 20000214 Result: Down-regulated in Transcription
  misc_feature: MA Experiment 20000214 PARAMETER Experiment Name: At_4deg_Cold_P Parameter: Timepoint (hr) Value: 6
  misc_feature: MA Experiment ID: 20000227 Result: Down-regulated in Transcription
  misc_feature: MA Experiment 20000227 PARAMETER Experiment Name: At_Root-Tips-vs-Tops_P Parameter: Tissue Value: Root Tips vs. Root Tops
  misc_feature: MA Experiment ID: 20000234 Result: Down-regulated in Transcription
  misc_feature: MA Experiment 20000234 PARAMETER Experiment Name: At_Siliques_P Parameter: Age (day) Value: 21
  misc_feature: MA Experiment 20000234 PARAMETER Experiment Name: At_Siliques_P Parameter: Organism Value: A. thaliana
  misc_feature: MA Experiment 20000234 PARAMETER Experiment Name: At_Siliques_P Parameter: Plant Line Value: WS
  misc_feature: MA Experiment 20000234 PARAMETER Experiment Name: At_Siliques_P Parameter: Tissue Value: Less Than 5mm Siliques vs. Whole Plant
  misc_feature: MA Experiment ID: 20000235 Result: Down-regulated in Transcription
  misc_feature: MA Experiment 20000235 PARAMETER Experiment Name: At_Siliques_P Parameter: Age (day) Value: 21
  misc_feature: MA Experiment 20000235 PARAMETER Experiment Name: At_Siliques_P Parameter: Organism Value: A. thaliana
  misc_feature: MA Experiment 20000235 PARAMETER Experiment Name: At_Siliques_P Parameter: Plant Line Value: WS
  misc_feature: MA Experiment 20000235 PARAMETER Experiment Name: At_Siliques_P Parameter: Tissue Value: 5-10mm Siliques vs. Whole Plant
  misc_feature: MA Experiment ID: 20000265 Result: Down-regulated in Transcription
  misc_feature: MA Experiment 20000265 PARAMETER Experiment Name: At_Open_Flower_P Parameter: Age (day) Value: 21
  misc_feature: MA Experiment 20000265 PARAMETER Experiment Name: At_Open_Flower_P Parameter: Plant Line Value: WS
  misc_feature: MA Experiment 20000265 PARAMETER Experiment Name: At_Open_Flower_P Parameter: Tissue Value: Closed Flower vs. Whole Plant
  misc_feature: MA Experiment ID: 20000439 Result: Up-regulated in Transcription
  misc_feature: MA Experiment 20000439 PARAMETER Experiment Name: At_Roots__P Parameter: Age (day) Value: 14 vs. 21
  misc_feature: MA Experiment 20000439 PARAMETER Experiment Name: At_Roots__P Parameter: Organism Value: A. thaliana
  misc_feature: MA Experiment 20000439 PARAMETER Experiment Name: At_Roots__P Parameter: Tissue Value: Roots vs. Whole Plant
  misc_feature: MA Experiment ID: 20000445 Result: Up-regulated in Transcription
  misc_feature: MA Experiment 20000445 PARAMETER Experiment Name: At_100uM_NAA__P Parameter: Age (day) Value: 14
  misc_feature: MA Experiment 20000445 PARAMETER Experiment Name: At_100uM_NAA__P Parameter: Organism Value: A. thaliana
  misc_feature: MA Experiment 20000445 PARAMETER Experiment Name: At_100uM_NAA__P Parameter: Plant Line Value: WS
  misc_feature: MA Experiment 20000445 PARAMETER Experiment Name: At_100uM_NAA__P Parameter: Timepoint (hr) Value: 6
  misc_feature: MA Experiment 20000445 PARAMETER Experiment Name: At_100uM_NAA__P Parameter: Tissue Value: Aerial
  misc_feature: MA Experiment 20000445 PARAMETER Experiment Name: At_100uM_NAA__P Parameter: Treatment Value: 100uM NAA vs. No Treatment
  misc_feature: MA Experiment ID: 20001554 Result: Up-regulated in Transcription
  misc_feature: MA Experiment 20001554 PARAMETER Experiment Name: At_Drought_Soil_Dry_P Parameter: Age (day) Value: 21
  misc_feature: MA Experiment 20001554 PARAMETER Experiment Name: At_Drought_Soil_Dry_P Parameter: Organism Value: A. thaliana
  misc_feature: MA Experiment 20001554 PARAMETER Experiment Name: At_Drought_Soil_Dry_P Parameter: Plant Line Value: WS
  misc_feature: MA Experiment 20001554 PARAMETER Experiment Name: At_Drought_Soil_Dry_P Parameter: Post Timepoint (hr) Value: None
  misc_feature: MA Experiment 20001554 PARAMETER Experiment Name: At_Drought_Soil_Dry_P Parameter: Post-Treatment Value: None
  misc_feature: MA Experiment 20001554 PARAMETER Experiment Name: At_Drought_Soil_Dry_P Parameter: Timepoint (day) Value: 7
  misc_feature: MA Experiment 20001554 PARAMETER Experiment Name: At_Drought_Soil_Dry_P Parameter: Treatment Value: Drought vs. No Drought
  misc_feature: MA Experiment ID: 20001555 Result: Up-regulated in Transcription
  misc_feature: MA Experiment 20001555 PARAMETER Experiment Name: At_Drought_Soil_Dry_P Parameter: Age (day) Value: 24
  misc_feature: MA Experiment 20001555 PARAMETER Experiment Name: At_Drought_Soil_Dry_P Parameter: Organism Value: A. thaliana
  misc_feature: MA Experiment 20001555 PARAMETER Experiment Name: At_Drought_Soil_Dry_P Parameter: Plant Line Value: WS
  misc_feature: MA Experiment 20001555 PARAMETER Experiment Name: At_Drought_Soil_Dry_P Parameter: Post Timepoint (hr) Value: None
  misc_feature: MA Experiment 20001555 PARAMETER Experiment Name: At_Drought_Soil_Dry_P Parameter: Post-Treatment Value: None
  misc_feature: MA Experiment 20001555 PARAMETER Experiment Name: At_Drought_Soil_Dry_P Parameter: Timepoint (day) Value: 10
  misc_feature: MA Experiment 20001555 PARAMETER Experiment Name: At_Drought_Soil_Dry_P Parameter: Treatment Value: Drought vs. No Drought
  misc_feature: MA Experiment ID: 20001559 Result: Up-regulated in Transcription
  misc_feature: MA Experiment 20001559 PARAMETER Experiment Name: At_Drought_Soil_Dry_P Parameter: Age (day) Value: 28
  misc_feature: MA Experiment 20001559 PARAMETER Experiment Name: At_Drought_Soil_Dry_P Parameter: Organism Value: A. thaliana
  misc_feature: MA Experiment 20001559 PARAMETER Experiment Name: At_Drought_Soil_Dry_P Parameter: Plant Line Value: WS
  misc_feature: MA Experiment 20001559 PARAMETER Experiment Name: At_Drought_Soil_Dry_P Parameter: Post Timepoint (hr) Value: 29
  misc_feature: MA Experiment 20001559 PARAMETER Experiment Name: At_Drought_Soil_Dry_P Parameter: Post-Treatment Value: Re-Water vs. No Drought
  misc_feature: MA Experiment 20001559 PARAMETER Experiment Name: At_Drought_Soil_Dry_P Parameter: Timepoint (day) Value: 14
  misc_feature: MA Experiment 20001559 PARAMETER Experiment Name: At_Drought_Soil_Dry_P Parameter: Treatment Value: Drought vs. No Drought
  misc_feature: MA Experiment ID: 20001560 Result: Down-regulated in Transcription
  misc_feature: MA Experiment 20001560 PARAMETER Experiment Name: At_Drought_Soil_Dry_P Parameter: Age (day) Value: 28
  misc_feature: MA Experiment 20001560 PARAMETER Experiment Name: At_Drought_Soil_Dry_P Parameter: Organism Value: A. thaliana
  misc_feature: MA Experiment 20001560 PARAMETER Experiment Name: At_Drought_Soil_Dry_P Parameter: Plant Line Value: WS
  misc_feature: MA Experiment 20001560 PARAMETER Experiment Name: At_Drought_Soil_Dry_P Parameter: Post Timepoint (hr) Value: None
  misc_feature: MA Experiment 20001560 PARAMETER Experiment Name: At_Drought_Soil_Dry_P Parameter: Post-Treatment Value: None
  misc_feature: MA Experiment 20001560 PARAMETER Experiment Name: At_Drought_Soil_Dry_P Parameter: Timepoint (day) Value: 14
  misc_feature: MA Experiment 20001560 PARAMETER Experiment Name: At_Drought_Soil_Dry_P Parameter: Treatment Value: Drought vs. No Drought
  misc_feature: MA Experiment ID: 20001911 Result: Down-regulated in Transcription
  misc_feature: MA Experiment 20001911 PARAMETER Experiment Name: At_Drought_Reproduction_P Parameter: Age (day) Value: 40
  misc_feature: MA Experiment 20001911 PARAMETER Experiment Name: At_Drought_Reproduction_P Parameter: Organism Value: A. thaliana
  misc_feature: MA Experiment 20001911 PARAMETER Experiment Name: At_Drought_Reproduction_P Parameter: Plant Line Value: WS
  misc_feature: MA Experiment 20001911 PARAMETER Experiment Name: At_Drought_Reproduction_P Parameter: Timepoint (day) Value: 10
  misc_feature: MA Experiment 20001911 PARAMETER Experiment Name: At_Drought_Reproduction_P Parameter: Tissue Value: Flowers
  misc_feature: MA Experiment 20001911 PARAMETER Experiment Name: At_Drought_Reproduction_P Parameter: Treatment Value: Drought vs. No Drought
gagacgctcacattgcaaaaacaaaaccaacaaggaacttgtctctctctctggctctctttctcttaacgtgatcataacgtgattcgaaaattggatatagataggtttcttgttggatcttgatccctctggaaaaggaggggagaatagcagttcatgatgggattttgtatctgcccgttggagtcacctgcgagattactatggagtacaagcttcttccgccataagatcatgatcttctaatccttcctacttcttcccatctttttaatcatcttctcgctatctctgcttcctctttctctctgtttcctctttctcagaactcagaagtagttgttgttttatttctgttgatcaaaaatggaatccaattcgtttttcttcgatccatctgcttcacacggcaacagcatgttcttccttgggaatctcaatcccgtcgtccaaggaggaggagcaagatcgatgatgaacatggaggaaacttcgaagcgaaggcccttctttagctcccctgaggatctctacgacgatgacttttacgacgaccagttgcctgaaaagaagcgtcgcctcactaccgaacaagtgcatctgctggagaaaagcttcgagacagagaacaagctagagcctgaacgcaagactcagcttgccaagaagcttggtctacagccaaggcaagtggctgtctggtttcagaatcgccgagctcgttggaaaacaaaacagcttgagagagactacgatcttctcaagtccacttacgaccaacttctttctaactacgactccatcgtcatggacaacgataagctcagatccgaggttacttccctgaccgaaaagcttcagggcaaacaagagacagctaatgaaccacctggtcaagtgcccgaaccaaaccaacttgatccggtttacattaatgcggcagcaatcaaaaccgaggaccggttaagttcagggagcgttgggagcgcggtactagacgacgacgcacctcaactactagacagctgtgactcttacttcccaagcatcgtacccatccaagacaacagcaacgccagtgatcatgacaatgaccggagctgtttcgccgacgtctttgtgcccaccacttcaccgtcgcacgatcatcacggtgaatcattggctttctggggatggccttagaaaaccactctgataataaatgtgtgtttatttaagttcaagagtcatcttcttgttgtttccatgttgacgataattgttgactcgtggaataattccgctgttcaacggtatttttatcagttgcattatatgcttttatgaaa

SEQ ID NO: 77030 - protein, 272 aa, Arabidopsis thaliana; identical to SEQ ID NO: 44481
  peptide (1)..(272): Ceres Seq. ID no. 12488952
  misc_feature (68)..(122): Pfam Name: Homeobox domain Pfam Description: Homeobox domain
  misc_feature (1)..(272): Homolog of NCBI NO: 15232122 NR Description: homeobox-leucine zipper protein HAT5 (HD-ZIP
  misc_feature (1)..(225): Homolog of NCBI NO: 18034441 NR Description: homeodomain leucine zipper protein CPHB-5
  misc_feature (63)..(269): Homolog of NCBI NO: 15148920 NR Description: homeodomain leucine zipper protein HDZ3
  misc_feature (64)..(163): Homolog of NCBI NO: 166754 NR Description: homeobox protein
  misc_feature (11)..(168): Homolog of NCBI NO: 5006855 NR Description: homeodomain leucine zipper protein [Oryza sativa]
  misc_feature (11)..(168): Homolog of NCBI NO: 37573050 NR Description: homeodomain leucine zipper protein [Oryza sativa
  misc_feature (32)..(242): Homolog of NCBI NO: 15148918 NR Description: homeodomain leucine zipper protein HDZ2
  misc_feature (36)..(173): Homolog of NCBI NO: 7446244 NR Description: homeotic protein - carrot

SEQ ID NO: 77031 - protein, 255 aa, Arabidopsis thaliana; identical to SEQ ID NO: 44482
  peptide (1)..(255): Ceres Seq. ID no. 12488953
  misc_feature (51)..(105): Pfam Name: Homeobox domain Pfam Description: Homeobox domain
  misc_feature (1)..(255): Homolog of NCBI NO: 15232122 NR Description: homeobox-leucine zipper protein HAT5 (HD-ZIP
  misc_feature (1)..(208): Homolog of NCBI NO: 18034441 NR Description: homeodomain leucine zipper protein CPHB-5
  misc_feature (46)..(252): Homolog of NCBI NO: 15148920 NR Description: homeodomain leucine zipper protein HDZ3
  misc_feature (47)..(146): Homolog of NCBI NO: 166754 NR Description: homeobox protein
  misc_feature (1)..(151): Homolog of NCBI NO: 5006855 NR Description: homeodomain leucine zipper protein [Oryza sativa]
  misc_feature (1)..(151): Homolog of NCBI NO: 37573050 NR Description: homeodomain leucine zipper protein [Oryza sativa
  misc_feature (15)..(225): Homolog of NCBI NO: 15148918 NR Description: homeodomain leucine zipper protein HDZ2
  misc_feature (19)..(156): Homolog of NCBI NO: 7446244 NR Description: homeotic protein - carrot

SEQ ID NO: 77032 - protein, 237 aa, Arabidopsis thaliana; identical to SEQ ID NO: 44483
  peptide (1)..(237): Ceres Seq. ID no. 12488954
  misc_feature (33)..(87): Pfam Name: Homeobox domain Pfam Description: Homeobox domain
  misc_feature (1)..(237): Homolog of NCBI NO: 15232122 NR Description: homeobox-leucine zipper protein HAT5 (HD-ZIP
  misc_feature (1)..(190): Homolog of NCBI NO: 18034441 NR Description: homeodomain leucine zipper protein CPHB-5
  misc_feature (28)..(234): Homolog of NCBI NO: 15148920 NR Description: homeodomain leucine zipper protein HDZ3
  misc_feature (29)..(128): Homolog of NCBI NO: 166754 NR Description: homeobox protein
  misc_feature (1)..(133): Homolog of NCBI NO: 5006855 NR Description: homeodomain leucine zipper protein [Oryza sativa]
  misc_feature (1)..(133): Homolog of NCBI NO: 37573050 NR Description: homeodomain leucine zipper protein [Oryza sativa
  misc_feature (1)..(207): Homolog of NCBI NO: 15148918 NR Description: homeodomain leucine zipper protein HDZ2
  misc_feature (1)..(138): Homolog of NCBI NO: 7446244 NR Description: homeotic protein - carrot

SEQ ID NO: 77033 - DNA, 1229 bp, Arabidopsis thaliana
  misc_feature (1)..(1229): Ceres Seq. ID no. 12489223
  misc_feature: MA Experiment ID: 108434 Result: Down-regulated in Transcription
  misc_feature: MA Experiment 108434 PARAMETER Experiment Name: At_Root_Tips_cDNA_P Parameter: Tissue Value: Root Tips
  misc_feature: MA Experiment ID: 108435 Result: Up-regulated in Transcription
  misc_feature: MA Experiment 108435 PARAMETER Experiment Name: At_stm_Mutants_cDNA_P Parameter: Plant Line Value: wt Landsburg vs stm
  misc_feature: MA Experiment 108435 PARAMETER Experiment Name: At_stm_Mutants_cDNA_P Parameter: Tissue Value: Shoot Apical Meristem Region
  misc_feature: MA Experiment ID: 108462 Result: Up-regulated in Transcription
  misc_feature: MA Experiment 108462 PARAMETER Experiment Name: At_Germinating_Seeds_cDNA_P Parameter: Age (day) Value: 2 vs. 0
  misc_feature: MA Experiment 108462 PARAMETER Experiment Name: At_Germinating_Seeds_cDNA_P Parameter: Tissue Value: Germinating Seeds
  misc_feature: MA Experiment ID: 108463 Result: Up-regulated in Transcription
  misc_feature: MA Experiment 108463 PARAMETER Experiment Name: At_Germinating_Seeds_cDNA_P Parameter: Age (day) Value: 3 vs. 0
  misc_feature: MA Experiment 108463 PARAMETER Experiment Name: At_Germinating_Seeds_cDNA_P Parameter: Tissue Value: Germinating Seeds
  misc_feature: MA Experiment ID: 108464 Result: Up-regulated in Transcription
  misc_feature: MA Experiment 108464 PARAMETER Experiment Name: At_Germinating_Seeds_cDNA_P Parameter: Age (day) Value: 4 vs. 0
  misc_feature: MA Experiment 108464 PARAMETER Experiment Name: At_Germinating_Seeds_cDNA_P Parameter: Tissue Value: Germinating Seeds
  misc_feature: MA Experiment ID: 108489 Result: Up-regulated in Transcription
  misc_feature: MA Experiment ID: 108569 Result: Up-regulated in Transcription
  misc_feature: MA Experiment 108569 PARAMETER Experiment Name: At_0.001%_MeJA__cDNA_P Parameter: Timepoint (hr) Value: 6
  misc_feature: MA Experiment 108569 PARAMETER Experiment Name: At_0.001%_MeJA__cDNA_P Parameter: Tissue Value: Aerial
  misc_feature: MA Experiment 108569 PARAMETER Experiment Name: At_0.001%_MeJA__cDNA_P Parameter: Treatment Value: 0.001% MeJA vs. No Treatment
  misc_feature: MA Experiment ID: 108573 Result: Up-regulated in Transcription
  misc_feature: MA Experiment 108573 PARAMETER Experiment Name: At_Drought_cDNA_P Parameter: Timepoint (hr) Value: 6
  misc_feature: MA Experiment 108573 PARAMETER Experiment Name: At_Drought_cDNA_P Parameter: Tissue Value: Aerial
  misc_feature: MA Experiment 108573 PARAMETER Experiment Name: At_Drought_cDNA_P Parameter: Treatment Value: Drought vs. No Drought
  misc_feature: MA Experiment ID: 20000184 Result: Up-regulated in Transcription
  misc_feature: MA Experiment 20000184 PARAMETER Experiment Name: At_Shoots__P Parameter: Age (day) Value: 7
  misc_feature: MA Experiment 20000184 PARAMETER Experiment Name: At_Shoots__P Parameter: Tissue Value: Shoots vs. Whole Plant
  misc_feature: MA Experiment ID: 20000185 Result: Up-regulated in Transcription
  misc_feature: MA Experiment 20000185 PARAMETER Experiment Name: At_Roots__P Parameter: Age (day) Value: 7 vs. 21
  misc_feature: MA Experiment 20000185 PARAMETER Experiment Name: At_Roots__P Parameter: Organism Value: A. thaliana
  misc_feature: MA Experiment 20000185 PARAMETER Experiment Name: At_Roots__P Parameter: Tissue Value: Roots vs. Whole Plant
  misc_feature: MA Experiment ID: 20000227 Result: Down-regulated in Transcription
  misc_feature: MA Experiment 20000227 PARAMETER Experiment Name: At_Root-Tips-vs-Tops_P Parameter: Tissue Value: Root Tips vs. Root Tops
  misc_feature: MA Experiment ID: 20000438 Result: Up-regulated in Transcription
  misc_feature: MA Experiment 20000438 PARAMETER Experiment Name: At_Shoots__P Parameter: Age (day) Value: 14
  misc_feature: MA Experiment 20000438 PARAMETER Experiment Name: At_Shoots__P Parameter: Tissue Value: Shoots vs. Whole Plant
  misc_feature: MA Experiment ID: 20000439 Result: Up-regulated in Transcription
  misc_feature: MA Experiment 20000439 PARAMETER Experiment Name: At_Roots__P Parameter: Age (day) Value: 14 vs. 21
  misc_feature: MA Experiment 20000439 PARAMETER Experiment Name: At_Roots__P Parameter: Organism Value: A. thaliana
  misc_feature: MA Experiment 20000439 PARAMETER Experiment Name: At_Roots__P Parameter: Tissue Value: Roots vs. Whole Plant
  misc_feature: MA Experiment ID: 20000452 Result: Up-regulated in Transcription
  misc_feature: MA Experiment 20000452 PARAMETER Experiment Name: At_CS6879_Shoots-Roots_P Parameter: Age (day) Value: 14
  misc_feature: MA Experiment 20000452 PARAMETER Experiment Name: At_CS6879_Shoots-Roots_P Parameter: Organism Value: A. thaliana
  misc_feature: MA Experiment 20000452 PARAMETER Experiment Name: At_CS6879_Shoots-Roots_P Parameter: Plant Line Value: CS6879 vs. WS
  misc_feature: MA Experiment 20000452 PARAMETER Experiment Name: At_CS6879_Shoots-Roots_P Parameter: Tissue Value: Shoots
  misc_feature: MA Experiment ID: 20000453 Result: Up-regulated in Transcription
  misc_feature: MA Experiment 20000453 PARAMETER Experiment Name: At_100uM_ABA_P Parameter: Age (day) Value: 15
  misc_feature: MA Experiment 20000453 PARAMETER Experiment Name: At_100uM_ABA_P Parameter: Organism Value: A. thaliana
  misc_feature: MA Experiment 20000453 PARAMETER Experiment Name: At_100uM_ABA_P Parameter: Plant Line Value: WS
  misc_feature: MA Experiment 20000453 PARAMETER Experiment Name: At_100uM_ABA_P Parameter: Timepoint (hr) Value: 24
  misc_feature: MA Experiment 20000453 PARAMETER Experiment Name: At_100uM_ABA_P Parameter: Tissue Value: Aerial
  misc_feature: MA Experiment 20000453 PARAMETER Experiment Name: At_100uM_ABA_P Parameter: Treatment Value: 100uM ABA vs. No Treatment
  misc_feature: MA Experiment ID: 20001450 Result: Down-regulated in Transcription
  misc_feature: MA Experiment 20001450 PARAMETER Experiment Name: At_Far-red-induction_P Parameter: Age (day) Value: 7
  misc_feature: MA Experiment 20001450 PARAMETER Experiment Name: At_Far-red-induction_P Parameter: Light Value: Far-red vs. White
  misc_feature: MA Experiment 20001450 PARAMETER Experiment Name: At_Far-red-induction_P Parameter: Organism Value: A. thaliana
  misc_feature: MA Experiment 20001450 PARAMETER Experiment Name: At_Far-red-induction_P Parameter: Plant Line Value: Columbia
  misc_feature: MA Experiment 20001450 PARAMETER Experiment Name: At_Far-red-induction_P Parameter: Timepoint (hr) Value: 8
  misc_feature: MA Experiment 20001450 PARAMETER Experiment Name: At_Far-red-induction_P Parameter: Tissue Value: Whole Plant
  misc_feature: MA Experiment ID: 20001451 Result: Down-regulated in Transcription
  misc_feature: MA Experiment 20001451 PARAMETER Experiment Name: At_Far-red-induction_P Parameter: Age (day) Value: 7
  misc_feature: MA Experiment 20001451 PARAMETER Experiment Name: At_Far-red-induction_P Parameter: Light Value: Far-red vs. White
  misc_feature: MA Experiment 20001451 PARAMETER Experiment Name: At_Far-red-induction_P Parameter: Organism Value: A. thaliana
  misc_feature: MA Experiment 20001451 PARAMETER Experiment Name: At_Far-red-induction_P Parameter: Plant Line Value: Columbia
  misc_feature: MA Experiment 20001451 PARAMETER Experiment Name: At_Far-red-induction_P Parameter: Timepoint (hr) Value: 24
  misc_feature: MA Experiment 20001451 PARAMETER Experiment Name: At_Far-red-induction_P Parameter: Tissue Value: Whole Plant
  misc_feature: MA Experiment ID: 20001554 Result: Up-regulated in Transcription
  misc_feature: MA Experiment 20001554 PARAMETER Experiment Name: At_Drought_Soil_Dry_P Parameter: Age (day) Value: 21
  misc_feature: MA Experiment 20001554 PARAMETER Experiment Name: At_Drought_Soil_Dry_P Parameter: Organism Value: A. thaliana
  misc_feature: MA Experiment 20001554 PARAMETER Experiment Name: At_Drought_Soil_Dry_P Parameter: Plant Line Value: WS
  misc_feature: MA Experiment 20001554 PARAMETER Experiment Name: At_Drought_Soil_Dry_P Parameter: Post Timepoint (hr) Value: None
  misc_feature: MA Experiment 20001554 PARAMETER Experiment Name: At_Drought_Soil_Dry_P Parameter: Post-Treatment Value: None
  misc_feature: MA Experiment 20001554 PARAMETER Experiment Name: At_Drought_Soil_Dry_P Parameter: Timepoint (day) Value: 7
  misc_feature: MA Experiment 20001554 PARAMETER Experiment Name: At_Drought_Soil_Dry_P Parameter: Treatment Value: Drought vs. No Drought
  misc_feature: MA Experiment ID: 20001904 Result: Up-regulated in Transcription
  misc_feature: MA Experiment 20001904 PARAMETER Experiment Name: At_Drought_Reproduction_P Parameter: Age (day) Value: 37
  misc_feature: MA Experiment 20001904 PARAMETER Experiment Name: At_Drought_Reproduction_P Parameter: Organism Value: A. thaliana
  misc_feature: MA Experiment 20001904 PARAMETER Experiment Name: At_Drought_Reproduction_P Parameter: Plant Line Value: WS
  misc_feature: MA Experiment 20001904 PARAMETER Experiment Name: At_Drought_Reproduction_P Parameter: Timepoint (day) Value: 7
  misc_feature: MA Experiment 20001904 PARAMETER Experiment Name: At_Drought_Reproduction_P Parameter: Tissue Value: Rosettes
  misc_feature: MA Experiment 20001904 PARAMETER Experiment Name: At_Drought_Reproduction_P Parameter: Treatment Value: Drought vs. No Drought
accatatacccacactcacaagtcacaactcaaataatctttgtcttcctcctacaaatatggggttttctccttcattttcttgcagtgctattggagccctaattttgggttgccttctgcttcaagcatcaaactctaatgctcagttgaggcctgatttctacttcgggacgtgcccatttgtttttgatatcattggaaatatcatcgtcgatgaactgcagactgatcctcgtattgccgcgagcctccttcgtcttcactttcacgactgctttgttcgtggttgtgatgcatcgatcttgcttgacaattccacatcattccggactgagaaagatgctgctccgaacgcaaattcggctcgagggtttaatgtcatagatagaatgaaagtagcccttgagagagcttgcccaggaagagtctcttgtgcagatattctcaccatcgcctctcaaatatcagtgcttttgtcgggaggtccatggtggccggttccgttggggaggagagacagtgtagaagctttcttcgctctggctaatacagctctgccctctccgtttttcaatcttactcaacttaaaacagcctttgctgacgttggcctaaaccgcacttccgatctagttgctctttccggtggtcacacatttggaagagcacaatgccagttcgtgacgcctcgtctctacaacttcaatggtacaaacagtccagacccaagtctgaacccaacttaccttgtcgaactccgtcgattgtgtcctcaaaacggaaacggcaccgttctggtcaacttcgatgtcgtgactccagatgctttcgatagtcaatactacaccaaccttcgtaatgggaaaggtcttattcagagtgaccaggaactcttttcgactccaggagccgatacgatccctttagtaaaccaatacagcagcgacatgtccgtgttctttcgagcattcattgacgcaatgattaggatgggaaatcttagacctttgactggaactcaaggagagattagacaaaattgtagggttgtgaatccacgaattagggttgtggagaacgacgatggtgttgtgagttctatctgattatgcatgttgccatgttggggatatatatatggatatgtaagaaagtataaaatgcgcacgtgagaacaatttcgactaataaaagttttcacgagttatgagatttatgaaattggt

SEQ ID NO: 77034 - protein, 368 aa, Arabidopsis thaliana; identical to SEQ ID NO: 44251
  peptide (1)..(368): Ceres Seq. ID no. 12489224
  misc_feature (66)..(316): Pfam Name: Peroxidase Pfam Description: Peroxidase
  misc_feature (20)..(368): Homolog of NCBI NO: 15224496 NR Description: peroxidase; protein id: At2g38380.1, supported by gi_14334719, supported by cDNA: gi_16323435, supported by cDNA: [Arabidopsis thaliana] >gi|20455508|sp|P24102|PE22_ARATH
  misc_feature (20)..(368): Homolog of NCBI NO: 81653 NR Description: peroxidase (EC 1.11.1.7) E - Arabidopsis thaliana
  misc_feature (20)..(368): Homolog of NCBI NO: 15224497 NR Description: peroxidase, putative; protein id: At2g38390.1, by cDNA: gi_17530563, supported by cDNA: gi_20466178 [Arabidopsis
  misc_feature (20)..(368): Homolog of NCBI NO: 129812 NR Description: Peroxidase C3 precursor >gi|81667|pir||JH0150
  misc_feature (49)..(354): Homolog of NCBI NO: 26398007 NR Description: Peroxidase E5
  misc_feature (20)..(352): Homolog of NCBI NO: 21592888 NR Description: peroxidase [Arabidopsis thaliana]
  misc_feature (20)..(352): Homolog of NCBI NO: 30690396 NR Description: peroxidase, putative [Arabidopsis thaliana] peroxidase [Arabidopsis thaliana] >gi|19347733|gb|AAL86292.1| protein [Arabidopsis thaliana] >gi|22136690|gb|AAM91664.1|
  misc_feature (20)..(352): Homolog of NCBI NO: 25453209 NR Description: Peroxidase 32 precursor (Atperox P32) (PRXR3) >gi|1402908|emb|CAA66959.1| peroxidase [Arabidopsis thaliana] peroxidase ATP16a [Arabidopsis thaliana]
  misc_feature (20)..(352): Homolog of NCBI NO: 15229095 NR Description: peroxidase, putative; protein id: At3g49120.1, by cDNA: 39678., supported by cDNA: gi_11908065, supported by gi_12642879, supported by cDNA: gi_13265526, supported by cDNA:
  misc_feature (20)..(352): Homolog of NCBI NO: 480907 NR Description: peroxidase (EC 1.11.1.7) Cb - Arabidopsis

SEQ ID NO: 77035 - protein, 349 aa, Arabidopsis thaliana; identical to SEQ ID NO: 44252
  peptide (1)..(349): Ceres Seq. ID no. 12489225
  misc_feature (47)..(297): Pfam Name: Peroxidase Pfam Description: Peroxidase
  misc_feature (1)..(349): Homolog of NCBI NO: 15224496 NR Description: peroxidase; protein id: At2g38380.1, supported by gi_14334719, supported by cDNA: gi_16323435, supported by cDNA: [Arabidopsis thaliana] >gi|20455508|sp|P24102|PE22_ARATH
  misc_feature (1)..(349): Homolog of NCBI NO: 81653 NR Description: peroxidase (EC 1.11.1.7) E - Arabidopsis thaliana
  misc_feature (1)..(349): Homolog of NCBI NO: 15224497 NR Description: peroxidase, putative; protein id: At2g38390.1, by cDNA: gi_17530563, supported by cDNA: gi_20466178 [Arabidopsis
  misc_feature (1)..(349): Homolog of NCBI NO: 129812 NR Description: Peroxidase C3 precursor >gi|81667|pir||JH0150
  misc_feature (30)..(335): Homolog of NCBI NO: 26398007 NR Description: Peroxidase E5
  misc_feature (1)..(333): Homolog of NCBI NO: 21592888 NR Description: peroxidase [Arabidopsis thaliana]
  misc_feature (1)..(333): Homolog of NCBI NO: 30690396 NR Description: peroxidase, putative [Arabidopsis thaliana] peroxidase [Arabidopsis thaliana] >gi|19347733|gb|AAL86292.1| protein [Arabidopsis thaliana] >gi|22136690|gb|AAM91664.1|
  misc_feature (1)..(333): Homolog of NCBI NO: 25453209 NR Description: Peroxidase 32 precursor (Atperox P32) (PRXR3) >gi|1402908|emb|CAA66959.1| peroxidase [Arabidopsis thaliana] peroxidase ATP16a [Arabidopsis thaliana]
  misc_feature (1)..(333): Homolog of NCBI NO: 15229095 NR Description: peroxidase, putative; protein id: At3g49120.1, by cDNA: 39678., supported by cDNA: gi_11908065, supported by gi_12642879, supported by cDNA: gi_13265526, supported by cDNA:
  misc_feature (1)..(333): Homolog of NCBI NO: 480907 NR Description: peroxidase (EC 1.11.1.7) Cb - Arabidopsis

SEQ ID NO: 77036 - protein, 238 aa, Arabidopsis thaliana; identical to SEQ ID NO: 44253
  peptide (1)..(238): Ceres Seq. ID no. 12489226
  misc_feature (1)..(186): Pfam Name: Peroxidase Pfam Description: Peroxidase
  misc_feature (1)..(238): Homolog of NCBI NO: 15224496 NR Description: peroxidase; protein id: At2g38380.1, supported by gi_14334719, supported by cDNA: gi_16323435, supported by cDNA: [Arabidopsis thaliana] >gi|20455508|sp|P24102|PE22_ARATH
  misc_feature (1)..(238): Homolog of NCBI NO: 81653 NR Description: peroxidase (EC 1.11.1.7) E - Arabidopsis thaliana
  misc_feature (1)..(238): Homolog of NCBI NO: 15224497 NR Description: peroxidase, putative; protein id: At2g38390.1, by cDNA: gi_17530563, supported by cDNA: gi_20466178 [Arabidopsis
  misc_feature (1)..(238): Homolog of NCBI NO: 129812 NR Description: Peroxidase C3 precursor >gi|81667|pir||JH0150
  misc_feature (1)..(224): Homolog of NCBI NO: 26398007 NR Description: Peroxidase E5
  misc_feature (1)..(222): Homolog of NCBI NO: 21592888 NR Description: peroxidase [Arabidopsis thaliana]
  misc_feature (1)..(222): Homolog of NCBI NO: 30690396 NR Description: peroxidase, putative [Arabidopsis thaliana] peroxidase [Arabidopsis thaliana] >gi|19347733|gb|AAL86292.1| protein [Arabidopsis thaliana] >gi|22136690|gb|AAM91664.1|
  misc_feature (1)..(222): Homolog of NCBI NO: 25453209 NR Description: Peroxidase 32 precursor (Atperox P32) (PRXR3) >gi|1402908|emb|CAA66959.1| peroxidase [Arabidopsis thaliana] peroxidase ATP16a [Arabidopsis thaliana]
  misc_feature (1)..(222): Homolog of NCBI NO: 15229095 NR Description: peroxidase, putative; protein id: At3g49120.1, by cDNA: 39678., supported by cDNA: gi_11908065, supported by gi_12642879, supported by cDNA: gi_13265526, supported by cDNA:
  misc_feature (1)..(222): Homolog of NCBI NO: 480907 NR Description: peroxidase (EC 1.11.1.7) Cb - Arabidopsis

SEQ ID NO: 77037 - DNA, 1794 bp, Arabidopsis thaliana
  misc_feature (1)..(1794): Ceres Seq. ID no. 12558789
  misc_feature: MA Experiment ID: 108433 Result: Up-regulated in Transcription
  misc_feature: MA Experiment 108433 PARAMETER Experiment Name: At_rhl_Mutant2_cDNA_P Parameter: Age (day) Value: 7
  misc_feature: MA Experiment 108433 PARAMETER Experiment Name: At_rhl_Mutant2_cDNA_P Parameter: Organism Value: A. thaliana
  misc_feature: MA Experiment 108433 PARAMETER Experiment Name: At_rhl_Mutant2_cDNA_P Parameter: Plant Line Value: rhl Mutant vs. wt landsburg
  misc_feature: MA Experiment 108433 PARAMETER Experiment Name: At_rhl_Mutant2_cDNA_P Parameter: Tissue Value: Roots
  misc_feature: MA Experiment ID: 108434 Result: Down-regulated in Transcription
  misc_feature: MA Experiment 108434 PARAMETER Experiment Name: At_Root_Tips_cDNA_P Parameter: Tissue Value: Root Tips
  misc_feature: MA Experiment ID: 108461 Result: Up-regulated in Transcription
  misc_feature: MA Experiment 108461 PARAMETER Experiment Name: At_Germinating_Seeds_cDNA_P Parameter: Age (day) Value: 1 vs. 0
  misc_feature: MA Experiment 108461 PARAMETER Experiment Name: At_Germinating_Seeds_cDNA_P Parameter: Tissue Value: Germinating Seeds
  misc_feature: MA Experiment ID: 108463 Result: Up-regulated in Transcription
  misc_feature: MA Experiment 108463 PARAMETER Experiment Name: At_Germinating_Seeds_cDNA_P Parameter: Age (day) Value: 3 vs. 0
  misc_feature: MA Experiment 108463 PARAMETER Experiment Name: At_Germinating_Seeds_cDNA_P Parameter: Tissue Value: Germinating Seeds
  misc_feature: MA Experiment ID: 108464 Result: Up-regulated in Transcription
  misc_feature: MA Experiment 108464 PARAMETER Experiment Name: At_Germinating_Seeds_cDNA_P Parameter: Age (day) Value: 4 vs. 0
  misc_feature: MA Experiment 108464 PARAMETER Experiment Name: At_Germinating_Seeds_cDNA_P Parameter: Tissue Value: Germinating Seeds
  misc_feature: MA Experiment ID: 108569 Result: Up-regulated in Transcription
  misc_feature: MA Experiment 108569 PARAMETER Experiment Name: At_0.001%_MeJA__cDNA_P Parameter: Timepoint (hr) Value: 6
  misc_feature: MA Experiment 108569 PARAMETER Experiment Name: At_0.001%_MeJA__cDNA_P Parameter: Tissue Value: Aerial
  misc_feature: MA Experiment 108569 PARAMETER Experiment Name: At_0.001%_MeJA__cDNA_P Parameter: Treatment Value: 0.001% MeJA vs. No Treatment
  misc_feature: MA Experiment ID: 108573 Result: Up-regulated in Transcription
  misc_feature: MA Experiment 108573 PARAMETER Experiment Name: At_Drought_cDNA_P Parameter: Timepoint (hr) Value: 6
  misc_feature: MA Experiment 108573 PARAMETER Experiment Name: At_Drought_cDNA_P Parameter: Tissue Value: Aerial
  misc_feature: MA Experiment 108573 PARAMETER Experiment Name: At_Drought_cDNA_P Parameter: Treatment Value: Drought vs. No Drought
  misc_feature: MA Experiment ID: 108585 Result: Up-regulated in Transcription
  misc_feature: MA Experiment 108585 PARAMETER Experiment Name: At_5mM_NaNP_cDNA_P Parameter: Timepoint (hr) Value: 6
  misc_feature: MA Experiment 108585 PARAMETER Experiment Name: At_5mM_NaNP_cDNA_P Parameter: Tissue Value: Aerial
  misc_feature: MA Experiment 108585 PARAMETER Experiment Name: At_5mM_NaNP_cDNA_P Parameter: Treatment Value: null
  misc_feature: MA Experiment ID: 108594 Result: Down-regulated in Transcription
  misc_feature: MA Experiment 108594 PARAMETER Experiment Name: At_Ler-rhl_Root_cDNA_P Parameter: Plant Line Value: null
  misc_feature: MA Experiment ID: 108595 Result: Down-regulated in Transcription
  misc_feature: MA Experiment 108595 PARAMETER Experiment Name: At_Ler-pi_Ovule_cDNA_P Parameter: Plant Line Value: null
  misc_feature: MA Experiment ID: 20000087 Result: Down-regulated in Transcription
  misc_feature: MA Experiment 20000087 PARAMETER Experiment Name: At_100uM_ABA_Mutants_cDNA_P Parameter: Plant Line Value: WS
  misc_feature: MA Experiment 20000087 PARAMETER Experiment Name: At_100uM_ABA_Mutants_cDNA_P Parameter: Timepoint (hr) Value: 6
  misc_feature: MA Experiment 20000087 PARAMETER Experiment Name: At_100uM_ABA_Mutants_cDNA_P Parameter: Tissue Value: Aerial
  misc_feature: MA Experiment 20000087 PARAMETER Experiment Name: At_100uM_ABA_Mutants_cDNA_P Parameter: Treatment Value: 100uM ABA vs. No Treatment
  misc_feature: MA Experiment ID: 20000089 Result: Down-regulated in Transcription
  misc_feature: MA Experiment ID: 20000090 Result: Down-regulated in Transcription
  misc_feature: MA Experiment ID: 20000111 Result: Up-regulated in Transcription
  misc_feature: MA Experiment 20000111 PARAMETER Experiment Name: At_42deg_Heat_cDNA_P Parameter: Temperature (deg C) Value: 42 vs. 22
  misc_feature: MA Experiment 20000111 PARAMETER Experiment Name: At_42deg_Heat_cDNA_P Parameter: Timepoint (hr) Value: 6
  misc_feature: MA Experiment 20000111 PARAMETER Experiment Name: At_42deg_Heat_cDNA_P Parameter: Tissue Value: Aerial
  misc_feature: MA Experiment ID: 20000173 Result: Up-regulated in Transcription
  misc_feature: MA Experiment 20000173 PARAMETER Experiment Name: At_42deg_Heat_P Parameter: Age (day) Value: 14
  misc_feature: MA Experiment 20000173 PARAMETER Experiment Name: At_42deg_Heat_P Parameter: Organism Value: A. thaliana
  misc_feature: MA Experiment 20000173 PARAMETER Experiment Name: At_42deg_Heat_P Parameter: Plant Line Value: WS
  misc_feature: MA Experiment 20000173 PARAMETER Experiment Name: At_42deg_Heat_P Parameter: Temperature (deg C) Value: 42 vs. 22
  misc_feature: MA Experiment 20000173 PARAMETER Experiment Name: At_42deg_Heat_P Parameter: Timepoint (hr) Value: 6
  misc_feature: MA Experiment 20000173 PARAMETER Experiment Name: At_42deg_Heat_P Parameter: Tissue Value: Aerial
  misc_feature: MA Experiment ID: 20000436 Result: Up-regulated in Transcription
  misc_feature: MA Experiment 20000436 PARAMETER Experiment Name: At_Drought_P Parameter: Age (day) Value: 7
  misc_feature: MA Experiment 20000436 PARAMETER Experiment Name: At_Drought_P Parameter: Organism Value: A. thaliana
  misc_feature: MA Experiment 20000436 PARAMETER Experiment Name: At_Drought_P Parameter: Plant Line Value: WS
  misc_feature: MA Experiment 20000436 PARAMETER Experiment Name: At_Drought_P Parameter: Timepoint (hr) Value: 12
  misc_feature: MA Experiment 20000436 PARAMETER Experiment Name: At_Drought_P Parameter: Tissue Value: Whole Plant
  misc_feature: MA Experiment 20000436 PARAMETER Experiment Name: At_Drought_P Parameter: Treatment Value: Drought vs. No Drought
  misc_feature: MA Experiment ID: 20000455 Result: Up-regulated in Transcription
  misc_feature: MA Experiment 20000455 PARAMETER Experiment Name: At_100uM_ABA_P Parameter: Age (day) Value: 16
  misc_feature: MA Experiment 20000455 PARAMETER Experiment Name: At_100uM_ABA_P Parameter: Organism Value: A. thaliana
  misc_feature: MA Experiment 20000455 PARAMETER Experiment Name: At_100uM_ABA_P Parameter: Plant Line Value: WS
  misc_feature: MA Experiment 20000455 PARAMETER Experiment Name: At_100uM_ABA_P Parameter: Timepoint (hr) Value: 48
  misc_feature: MA Experiment 20000455 PARAMETER Experiment Name: At_100uM_ABA_P Parameter: Tissue Value: Aerial
  misc_feature: MA Experiment 20000455 PARAMETER Experiment Name: At_100uM_ABA_P Parameter: Treatment Value: 100uM ABA vs. No Treatment
  misc_feature: MA Experiment ID: 20000794 Result: Down-regulated in Transcription
  misc_feature: MA Experiment 20000794 PARAMETER Experiment Name: At_Petals_P Parameter: Age (day) Value: 23-25 days
  misc_feature: MA Experiment 20000794 PARAMETER Experiment Name: At_Petals_P Parameter: Plant Line Value: WS
  misc_feature: MA Experiment 20000794 PARAMETER Experiment Name: At_Petals_P Parameter: Tissue Value: Petals vs. Whole plant
  misc_feature: MA Experiment ID: 20001905 Result: Up-regulated in Transcription
  misc_feature: MA Experiment 20001905 PARAMETER Experiment Name: At_Drought_Reproduction_P Parameter: Age (day) Value: 40
  misc_feature: MA Experiment 20001905 PARAMETER Experiment Name: At_Drought_Reproduction_P Parameter: Organism Value: A. thaliana
  misc_feature: MA Experiment 20001905 PARAMETER Experiment Name: At_Drought_Reproduction_P Parameter: Plant Line Value: WS
  misc_feature: MA Experiment 20001905 PARAMETER Experiment Name: At_Drought_Reproduction_P Parameter: Timepoint (day) Value: 10
  misc_feature: MA Experiment 20001905 PARAMETER Experiment Name: At_Drought_Reproduction_P Parameter: Tissue Value: Rosettes
  misc_feature: MA Experiment 20001905 PARAMETER Experiment Name: At_Drought_Reproduction_P Parameter: Treatment Value: Drought vs. No Drought
  misc_feature: Phenotype: ROSETTE LEAVES Shape-Oval
  misc_feature: Phenotype: ROSETTE LEAVES Shape-Serrate
  misc_feature: Phenotype: WHOLE PLANT Color-Dark Green
  misc_feature: Phenotype: WHOLE PLANT Color-High Anthocyanin
  misc_feature: Phenotype: WHOLE PLANT Size-Small
  misc_feature: Phenotype: WHOLE PLANT Size-Small
  misc_feature: Phenotype: INFLORESCENCE Height-Short
  misc_feature: Phenotype: ROSETTE LEAVES Shape-Oval
  misc_feature: Phenotype: WHOLE PLANT Color-Dark Green
  misc_feature: Phenotype: WHOLE PLANT Color-High Anthocyanin
  misc_feature: Phenotype: WHOLE PLANT Size-Small
  misc_feature: Phenotype: WHOLE PLANT Size-Small
  misc_feature: Phenotype: INFLORESCENCE Flowering Time-Late Flowering
  misc_feature: Phenotype: ROSETTE LEAVES Shape-Oval
  misc_feature: Phenotype: WHOLE PLANT Size-Small
  misc_feature: Phenotype: INFLORESCENCE Flowering Time-Late Flowering
  misc_feature: Phenotype: ROSETTE LEAVES Curled-Curled 3
  misc_feature: Phenotype: WHOLE PLANT Color-Dark Green
  misc_feature: Phenotype: WHOLE PLANT Size-Small
  misc_feature: Phenotype: WHOLE PLANT Size-Small
  misc_feature: Phenotype: INFLORESCENCE Height-Short
  misc_feature: Phenotype: ROSETTE LEAVES Curled-Curled 3
  misc_feature: Phenotype: WHOLE PLANT Color-Dark Green
  misc_feature: Phenotype: WHOLE PLANT Size-Small
  misc_feature: Phenotype: WHOLE PLANT Size-Small
  misc_feature: Phenotype: INFLORESCENCE Height-Short
  misc_feature: Phenotype: ROSETTE LEAVES Curled-Curled 3
  misc_feature: Phenotype: WHOLE PLANT Color-Dark Green
  misc_feature: Phenotype: WHOLE PLANT Size-Small
  misc_feature: Phenotype: WHOLE PLANT Size-Small
  misc_feature: Phenotype: INFLORESCENCE Height-Short
ctcagcagcttcttctgctttcaattactctcgccgacgattttctcaccggaaaaaaacaatatcattgcggatacacaaactataatggacctcctcttgctggagaagtctttaatcgccgtcttcgtggcggtgattctcgccacggtgatttcaaagctccgcggcaagaaattgaagctacctccaggtcctataccaattccgatcttcggaaactggcttcaagtcggagatgatctcaaccaccgtaatctcgtcgattacgctaagaaattcggcgatctcttcctcctccgtatgggtcagcgaaacctagtcgtcgtctcctcaccggatctaacaaaggaagtgctcctcactcaaggcgttgagtttggatccagaacgagaaacgtcgtgttcgacattttcaccgggaaaggtcaagatatggtgttcactgtttacggcgagcattggaggaagatgagaagaatcatgacggttcctttcttcaccaacaaagttgttcaacagaatcgtgaaggttgggagtttgaagcagctagtgttgttgaagatgttaagaagaatccagattctgctacgaaaggaatcgtgttgaggaaacgtttgcaattgatgatgtataacaatatgttccgtatcatgttcgatagaagatttgagagtgaggatgatcctcttttccttaggcttaaggctttgaatggtgagagaagtcgattagctcagagctttgagtataactatggagatttcattcctatccttagaccattcctcagaggctatttgaagatttgtcaagatgtgaaagatcgaagaatcgctcttttcaagaagtactttgttgatgagaggaagcaaattgcgagttctaagcctacaggtagtgaaggattgaaatgtgccattgatcacatccttgaagctgagcagaagggagaaatcaacgaggacaatgttctttacatcgtcgagaacatcaatgtcgccgcgattgagacaacattgtggtctatcgagtggggaattgcagagctagtgaaccatcctgaaatccagagtaagctaaggaacgaactcgacacagttcttggaccgggtgtgcaagtcaccgagcctgatcttcacaaacttccataccttcaagctgtggttaaggagactcttcgtctgagaatggcgattcctctcctcgtgcctcacatgaacctccatgatgcgaagctcgctggctacgatatcccagcagaaagcaaaatccttgttaatgcttggtggctagcaaacaaccccaacagctggaagaagcctgaagagtttagaccagagaggttctttgaagaagaatcgcacgtggaagctaacggtaatgacttcaggtatgtgccatttggtgttggacgtcgaagctgtcccgggattatattggcattgcctattttggggatcaccattggtaggatggtccagaacttcgagcttcttcctcctccaggacagtctaaagtggatactagtgagaaaggtggacaattcagcttgcacatccttaaccactccataatcgttatgaaaccaaggaactgttaaactttctgcacaaaaaaaaggatgaagatgactttataaatgtttgtgaaatctgttgaaatattcccttgttttgcttttgtgagatgtttttgtgtaaaatgtctttaaatggttcgttctacgattgcaataataattagtggtgctcattgttttggatggatcaatgttatacttatatcattt

SEQ ID NO: 77038 - protein, 534 aa, Arabidopsis thaliana
  peptide (1)..(534): Ceres Seq. ID no. 12558790
  misc_feature (63)..(528): Pfam Name: Cytochrome P450 Pfam Description: Cytochrome P450
  misc_feature (30)..(534): Homolog of NCBI NO: 15224514 NR Description: cinnamate-4-hydroxylase; protein id: At2g30490.1, by cDNA: gi_17473765, supported by cDNA: gi_1773288, supported by gi_2780737, supported by cDNA: gi_4096692 [Arabidopsis (P450C4H)
  misc_feature (30)..(534): Homolog of NCBI NO: 1773287 NR Description: cinnamate-4-hydroxylase [Arabidopsis thaliana]
  misc_feature (30)..(534): Homolog of NCBI NO: 2780738 NR Description: trans-cinnamate 4-hydroxylase [Arabidopsis
  misc_feature (30)..(534): Homolog of NCBI NO: 4096693 NR Description: cinnamate 4-hydroxylase [Arabidopsis thaliana]
  misc_feature (30)..(533): Homolog of NCBI NO: 16555877 NR Description: cinnamic acid 4-hydroxylase [Lithospermum
  misc_feature (30)..(533): Homolog of NCBI NO: 16555879 NR Description: cinnamic acid 4-hydroxylase [Lithospermum
  misc_feature (30)..(532): Homolog of NCBI NO: 9965897 NR Description: cinnamate-4-hydroxylase [Gossypium arboreum]
  misc_feature (30)..(532): Homolog of NCBI NO: 1351206 NR Description: Trans-cinnamate 4-monooxygenase (Cinnamic acid 4- (CA4H) (C4H) (P450C4H) (Cytochrome P450 73)
  misc_feature (30)..(533): Homolog of NCBI NO: 12276037 NR Description: cinnamate 4-hydroxylase [Populus balsamifera
  misc_feature (30)..(533): Homolog of NCBI NO: 3915089 NR Description: Trans-cinnamate 4-monooxygenase (Cinnamic acid 4- (CA4H) (C4H) (P450C4H) (Cytochrome P450 73)
LSSFFCFQLLSPTIFSPEKNNIIADTQTIMDLLLLEKSLIAVFVAVILATVISKLRGKKLKLPPGPIPIPIFGNWLQVGDDLNHRNLVDYAKKFGDLFLLRMGQRNLVVVSSPDLTKEVLLTQGVEFGSRTRNVVFDIFTGKGQDMVFTVYGEHWRKMRRIMTVPFFTNKVVQQNREGWEFEAASVVEDVKKNPDSATKGIVLRKRLQLMMYNNMFRIMFDRRFESEDDPLFLRLKALNGERSRLAQSFEYNYGDFIPILRPFLRGYLKICQDVKDRRIALFKKYFVDERKQIASSKPTGSEGLKCAIDHILEAEQKGEINEDNVLYIVENINVAAIETTLWSIEWGIAELVNHPEIQSKLRNELDTVLGPGVQVTEPDLHKLPYLQAVVKETLRLRMAIPLLVPHMNLHDAKLAGYDIPAESKILVNAWWLANNPNSWKKPEEFRPERFFEEESHVEANGNDFRYVPFGVGRRSCPGIILALPILGITIGRMVQNFELLPPPGQSKVDTSEKGGQFSLHILNHSIIVMKPRNC

SEQ ID NO: 77039 - protein, 505 aa, Arabidopsis thaliana
  peptide (1)..(505): Ceres Seq. ID no. 12558791
  misc_feature (34)..(499): Pfam Name: Cytochrome P450 Pfam Description: Cytochrome P450
  misc_feature (1)..(505): Homolog of NCBI NO: 15224514 NR Description: cinnamate-4-hydroxylase; protein id: At2g30490.1, by cDNA: gi_17473765, supported by cDNA: gi_1773288, supported by gi_2780737, supported by cDNA: gi_4096692 [Arabidopsis (P450C4H)
  misc_feature (1)..(505): Homolog of NCBI NO: 1773287 NR Description: cinnamate-4-hydroxylase [Arabidopsis thaliana]
  misc_feature (1)..(505): Homolog of NCBI NO: 2780738 NR Description: trans-cinnamate 4-hydroxylase [Arabidopsis
  misc_feature (1)..(505): Homolog of NCBI NO: 4096693 NR Description: cinnamate 4-hydroxylase [Arabidopsis thaliana]
  misc_feature (1)..(504): Homolog of NCBI NO: 16555877 NR Description: cinnamic acid 4-hydroxylase [Lithospermum
  misc_feature (1)..(504): Homolog of NCBI NO: 16555879 NR Description: cinnamic acid 4-hydroxylase [Lithospermum
  misc_feature (1)..(503): Homolog of NCBI NO: 9965897 NR Description: cinnamate-4-hydroxylase [Gossypium arboreum]
  misc_feature (1)..(503): Homolog of NCBI NO: 1351206 NR Description: Trans-cinnamate 4-monooxygenase (Cinnamic acid 4- (CA4H) (C4H) (P450C4H) (Cytochrome P450 73)
  misc_feature (1)..(504): Homolog of NCBI NO: 12276037 NR Description: cinnamate 4-hydroxylase [Populus balsamifera
  misc_feature (1)..(504): Homolog of NCBI NO: 3915089 NR Description: Trans-cinnamate 4-monooxygenase (Cinnamic acid 4- (CA4H) (C4H) (P450C4H) (Cytochrome P450 73)
MDLLLLEKSLIAVFVAVILATVISKLRGKKLKLPPGPIPIPIFGNWLQVGDDLNHRNLVDYAKKFGDLFLLRMGQRNLVVVSSPDLTKEVLLTQGVEFGSRTRNVVFDIFTGKGQDMVFTVYGEHWRKMRRIMTVPFFTNKVVQQNREGWEFEAASVVEDVKKNPDSATKGIVLRKRLQLMMYNNMFRIMFDRRFESEDDPLFLRLKALNGERSRLAQSFEYNYGDFIPILRPFLRGYLKICQDVKDRRIALFKKYFVDERKQIASSKPTGSEGLKCAIDHILEAEQKGEINEDNVLYIVENINVAAIETTLWSIEWGIAELVNHPEIQSKLRNELDTVLGPGVQVTEPDLHKLPYLQAVVKETLRLRMAIPLLVPHMNLHDAKLAGYDIPAESKILVNAWWLANNPNSWKKPEEFRPERFFEEESHVEANGNDFRYVPFGVGRRSCPGIILALPILGITIGRMVQNFELLPPPGQSKVDTSEKGGQFSLHILNHSIIVMKPRNC

SEQ ID NO: 77040 - protein, 433 aa, Arabidopsis thaliana
  peptide (1)..(433): Ceres Seq. ID no. 12558792
  misc_feature (1)..(427): Pfam Name: Cytochrome P450 Pfam Description: Cytochrome P450
  misc_feature (1)..(433): Homolog of NCBI NO: 15224514 NR Description: cinnamate-4-hydroxylase; protein id: At2g30490.1, by cDNA: gi_17473765, supported by cDNA: gi_1773288, supported by gi_2780737, supported by cDNA: gi_4096692 [Arabidopsis (P450C4H)
  misc_feature (1)..(433): Homolog of NCBI NO: 1773287 NR Description: cinnamate-4-hydroxylase [Arabidopsis thaliana]
  misc_feature (1)..(433): Homolog of NCBI NO: 2780738 NR Description: trans-cinnamate 4-hydroxylase [Arabidopsis
  misc_feature (1)..(433): Homolog of NCBI NO: 4096693 NR Description: cinnamate 4-hydroxylase [Arabidopsis thaliana]
  misc_feature (1)..(432): Homolog of NCBI NO: 16555877 NR Description: cinnamic acid 4-hydroxylase [Lithospermum
  misc_feature (1)..(432): Homolog of NCBI NO: 16555879 NR Description: cinnamic acid 4-hydroxylase [Lithospermum
  misc_feature (1)..(431): Homolog of NCBI NO: 9965897 NR Description: cinnamate-4-hydroxylase [Gossypium arboreum]
  misc_feature (1)..(431): Homolog of NCBI NO: 1351206 NR Description: Trans-cinnamate 4-monooxygenase (Cinnamic acid 4- (CA4H) (C4H) (P450C4H) (Cytochrome P450 73)
  misc_feature (1)..(432): Homolog of NCBI NO: 12276037 NR Description: cinnamate 4-hydroxylase [Populus balsamifera
  misc_feature (1)..(432): Homolog of NCBI NO: 3915089 NR Description: Trans-cinnamate 4-monooxygenase (Cinnamic acid 4- (CA4H) (C4H) (P450C4H) (Cytochrome P450 73)
MGQRNLVVVSSPDLTKEVLLTQGVEFGSRTRNVVFDIFTGKGQDMVFTVYGEHWRKMRRIMTVPFFTNKVVQQNREGWEFEAASVVEDVKKNPDSATKGIVLRKRLQLMMYNNMFRIMFDRRFESEDDPLFLRLKALNGERSRLAQSFEYNYGDFIPILRPFLRGYLKICQDVKDRRIALFKKYFVDERKQIASSKPTGSEGLKCAIDHILEAEQKGEINEDNVLYIVENINVAAIETTLWSIEWGIAELVNHPEIQSKLRNELDTVLGPGVQVTEPDLHKLPYLQAVVKETLRLRMAIPLLVPHMNLHDAKLAGYDIPAESKILVNAWWLANNPNSWKKPEEFRPERFFEEESHVEANGNDFRYVPFGVGRRSCPGIILALPILGITIGRMVQNFELLPPPGQSKVDTSEKGGQFSLHILNHSIIVMKPRNC

SEQ ID NO: 77041 - DNA, 1312 bp, Arabidopsis thaliana
  misc_feature (1)..(1312): Ceres Seq. ID no. 12559149
  misc_feature: MA Experiment ID: 108433 Result: Up-regulated in Transcription
  misc_feature: MA Experiment 108433 PARAMETER Experiment Name: At_rhl_Mutant2_cDNA_P Parameter: Age (day) Value: 7
  misc_feature: MA Experiment 108433 PARAMETER Experiment Name: At_rhl_Mutant2_cDNA_P Parameter: Organism Value: A. thaliana
  misc_feature: MA Experiment 108433 PARAMETER Experiment Name: At_rhl_Mutant2_cDNA_P Parameter: Plant Line Value: rhl Mutant vs. wt landsburg
  misc_feature: MA Experiment 108433 PARAMETER Experiment Name: At_rhl_Mutant2_cDNA_P Parameter: Tissue Value: Roots
  misc_feature: MA Experiment ID: 108434 Result: Down-regulated in Transcription
  misc_feature: MA Experiment 108434 PARAMETER Experiment Name: At_Root_Tips_cDNA_P Parameter: Tissue Value: Root Tips
  misc_feature: MA Experiment ID: 108461 Result: Up-regulated in Transcription
  misc_feature: MA Experiment 108461 PARAMETER Experiment Name: At_Germinating_Seeds_cDNA_P Parameter: Age (day) Value: 1 vs. 0
  misc_feature: MA Experiment 108461 PARAMETER Experiment Name: At_Germinating_Seeds_cDNA_P Parameter: Tissue Value: Germinating Seeds
  misc_feature: MA Experiment ID: 108463 Result: Up-regulated in Transcription
  misc_feature: MA Experiment 108463 PARAMETER Experiment Name: At_Germinating_Seeds_cDNA_P Parameter: Age (day) Value: 3 vs. 0
  misc_feature: MA Experiment 108463 PARAMETER Experiment Name: At_Germinating_Seeds_cDNA_P Parameter: Tissue Value: Germinating Seeds
  misc_feature: MA Experiment ID: 108473 Result: Up-regulated in Transcription
  misc_feature: MA Experiment 108473 PARAMETER Experiment Name: At_Drought_Flowers_cDNA_P Parameter: Timepoint (hr) Value: 7 d
  misc_feature: MA Experiment 108473 PARAMETER Experiment Name: At_Drought_Flowers_cDNA_P Parameter: Tissue Value: Flower
  misc_feature: MA Experiment 108473 PARAMETER Experiment Name: At_Drought_Flowers_cDNA_P Parameter: Treatment Value: Drought vs. No Drought
  misc_feature: MA Experiment ID: 108474 Result: Up-regulated in Transcription
  misc_feature: MA Experiment 108474 PARAMETER Experiment Name: At_Drought_Flowers_cDNA_P Parameter: Timepoint (hr) Value: null
  misc_feature: MA Experiment 108474 PARAMETER Experiment Name: At_Drought_Flowers_cDNA_P Parameter: Treatment Value: Drought vs. No Drought
  misc_feature: MA Experiment ID: 108561 Result: Up-regulated in Transcription
  misc_feature: MA Experiment 108561 PARAMETER Experiment Name: At_100uM_ABA_cDNA_P Parameter: Timepoint (hr) Value: 6
  misc_feature: MA Experiment 108561 PARAMETER Experiment Name: At_100uM_ABA_cDNA_P Parameter: Tissue Value: Aerial
  misc_feature: MA Experiment 108561 PARAMETER Experiment Name: At_100uM_ABA_cDNA_P Parameter: Treatment Value: 100uM ABA vs. No Treatment
  misc_feature: MA Experiment ID: 108572 Result: Up-regulated in Transcription
  misc_feature: MA Experiment 108572 PARAMETER Experiment Name: At_Drought_cDNA_P Parameter: Timepoint (hr) Value: 1
  misc_feature: MA Experiment 108572 PARAMETER Experiment Name: At_Drought_cDNA_P Parameter: Tissue Value: Aerial
  misc_feature: MA Experiment 108572 PARAMETER Experiment Name: At_Drought_cDNA_P Parameter: Treatment Value: Drought vs. No Drought
  misc_feature: MA Experiment ID: 108573 Result: Up-regulated in Transcription
  misc_feature: MA Experiment 108573 PARAMETER Experiment Name: At_Drought_cDNA_P Parameter: Timepoint (hr) Value: 6
  misc_feature: MA Experiment 108573 PARAMETER Experiment Name: At_Drought_cDNA_P Parameter: Tissue Value: Aerial
  misc_feature: MA Experiment 108573 PARAMETER Experiment Name: At_Drought_cDNA_P Parameter: Treatment Value: Drought vs. No Drought
  misc_feature: MA Experiment ID: 108577 Result: Down-regulated in Transcription
  misc_feature: MA Experiment 108577 PARAMETER Experiment Name: At_42deg_Heat_cDNA_P Parameter: Temperature (deg C) Value: 42 vs. 22
  misc_feature: MA Experiment 108577 PARAMETER Experiment Name: At_42deg_Heat_cDNA_P Parameter: Timepoint (hr) Value: 6
  misc_feature: MA Experiment 108577 PARAMETER Experiment Name: At_42deg_Heat_cDNA_P Parameter: Tissue Value: Aerial
  misc_feature: MA Experiment ID: 108579 Result: Up-regulated in Transcription
  misc_feature: MA Experiment 108579 PARAMETER Experiment Name: At_4deg_Cold_cDNA_P Parameter: Temperature (deg C) Value: 4 vs. 22
  misc_feature: MA Experiment 108579 PARAMETER Experiment Name: At_4deg_Cold_cDNA_P Parameter: Timepoint (hr) Value: 6
  misc_feature: MA Experiment 108579 PARAMETER Experiment Name: At_4deg_Cold_cDNA_P Parameter: Tissue Value: Aerial
  misc_feature: MA Experiment ID: 108594 Result: Down-regulated in Transcription
  misc_feature: MA Experiment 108594 PARAMETER Experiment Name: At_Ler-rhl_Root_cDNA_P Parameter: Plant Line Value: null
  misc_feature: MA Experiment ID: 108595 Result: Down-regulated in Transcription
  misc_feature: MA Experiment 108595 PARAMETER Experiment Name: At_Ler-pi_Ovule_cDNA_P Parameter: Plant Line Value: null
  misc_feature: MA Experiment ID: 108605 Result: Up-regulated in Transcription
  misc_feature: MA Experiment 108605 PARAMETER Experiment Name: At_100uM_ABA_cDNA_P Parameter: Timepoint (hr) Value: 6
  misc_feature: MA Experiment 108605 PARAMETER Experiment Name: At_100uM_ABA_cDNA_P Parameter: Tissue Value: Aerial
  misc_feature: MA Experiment 108605 PARAMETER Experiment Name: At_100uM_ABA_cDNA_P Parameter: Treatment Value: 100uM ABA vs. No Treatment
  misc_feature: MA Experiment ID: 108607 Result: Up-regulated in Transcription
  misc_feature: MA Experiment 108607 PARAMETER Experiment Name: At_100uM_ABA_cDNA_P Parameter: Timepoint (hr) Value: 4
  misc_feature: MA Experiment 108607 PARAMETER Experiment Name: At_100uM_ABA_cDNA_P Parameter: Tissue Value: Aerial
  misc_feature: MA Experiment 108607 PARAMETER Experiment Name: At_100uM_ABA_cDNA_P Parameter: Treatment Value: 100uM ABA vs. No Treatment
  misc_feature: MA Experiment ID: 108608 Result: Up-regulated in Transcription
  misc_feature: MA Experiment 108608 PARAMETER Experiment Name: At_100uM_ABA_cDNA_P Parameter: Timepoint (hr) Value: 1
  misc_feature: MA Experiment 108608 PARAMETER Experiment Name: At_100uM_ABA_cDNA_P Parameter: Tissue Value: Aerial
  misc_feature: MA Experiment 108608 PARAMETER Experiment Name: At_100uM_ABA_cDNA_P Parameter: Treatment Value: 100uM ABA vs. No Treatment
  misc_feature: MA Experiment ID: 108609 Result: Up-regulated in Transcription
  misc_feature: MA Experiment 108609 PARAMETER Experiment Name: At_100uM_ABA_cDNA_P Parameter: Timepoint (hr) Value: 24
  misc_feature: MA Experiment 108609 PARAMETER Experiment Name: At_100uM_ABA_cDNA_P Parameter: Tissue Value: Aerial
  misc_feature: MA Experiment 108609 PARAMETER Experiment Name: At_100uM_ABA_cDNA_P Parameter: Treatment Value: 100uM ABA vs. No Treatment
  misc_feature: MA Experiment ID: 20000030 Result: Down-regulated in Transcription
  misc_feature: MA Experiment 20000030 PARAMETER Experiment Name: At_CS6630_Roots_cDNA_P Parameter: Plant Line Value: CS6630 vs. WS
  misc_feature: MA Experiment 20000030 PARAMETER Experiment Name: At_CS6630_Roots_cDNA_P Parameter: Tissue Value: Roots
  misc_feature: MA Experiment ID: 20000068 Result: Up-regulated in Transcription
  misc_feature: MA Experiment ID: 20000069 Result: Up-regulated in Transcription
  misc_feature: MA Experiment 20000069 PARAMETER Experiment Name: At_100uM_ABA_Mutants_cDNA_P Parameter: Plant Line Value: CS23
  misc_feature: MA Experiment 20000069 PARAMETER Experiment Name: At_100uM_ABA_Mutants_cDNA_P Parameter: Timepoint (hr) Value: 6
  misc_feature: MA Experiment 20000069 PARAMETER Experiment Name: At_100uM_ABA_Mutants_cDNA_P Parameter: Tissue Value: Aerial
  misc_feature: MA Experiment 20000069 PARAMETER Experiment Name: At_100uM_ABA_Mutants_cDNA_P Parameter: Treatment Value: 100uM ABA vs. No Treatment
  misc_feature: MA Experiment ID: 20000071 Result: Up-regulated in Transcription
  misc_feature: MA Experiment 20000071 PARAMETER Experiment Name: At_100uM_ABA_Mutants_cDNA_P Parameter: Plant Line Value: CS8104
  misc_feature: MA Experiment 20000071 PARAMETER Experiment Name: At_100uM_ABA_Mutants_cDNA_P Parameter: Timepoint (hr) Value: 6
  misc_feature: MA Experiment 20000071 PARAMETER Experiment Name: At_100uM_ABA_Mutants_cDNA_P Parameter: Tissue Value: Aerial
  misc_feature: MA Experiment 20000071 PARAMETER Experiment Name: At_100uM_ABA_Mutants_cDNA_P Parameter: Treatment Value: 100uM ABA vs. No Treatment
  misc_feature: MA Experiment ID: 20000072 Result: Up-regulated in Transcription
  misc_feature: MA Experiment 20000072 PARAMETER Experiment Name: At_100uM_ABA_Mutants_cDNA_P Parameter: Plant Line Value: CS8105
  misc_feature: MA Experiment 20000072 PARAMETER Experiment Name: At_100uM_ABA_Mutants_cDNA_P Parameter: Timepoint (hr) Value: 6
  misc_feature: MA Experiment 20000072 PARAMETER Experiment Name: At_100uM_ABA_Mutants_cDNA_P Parameter: Tissue Value: Aerial
  misc_feature: MA Experiment 20000072 PARAMETER Experiment Name: At_100uM_ABA_Mutants_cDNA_P Parameter: Treatment Value: 100uM ABA vs. No Treatment
  misc_feature: MA Experiment ID: 20000086 Result: Up-regulated in Transcription
  misc_feature: MA Experiment 20000086 PARAMETER Experiment Name: At_100uM_ABA_Mutants_cDNA_P Parameter: Plant Line Value: CS22
  misc_feature: MA Experiment 20000086 PARAMETER Experiment Name: At_100uM_ABA_Mutants_cDNA_P Parameter: Timepoint (hr) Value: 6
  misc_feature: MA Experiment 20000086 PARAMETER Experiment Name: At_100uM_ABA_Mutants_cDNA_P Parameter: Tissue Value: Aerial
  misc_feature: MA Experiment 20000086 PARAMETER Experiment Name: At_100uM_ABA_Mutants_cDNA_P Parameter: Treatment Value: 100uM ABA vs. No Treatment
  misc_feature: MA Experiment ID: 20000087 Result: Up-regulated in Transcription
  misc_feature: MA Experiment 20000087 PARAMETER Experiment Name: At_100uM_ABA_Mutants_cDNA_P Parameter: Plant Line Value: WS
  misc_feature: MA Experiment 20000087 PARAMETER Experiment Name: At_100uM_ABA_Mutants_cDNA_P Parameter: Timepoint (hr) Value: 6
  misc_feature: MA Experiment 20000087 PARAMETER Experiment Name: At_100uM_ABA_Mutants_cDNA_P Parameter: Tissue Value: Aerial
  misc_feature: MA Experiment 20000087 PARAMETER Experiment Name: At_100uM_ABA_Mutants_cDNA_P Parameter: Treatment Value: 100uM ABA vs. No Treatment
  misc_feature: MA Experiment ID: 20000089 Result: Up-regulated in Transcription
  misc_feature: MA Experiment ID: 20000111 Result: Down-regulated in Transcription
  misc_feature: MA Experiment 20000111 PARAMETER Experiment Name: At_42deg_Heat_cDNA_P Parameter: Temperature (deg C) Value: 42 vs. 22
  misc_feature: MA Experiment 20000111 PARAMETER Experiment Name: At_42deg_Heat_cDNA_P Parameter: Timepoint (hr) Value: 6
  misc_feature: MA Experiment 20000111 PARAMETER Experiment Name: At_42deg_Heat_cDNA_P Parameter: Tissue Value: Aerial
  misc_feature: MA Experiment ID: 20000117 Result: Up-regulated in Transcription
  misc_feature: MA Experiment 20000117 PARAMETER Experiment Name: At_100uM_ABA_Mutants_cDNA_P Parameter: Plant Line Value: Columbia
  misc_feature: MA Experiment 20000117 PARAMETER Experiment Name: At_100uM_ABA_Mutants_cDNA_P Parameter: Timepoint (hr) Value: 6
  misc_feature: MA Experiment 20000117 PARAMETER Experiment Name: At_100uM_ABA_Mutants_cDNA_P Parameter: Tissue Value: Aerial
  misc_feature: MA Experiment 20000117 PARAMETER Experiment Name: At_100uM_ABA_Mutants_cDNA_P Parameter: Treatment Value: 100uM ABA vs. No Treatment
  misc_feature: MA Experiment ID: 20000166 Result: Up-regulated in Transcription
  misc_feature: MA Experiment 20000166 PARAMETER Experiment Name: At_100uM_ABA_P Parameter: Age (day) Value: 14
  misc_feature: MA Experiment 20000166 PARAMETER Experiment Name: At_100uM_ABA_P Parameter: Organism Value: A. thaliana
  misc_feature: MA Experiment 20000166 PARAMETER Experiment Name: At_100uM_ABA_P Parameter: Plant Line Value: WS
  misc_feature: MA Experiment 20000166 PARAMETER Experiment Name: At_100uM_ABA_P Parameter: Timepoint (hr) Value: 1
  misc_feature: MA Experiment 20000166 PARAMETER Experiment Name: At_100uM_ABA_P Parameter: Tissue Value: Aerial
  misc_feature: MA Experiment 20000166 PARAMETER Experiment Name: At_100uM_ABA_P Parameter: Treatment Value: 100uM ABA vs. No Treatment
  misc_feature: MA Experiment ID: 20000169 Result: Up-regulated in Transcription
  misc_feature: MA Experiment 20000169 PARAMETER Experiment Name: At_100uM_ABA_P Parameter: Age (day) Value: 14
  misc_feature: MA Experiment 20000169 PARAMETER Experiment Name: At_100uM_ABA_P Parameter: Organism Value: A. thaliana
  misc_feature: MA Experiment 20000169 PARAMETER Experiment Name: At_100uM_ABA_P Parameter: Plant Line Value: WS
  misc_feature: MA Experiment 20000169 PARAMETER Experiment Name: At_100uM_ABA_P Parameter: Timepoint (hr) Value: 6
  misc_feature: MA Experiment 20000169 PARAMETER Experiment Name: At_100uM_ABA_P Parameter: Tissue Value: Aerial
  misc_feature: MA Experiment 20000169 PARAMETER Experiment Name: At_100uM_ABA_P Parameter: Treatment Value: 100uM ABA vs. No Treatment
  misc_feature: MA Experiment ID: 20000173 Result: Down-regulated in Transcription
  misc_feature: MA Experiment 20000173 PARAMETER Experiment Name: At_42deg_Heat_P Parameter: Age (day) Value: 14
  misc_feature: MA Experiment 20000173 PARAMETER Experiment Name: At_42deg_Heat_P Parameter: Organism Value: A. thaliana
  misc_feature: MA Experiment 20000173 PARAMETER Experiment Name: At_42deg_Heat_P Parameter: Plant Line Value: WS
  misc_feature: MA Experiment 20000173 PARAMETER Experiment Name: At_42deg_Heat_P Parameter: Temperature (deg C) Value: 42 vs. 22
  misc_feature: MA Experiment 20000173 PARAMETER Experiment Name: At_42deg_Heat_P Parameter: Timepoint (hr) Value: 6
  misc_feature: MA Experiment 20000173 PARAMETER Experiment Name: At_42deg_Heat_P Parameter: Tissue Value: Aerial
  misc_feature: MA Experiment ID: 20000180 Result: Up-regulated in Transcription
  misc_feature: MA Experiment 20000180 PARAMETER Experiment Name: At_Germinating_Seeds_P Parameter: Age (hr) Value: 24 vs. 0
  misc_feature: MA Experiment 20000180 PARAMETER Experiment Name: At_Germinating_Seeds_P Parameter: Tissue Value: Germinating Seeds
  misc_feature: MA Experiment ID: 20000224 Result: Up-regulated in Transcription
  misc_feature: MA Experiment ID: 20000227 Result: Down-regulated in Transcription
  misc_feature: MA Experiment 20000227 PARAMETER Experiment Name: At_Root-Tips-vs-Tops_P Parameter: Tissue Value: Root Tips vs. Root Tops
  misc_feature: MA Experiment ID: 20000235 Result: Down-regulated in Transcription
  misc_feature: MA Experiment 20000235 PARAMETER Experiment Name: At_Siliques_P Parameter: Age (day) Value: 21
  misc_feature: MA Experiment 20000235 PARAMETER Experiment Name: At_Siliques_P Parameter: Organism Value: A. thaliana
  misc_feature: MA Experiment 20000235 PARAMETER Experiment Name: At_Siliques_P Parameter: Plant Line Value: WS
  misc_feature: MA Experiment 20000235 PARAMETER Experiment Name: At_Siliques_P Parameter: Tissue Value: 5-10mm Siliques vs. Whole Plant
  misc_feature: MA Experiment ID: 20000264 Result: Down-regulated in Transcription
  misc_feature: MA Experiment 20000264 PARAMETER Experiment Name: At_Open_Flower_P Parameter: Age (day) Value: 21
  misc_feature: MA Experiment 20000264 PARAMETER Experiment Name: At_Open_Flower_P Parameter: Plant Line Value: WS
  misc_feature: MA Experiment 20000264 PARAMETER Experiment Name: At_Open_Flower_P Parameter: Tissue Value: Open Flower vs. Whole Plant
  misc_feature: MA Experiment ID: 20000265 Result: Down-regulated in Transcription
  misc_feature: MA Experiment 20000265 PARAMETER Experiment Name: At_Open_Flower_P Parameter: Age (day) Value: 21
  misc_feature: MA Experiment 20000265 PARAMETER Experiment Name: At_Open_Flower_P Parameter: Plant Line Value: WS
  misc_feature: MA Experiment 20000265 PARAMETER Experiment Name: At_Open_Flower_P Parameter: Tissue Value: Closed Flower vs. Whole Plant
  misc_feature: MA Experiment ID: 20000269 Result: Down-regulated in Transcription
  misc_feature: MA Experiment 20000269 PARAMETER Experiment Name: At_1mM_KNO3_L-vs-H_Roots_P Parameter: Age (day) Value: 7,10,12
  misc_feature: MA Experiment 20000269 PARAMETER Experiment Name: At_1mM_KNO3_L-vs-H_Roots_P Parameter: Organism Value: A. thaliana
  misc_feature: MA Experiment 20000269 PARAMETER Experiment Name: At_1mM_KNO3_L-vs-H_Roots_P Parameter: Plant Line Value: WS
  misc_feature: MA Experiment 20000269 PARAMETER Experiment Name: At_1mM_KNO3_L-vs-H_Roots_P Parameter: Timepoint (day) Value: 7,10,12
  misc_feature: MA Experiment 20000269 PARAMETER Experiment Name: At_1mM_KNO3_L-vs-H_Roots_P Parameter: Tissue Value: Roots
  misc_feature: MA Experiment 20000269 PARAMETER Experiment Name: At_1mM_KNO3_L-vs-H_Roots_P Parameter: Treatment Value: 1mM KNO3 vs. 50mM KNO3
  misc_feature: MA Experiment ID: 20000286 Result: Down-regulated in Transcription
  misc_feature: MA Experiment 20000286 PARAMETER Experiment Name: At_Open_Flower_P Parameter: Age (day) Value: 21
  misc_feature: MA Experiment 20000286 PARAMETER Experiment Name: At_Open_Flower_P Parameter: Plant Line Value: WS
  misc_feature: MA Experiment 20000286 PARAMETER Experiment Name: At_Open_Flower_P Parameter: Tissue Value: Half Open vs. Whole Plant
  misc_feature: MA Experiment ID: 20000451 Result: Up-regulated in Transcription
  misc_feature: MA Experiment 20000451 PARAMETER Experiment Name: At_CS6879_Shoots-Roots_P Parameter: Age (day) Value: 14
  misc_feature: MA Experiment 20000451 PARAMETER Experiment Name: At_CS6879_Shoots-Roots_P Parameter: Organism Value: A. thaliana
  misc_feature: MA Experiment 20000451 PARAMETER Experiment Name: At_CS6879_Shoots-Roots_P Parameter: Plant Line Value: CS6879 vs. WS
  misc_feature: MA Experiment 20000451 PARAMETER Experiment Name: At_CS6879_Shoots-Roots_P Parameter: Tissue Value: Roots
  misc_feature: MA Experiment ID: 20000452 Result: Up-regulated in Transcription
  misc_feature: MA Experiment 20000452 PARAMETER Experiment Name: At_CS6879_Shoots-Roots_P Parameter: Age (day) Value: 14
  misc_feature: MA Experiment 20000452 PARAMETER Experiment Name: At_CS6879_Shoots-Roots_P Parameter: Organism Value: A. thaliana
  misc_feature: MA Experiment 20000452 PARAMETER Experiment Name: At_CS6879_Shoots-Roots_P Parameter: Plant Line Value: CS6879 vs. WS
  misc_feature: MA Experiment 20000452 PARAMETER Experiment Name: At_CS6879_Shoots-Roots_P Parameter: Tissue Value: Shoots
  misc_feature: MA Experiment ID: 20000453 Result: Up-regulated in Transcription
  misc_feature: MA Experiment 20000453 PARAMETER Experiment Name: At_100uM_ABA_P Parameter: Age (day) Value: 15
  misc_feature: MA Experiment 20000453 PARAMETER Experiment Name: At_100uM_ABA_P Parameter: Organism Value: A. thaliana
  misc_feature: MA Experiment 20000453 PARAMETER Experiment Name: At_100uM_ABA_P Parameter: Plant Line Value: WS
  misc_feature: MA Experiment 20000453 PARAMETER Experiment Name: At_100uM_ABA_P Parameter: Timepoint (hr) Value: 24
  misc_feature: MA Experiment 20000453 PARAMETER Experiment Name: At_100uM_ABA_P Parameter: Tissue Value: Aerial
  misc_feature: MA Experiment 20000453 PARAMETER Experiment Name: At_100uM_ABA_P Parameter: Treatment Value: 100uM ABA vs. No Treatment
  misc_feature: MA Experiment ID: 20000573 Result: Down-regulated in Transcription
  misc_feature: MA Experiment 20000573 PARAMETER Experiment Name: At_100uM_ABA_Mutants__P Parameter: Organism Value: A. thaliana
  misc_feature: MA Experiment 20000573 PARAMETER Experiment Name: At_100uM_ABA_Mutants__P Parameter: Plant Line Value: CS22 vs. Ler wt
  misc_feature: MA Experiment 20000573 PARAMETER Experiment Name: At_100uM_ABA_Mutants__P Parameter: Timepoint (hr) Value: N/A
  misc_feature: MA Experiment 20000573 PARAMETER Experiment Name: At_100uM_ABA_Mutants__P Parameter: Tissue Value: Whole Plant
  misc_feature: MA Experiment 20000573 PARAMETER Experiment Name: At_100uM_ABA_Mutants__P Parameter: Treatment Value: None
  misc_feature: MA Experiment ID: 20000574 Result: Down-regulated in Transcription
  misc_feature: MA Experiment 20000574 PARAMETER Experiment Name: At_100uM_ABA_Mutants__P Parameter: Organism Value: A. thaliana
  misc_feature: MA Experiment 20000574 PARAMETER Experiment Name: At_100uM_ABA_Mutants__P Parameter: Plant Line Value: CS23 vs. Ler wt
  misc_feature: MA Experiment 20000574 PARAMETER Experiment Name: At_100uM_ABA_Mutants__P Parameter: Timepoint (hr) Value: N/A
  misc_feature: MA Experiment 20000574 PARAMETER Experiment Name: At_100uM_ABA_Mutants__P Parameter: Tissue Value: Whole Plant
  misc_feature: MA Experiment 20000574 PARAMETER Experiment Name: At_100uM_ABA_Mutants__P Parameter: Treatment Value: None
  misc_feature: MA Experiment ID: 20000575 Result: Up-regulated in Transcription
  misc_feature: MA Experiment 20000575 PARAMETER Experiment Name: At_100uM_ABA_Mutants__P Parameter: Organism Value: A. thaliana
  misc_feature: MA Experiment 20000575 PARAMETER Experiment Name: At_100uM_ABA_Mutants__P Parameter: Plant Line Value: CS22
  misc_feature: MA Experiment 20000575 PARAMETER Experiment Name: At_100uM_ABA_Mutants__P Parameter: Timepoint (hr) Value: 6
  misc_feature: MA Experiment 20000575 PARAMETER Experiment Name: At_100uM_ABA_Mutants__P Parameter: Tissue Value: Whole Plant
  misc_feature: MA Experiment 20000575 PARAMETER Experiment Name: At_100uM_ABA_Mutants__P Parameter: Treatment Value: 1uM ABA vs. No Treatment
  misc_feature: MA Experiment ID: 20001247 Result: Down-regulated in Transcription
  misc_feature: MA Experiment 20001247 PARAMETER Experiment Name: At_Far-red-induction_P Parameter: Age (day) Value: 7
  misc_feature: MA Experiment 20001247 PARAMETER Experiment Name: At_Far-red-induction_P Parameter: Light Value: Far-red vs. White
  misc_feature: MA Experiment 20001247 PARAMETER Experiment Name: At_Far-red-induction_P Parameter: Organism Value: A. thaliana
  misc_feature: MA Experiment 20001247 PARAMETER Experiment Name: At_Far-red-induction_P Parameter: Plant Line Value: Columbia
  misc_feature: MA Experiment 20001247 PARAMETER Experiment Name: At_Far-red-induction_P Parameter: Timepoint (hr) Value: 1
  misc_feature: MA Experiment 20001247 PARAMETER Experiment Name: At_Far-red-induction_P Parameter: Tissue Value: Whole Plant
  misc_feature: MA Experiment ID: 20001248 Result: Down-regulated in Transcription
  misc_feature: MA Experiment 20001248 PARAMETER Experiment Name: At_Far-red-induction_P Parameter: Age (day) Value: 7
  misc_feature: MA Experiment 20001248 PARAMETER Experiment Name: At_Far-red-induction_P Parameter: Light Value: Far-red vs. White
  misc_feature: MA Experiment 20001248 PARAMETER Experiment Name: At_Far-red-induction_P Parameter: Organism Value: A. thaliana
  misc_feature: MA Experiment 20001248 PARAMETER Experiment Name: At_Far-red-induction_P Parameter: Plant Line Value: Columbia
  misc_feature: MA Experiment 20001248 PARAMETER Experiment Name: At_Far-red-induction_P Parameter: Timepoint (hr) Value: 4
  misc_feature: MA Experiment 20001248 PARAMETER Experiment Name: At_Far-red-induction_P Parameter: Tissue Value: Whole Plant
  misc_feature: MA Experiment ID: 20001559 Result: Up-regulated in Transcription
  misc_feature: MA Experiment 20001559 PARAMETER Experiment Name: At_Drought_Soil_Dry_P Parameter: Age (day) Value: 28
  misc_feature: MA Experiment 20001559 PARAMETER Experiment Name: At_Drought_Soil_Dry_P Parameter: Organism Value: A. thaliana
  misc_feature: MA Experiment 20001559 PARAMETER Experiment Name: At_Drought_Soil_Dry_P Parameter: Plant Line Value: WS
  misc_feature: MA Experiment 20001559 PARAMETER Experiment Name: At_Drought_Soil_Dry_P Parameter: Post Timepoint (hr) Value: 29
  misc_feature: MA Experiment 20001559 PARAMETER Experiment Name: At_Drought_Soil_Dry_P Parameter: Post-Treatment Value: Re-Water vs. No Drought
  misc_feature: MA Experiment 20001559 PARAMETER Experiment Name: At_Drought_Soil_Dry_P Parameter: Timepoint (day) Value: 14
  misc_feature: MA Experiment 20001559 PARAMETER Experiment Name: At_Drought_Soil_Dry_P Parameter: Treatment Value: Drought vs. No Drought
  misc_feature: MA Experiment ID: 20001904 Result: Up-regulated in Transcription
  misc_feature: MA Experiment 20001904 PARAMETER Experiment Name: At_Drought_Reproduction_P Parameter: Age (day) Value: 37
  misc_feature: MA Experiment 20001904 PARAMETER Experiment Name: At_Drought_Reproduction_P Parameter: Organism Value: A. thaliana
  misc_feature: MA Experiment 20001904 PARAMETER Experiment Name: At_Drought_Reproduction_P Parameter: Plant Line Value: WS
  misc_feature: MA Experiment 20001904 PARAMETER Experiment Name: At_Drought_Reproduction_P Parameter: Timepoint (day) Value: 7
  misc_feature: MA Experiment 20001904 PARAMETER Experiment Name: At_Drought_Reproduction_P Parameter: Tissue Value: Rosettes
  misc_feature: MA Experiment 20001904 PARAMETER Experiment Name: At_Drought_Reproduction_P Parameter: Treatment Value: Drought vs. No Drought
  misc_feature: MA Experiment ID: 20001905 Result: Up-regulated in Transcription
  misc_feature: MA Experiment 20001905 PARAMETER Experiment Name: At_Drought_Reproduction_P Parameter: Age (day) Value: 40
  misc_feature: MA Experiment 20001905 PARAMETER Experiment Name: At_Drought_Reproduction_P Parameter: Organism Value: A. thaliana
  misc_feature: MA Experiment 20001905 PARAMETER Experiment Name: At_Drought_Reproduction_P Parameter: Plant Line Value: WS
  misc_feature: MA Experiment 20001905 PARAMETER Experiment Name: At_Drought_Reproduction_P Parameter: Timepoint (day) Value: 10
  misc_feature: MA Experiment 20001905 PARAMETER Experiment Name: At_Drought_Reproduction_P Parameter: Tissue Value: Rosettes
  misc_feature: MA Experiment 20001905 PARAMETER Experiment Name: At_Drought_Reproduction_P Parameter: Treatment Value: Drought vs. No Drought
  misc_feature: MA Experiment ID: 20001911 Result: Up-regulated in Transcription
  misc_feature: MA Experiment 20001911 PARAMETER Experiment Name: At_Drought_Reproduction_P Parameter: Age (day) Value: 40
  misc_feature: MA Experiment 20001911 PARAMETER Experiment Name: At_Drought_Reproduction_P Parameter: Organism Value: A. thaliana
  misc_feature: MA Experiment 20001911 PARAMETER Experiment Name: At_Drought_Reproduction_P Parameter: Plant Line Value: WS
  misc_feature: MA Experiment 20001911 PARAMETER Experiment Name: At_Drought_Reproduction_P Parameter: Timepoint (day) Value: 10
  misc_feature: MA Experiment 20001911 PARAMETER Experiment Name: At_Drought_Reproduction_P Parameter: Tissue Value: Flowers
  misc_feature: MA Experiment 20001911 PARAMETER Experiment Name: At_Drought_Reproduction_P Parameter: Treatment Value: Drought vs. No Drought
ttacacgtctatctttctttcctttgtataccaaaaaatataaaataaaaaacactatggcggaaaactacgaccgtgccagtgagttaaaagcattcgacgagatgaagattggcgtgaaaggactcgtcgacgccggagtcacaaaagtcccgcgcattttccataacccgcatgttaacgtagcaaaccctaagcctacatcgacggtggtgatgattccaacaatcgatctaggtggcgtgttcgaatccacggtcgtgcgagagagtgtagttgcgaaggttaaagacgcaatggagaagtttggatttttccaggcgattaaccatggggttccacttgatgtgatggagaagatgataaatggtattcgtcggtttcacgaccaagatccagaagtgaggaaaatgttctatacccgagacaaaaccaaaaagcttaaatatcactctaatgctgatctctatgagtctcctgctgcgagttggagagataccttaagttgtgtcatggctcctgatgttccaaaagcacaggacttacctgaggtttgtggggagatcatgttggagtactcaaaggaagtgatgaagttagcggagttaatgtttgaaattttatcagaagctttagggttgagtcctaaccacctcaaagaaatggattgcgcaaaaggtttatggatgctctgtcattgttttccaccctgtcctgagccaaaccgaacattcggcggcgctcagcacacagacagatctttccttactattcttcttaacgacaacaatggaggacttcaagttctctacgatggatactggatcgatgttcctcctaatcccgaagcacttatctttaacgtaggagatttcctccagcttatctcgaatgacaagtttgtaagcatggagcatagaattttggcaaatggaggtgaagagccgcgcatttcggtcgcttgtttctttgtgcatacttttacttcaccaagttcgagagtatatggacccattaaagagcttctgtctgagctaaaccctccaaaatacagagacaccacctcggaatcctccaatcactatgtggctagaaaacctaatgggaattcttcgttggaccatttaaggatctgaaacttgaacctatatctcagaggttttcttgagtttccaataaaatttggtgcacgctgtgacgtaccatgttcaagaccttgaacgtatcattcaataattcttccgttgtgagtttcggctgcatgtttgacccaaaccagagagagtatggatcaatcaaggagagtgaacct

SEQ ID NO: 77042 - protein, 377 aa, Arabidopsis thaliana
  peptide (1)..(377): Ceres Seq. ID no. 12559150
  misc_feature (225)..(325): Pfam Name: 2OG-Fe(II) oxygenase superfamily Pfam Description: 2OG-Fe(II) oxygenase superfamily
  misc_feature (19)..(377): Homolog of NCBI NO: 15224730 NR Description: putative dioxygenase; protein id: At2g25450.1, by cDNA: gi_15292706, supported by cDNA: gi_21280916 [Arabidopsis >gi|25285700|pir||E84648 probable dioxygenase [imported] putative
  misc_feature (19)..(377): Homolog of NCBI NO: 15224575 NR Description: putative dioxygenase; protein id: At2g30830.1
  misc_feature (19)..(377): Homolog of NCBI NO: 15224576 NR Description: putative dioxygenase; protein id: At2g30840.1
  misc_feature (24)..(377): Homolog of NCBI NO: 30679748 NR Description: 2-oxoglutarate-dependent dioxygenase, putative thaliana] >gi|30102640|gb|AAP21238.1| At1g06620 [Arabidopsis
  misc_feature (19)..(371): Homolog of NCBI NO: 15221544 NR Description: oxidoreductase, putative; protein id: supported by cDNA: gi_13430545 [Arabidopsis thaliana] putative oxidoreductase [Arabidopsis thaliana]
  misc_feature (23)..(377): Homolog of NCBI NO: 13878119 NR Description: putative oxidoreductase [Arabidopsis thaliana]
  misc_feature (23)..(377): Homolog of NCBI NO: 15221545 NR Description: oxidoreductase, putative; protein id: supported by cDNA: gi_13878118 [Arabidopsis thaliana]
  misc_feature (19)..(301): Homolog of NCBI NO: 25406927 NR Description: protein F12K11.6 [imported] - Arabidopsis >gi|6692693|gb|AAF24827.1|AC007592_20 F12K11.6 [Arabidopsis
  misc_feature (292)..(377): Homolog of NCBI NO: 25406927 NR Description: protein F12K11.6 [imported] - Arabidopsis >gi|6692693|gb|AAF24827.1|AC007592_20 F12K11.6 [Arabidopsis
  misc_feature (23)..(307): Homolog of NCBI NO: 25406927 NR Description: protein F12K11.6 [imported] - Arabidopsis >gi|6692693|gb|AAF24827.1|AC007592_20 F12K11.6 [Arabidopsis
TRLSFFPLYTKKYKIKNTMAENYDRASELKAFDEMKIGVKGLVDAGVTKVPRIFHNPHVNVANPKPTSTVVMIPTIDLGGVFESTVVRESVVAKVKDAMEKFGFFQAINHGVPLDVMEKMINGIRRFHDQDPEVRKMFYTRDKTKKLKYHSNADLYESPAASWRDTLSCVMAPDVPKAQDLPEVCGEIMLEYSKEVMKLAELMFEILSEALGLSPNHLKEMDCAKGLWMLCHCFPPCPEPNRTFGGAQHTDRSFLTILLNDNNGGLQVLYDGYWIDVPPNPEALIFNVGDFLQLISNDKFVSMEHRILANGGEEPRISVACFFVHTFTSPSSRVYGPIKELLSELNPPKYRDTTSESSNHYVARKPNGNSSLDHLRI

SEQ ID NO: 77043 - protein, 359 aa, Arabidopsis thaliana; identical to SEQ ID NO: 40798
  peptide (1)..(359): Ceres Seq. ID no. 12559151
  misc_feature (207)..(307): Pfam Name: 2OG-Fe(II) oxygenase superfamily Pfam Description: 2OG-Fe(II) oxygenase superfamily
  misc_feature (1)..(359): Homolog of NCBI NO: 15224730 NR Description: putative dioxygenase; protein id: At2g25450.1, by cDNA: gi_15292706, supported by cDNA: gi_21280916 [Arabidopsis >gi|25285700|pir||E84648 probable dioxygenase [imported] putative
  misc_feature (1)..(359): Homolog of NCBI NO: 15224575 NR Description: putative dioxygenase; protein id: At2g30830.1
  misc_feature (1)..(359): Homolog of NCBI NO: 15224576 NR Description: putative dioxygenase; protein id: At2g30840.1
  misc_feature (6)..(359): Homolog of NCBI NO: 30679748 NR Description: 2-oxoglutarate-dependent dioxygenase, putative thaliana] >gi|30102640|gb|AAP21238.1| At1g06620 [Arabidopsis
  misc_feature (1)..(353): Homolog of NCBI NO: 15221544 NR Description: oxidoreductase, putative; protein id: supported by cDNA: gi_13430545 [Arabidopsis thaliana] putative oxidoreductase [Arabidopsis thaliana]
  misc_feature (5)..(359): Homolog of NCBI NO: 13878119 NR Description: putative oxidoreductase [Arabidopsis thaliana]
  misc_feature (5)..(359): Homolog of NCBI NO: 15221545 NR Description: oxidoreductase, putative; protein id: supported by cDNA: gi_13878118 [Arabidopsis thaliana]
  misc_feature (1)..(283): Homolog of NCBI NO: 25406927 NR Description: protein F12K11.6 [imported] - Arabidopsis >gi|6692693|gb|AAF24827.1|AC007592_20 F12K11.6 [Arabidopsis
  misc_feature (274)..(359): Homolog of NCBI NO: 25406927 NR Description: protein F12K11.6 [imported] - Arabidopsis >gi|6692693|gb|AAF24827.1|AC007592_20 F12K11.6 [Arabidopsis
  misc_feature (5)..(289): Homolog of NCBI NO: 25406927 NR Description: protein F12K11.6 [imported] - Arabidopsis >gi|6692693|gb|AAF24827.1|AC007592_20 F12K11.6 [Arabidopsis

SEQ ID NO: 77044 - protein, 343 aa, Arabidopsis thaliana; identical to SEQ ID NO: 40799
  peptide (1)..(343): Ceres Seq. ID no. 12559152
  misc_feature (191)..(291): Pfam Name: 2OG-Fe(II) oxygenase superfamily Pfam Description: 2OG-Fe(II) oxygenase superfamily
  misc_feature (1)..(343): Homolog of NCBI NO: 15224730 NR Description: putative dioxygenase; protein id: At2g25450.1, by cDNA: gi_15292706, supported by cDNA: gi_21280916 [Arabidopsis >gi|25285700|pir||E84648 probable dioxygenase [imported] putative
  misc_feature (1)..(343): Homolog of NCBI NO: 15224575 NR Description: putative dioxygenase; protein id: At2g30830.1
  misc_feature (1)..(343): Homolog of NCBI NO: 15224576 NR Description: putative dioxygenase; protein id: At2g30840.1
  misc_feature (1)..(343): Homolog of NCBI NO: 30679748 NR Description: 2-oxoglutarate-dependent dioxygenase, putative thaliana] >gi|30102640|gb|AAP21238.1| At1g06620 [Arabidopsis
  misc_feature (1)..(337): Homolog of NCBI NO: 15221544 NR Description: oxidoreductase, putative; protein id: supported by cDNA: gi_13430545 [Arabidopsis thaliana] putative oxidoreductase [Arabidopsis thaliana]
  misc_feature (1)..(343): Homolog of NCBI NO: 13878119 NR Description: putative oxidoreductase [Arabidopsis thaliana]
  misc_feature (1)..(343): Homolog of NCBI NO: 15221545 NR Description: oxidoreductase, putative; protein id: supported by cDNA: gi_13878118 [Arabidopsis thaliana]
  misc_feature (1)..(267): Homolog of NCBI NO: 25406927 NR Description: protein F12K11.6 [imported] - Arabidopsis >gi|6692693|gb|AAF24827.1|AC007592_20 F12K11.6 [Arabidopsis
  misc_feature (258)..(343): Homolog of NCBI NO: 25406927 NR Description: protein F12K11.6 [imported] - Arabidopsis >gi|6692693|gb|AAF24827.1|AC007592_20 F12K11.6 [Arabidopsis
  misc_feature (1)..(273): Homolog of NCBI NO: 25406927 NR Description: protein F12K11.6 [imported] - Arabidopsis >gi|6692693|gb|AAF24827.1|AC007592_20 F12K11.6 [Arabidopsis

SEQ ID NO: 77045 - DNA, 1620 bp, Arabidopsis thaliana
  misc_feature (1)..(1620): Ceres Seq. ID no. 12560037
  misc_feature: MA Experiment ID: 20000184 Result: Down-regulated in Transcription
  misc_feature: MA Experiment 20000184 PARAMETER Experiment Name: At_Shoots__P Parameter: Age (day) Value: 7
  misc_feature: MA Experiment 20000184 PARAMETER Experiment Name: At_Shoots__P Parameter: Tissue Value: Shoots vs. Whole Plant
  misc_feature: MA Experiment ID: 20000495 Result: Up-regulated in Transcription
  misc_feature: MA Experiment 20000495 PARAMETER Experiment Name: At_Guard_Cells_P Parameter: Harvest Date Value: 8/2/2002
  misc_feature: MA Experiment 20000495 PARAMETER Experiment Name: At_Guard_Cells_P Parameter: Organism Value: A. thaliana
  misc_feature: MA Experiment 20000495 PARAMETER Experiment Name: At_Guard_Cells_P Parameter: Tissue Value: Guard Cells vs. Leaves
  misc_feature: MA Experiment ID: 20001451 Result: Up-regulated in Transcription
  misc_feature: MA Experiment 20001451 PARAMETER Experiment Name: At_Far-red-induction_P Parameter: Age (day) Value: 7
  misc_feature: MA Experiment 20001451 PARAMETER Experiment Name: At_Far-red-induction_P Parameter: Light Value: Far-red vs. White
  misc_feature: MA Experiment 20001451 PARAMETER Experiment Name: At_Far-red-induction_P Parameter: Organism Value: A. thaliana
  misc_feature: MA Experiment 20001451 PARAMETER Experiment Name: At_Far-red-induction_P Parameter: Plant Line Value: Columbia
  misc_feature: MA Experiment 20001451 PARAMETER Experiment Name: At_Far-red-induction_P Parameter: Timepoint (hr) Value: 24
  misc_feature: MA Experiment 20001451 PARAMETER Experiment Name: At_Far-red-induction_P Parameter: Tissue Value: Whole Plant
atggttgtcaagactggtttccctattaccgactcgtcttcttctgcttcaatggccgaatttccagaaccgggcactgtaaaccctgactcggatctatcgaatggtcgagctgagaagcctgagatagacacttcggctccgttcgagtcagtgagagaagcagccactcgtttcggcggttttggtttctggagaccttctctcaataaactcccagatgcttctcaggaaaatatccaagaacctgatatcatgggactcaaagcacaagctttcgagctacaaagagaactaattgttaaagaacgcgaaacgctagaggtgttgaaggagcttgaggcgactaaagccacagtcttaaagctgcagcagaggaatgaagcttatgaggaggacacgttgagagaagaagttgacagtcatatcaagccagcgggtgtggttctaaaggatttaagccaggcgaagatgaatttgtgcaagattgcaagtatacgcgaatctgtggagcagttgaagaataaactgaatgaggaaagagctgcacttgagaagacacgcgagagacttatggagaaatctctcaaggtgttttctttagaggaagaagaagtgagagtaagatttgccaaggagggtcaaaccggcgagaaagatcttggaatgttgaatgaggttcaaagattgagccgtcaagctcaagaggtgaagaaaaccggagagaatgcagagttggaagttgtgaaagcaatggctgagactgaaagcacaagagataagattagaacagctaagataaggttggtggctgctagaaagatgaaggaagcggccagagaggctgaggcggttgcaatcgcagagattgaggctgttactggaagtatgaatgttggtaaggccgaggctgtgactatctctgctgaagagtattctgtgcttgctcgtagtgctagagacgcagaggaagaggcgagaaagcgagtggaagatgcaatgtcgagagttgaagaagctaatgtttcaaagaaggatgttctgaagaaagttgacgaagcggctcaagaaattgaaaccagcaagagagtattggaggaagctgtggagagagttgacgctgcaaatgcttcgaagatcgaagcagaagaggcgctgcgaaaatggcggtcagagaatggacagaggagaagattatcttcttcggtgaacaacacttccaagttcaagagcagaagagagacaacaacacgtctgatggatgtaaacggtctgcatctgacatacgatgttgttgacgggtcatcatcttcttcaacggtcccagtcttgaaaccaacaatgtcaataggacaaatactgagcaagaagctacttcttgcagaggattcagatatgaatgttgctaatgagagaagaaaaatgtcgttgggtcagatgcttgcaaagaatagcagtagtgataaaactgtaagcaagagaagtgaagggaaagagaatgagaaaaggacgaagactcgaaagagaaagagtttcggatttgctaagatctctgtgttgttgaacaaagagagcaagaacaagaagaagaagaaaaagatagctttgaacttaaggtga

SEQ ID NO: 77046 - protein, 539 aa, Arabidopsis thaliana
  peptide (1)..(539): Ceres Seq. ID no. 12560038
  misc_feature (46)..(369): Pfam Name: Plant protein of unknown function (DUF827) Pfam Description: Plant protein of unknown function (DUF827)
  misc_feature (1)..(539): Homolog of NCBI NO: 15224495 NR Description: hypothetical protein; protein id: At2g38370.1
  misc_feature (124)..(485): Homolog of NCBI NO: 33146426 NR Description: myosin heavy chain-like [Oryza sativa (japonica
  misc_feature (40)..(528): Homolog of NCBI NO: 15226689 NR Description: hypothetical protein; protein id: At2g40480.1
  misc_feature (42)..(273): Homolog of NCBI NO: 15230567 NR Description: putative protein; protein id: At3g51720.1, by cDNA: 99756., supported by cDNA: gi_17978990 [Arabidopsis
  misc_feature (42)..(273): Homolog of NCBI NO: 21618181 NR Description: unknown [Arabidopsis thaliana]
  misc_feature (140)..(414): Homolog of NCBI NO: 15225334 NR Description: unknown protein; protein id: At2g26570.1
  misc_feature (65)..(405): Homolog of NCBI NO: 14029007 NR Description: Putative myosin heavy chain-like [Oryza sativa]
  misc_feature (196)..(538): Homolog of NCBI NO: 15230567 NR Description: putative protein; protein id: At3g51720.1, by cDNA: 99756., supported by cDNA: gi_17978990 [Arabidopsis
  misc_feature (196)..(538): Homolog of NCBI NO: 21618181 NR Description: unknown [Arabidopsis thaliana]
  misc_feature (90)..(417): Homolog of NCBI NO: 15234171 NR Description: putative protein; protein id: At4g33390.1
MVVKTGFPITDSSSSASMAEFPEPGTVNPDSDLSNGRAEKPEIDTSAPFESVREAATRFGGFGFWRPSLNKLPDASQENIQEPDIMGLKAQAFELQRELIVKERETLEVLKELEATKATVLKLQQRNEAYEEDTLREEVDSHIKPAGVVLKDLSQAKMNLCKIASIRESVEQLKNKLNEERAALEKTRERLMEKSLKVFSLEEEEVRVRFAKEGQTGEKDLGMLNEVQRLSRQAQEVKKTGENAELEVVKAMAETESTRDKIRTAKIRLVAARKMKEAAREAEAVAIAEIEAVTGSMNVGKAEAVTISAEEYSVLARSARDAEEEARKRVEDAMSRVEEANVSKKDVLKKVDEAAQEIETSKRVLEEAVERVDAANASKIEAEEALRKWRSENGQRRRLSSSVNNTSKFKSRRETTTRLMDVNGLHLTYDVVDGSSSSSTVPVLKPTMSIGQILSKKLLLAEDSDMNVANERRKMSLGQMLAKNSSSDKTVSKRSEGKENEKRTKTRKRKSFGFAKISVLLNKESKNKKKKKKIALNLR

SEQ ID NO: 77047 - protein, 522 aa, Arabidopsis thaliana
  peptide (1)..(522): Ceres Seq. ID no. 12560039
  misc_feature (29)..(352): Pfam Name: Plant protein of unknown function (DUF827) Pfam Description: Plant protein of unknown function (DUF827)
  misc_feature (1)..(522): Homolog of NCBI NO: 15224495 NR Description: hypothetical protein; protein id: At2g38370.1
  misc_feature (107)..(468): Homolog of NCBI NO: 33146426 NR Description: myosin heavy chain-like [Oryza sativa (japonica
  misc_feature (23)..(511): Homolog of NCBI NO: 15226689 NR Description: hypothetical protein; protein id: At2g40480.1
  misc_feature (25)..(256): Homolog of NCBI NO: 15230567 NR Description: putative protein; protein id: At3g51720.1, by cDNA: 99756., supported by cDNA: gi_17978990 [Arabidopsis
  misc_feature (25)..(256): Homolog of NCBI NO: 21618181 NR Description: unknown [Arabidopsis thaliana]
  misc_feature (123)..(397): Homolog of NCBI NO: 15225334 NR Description: unknown protein; protein id: At2g26570.1
  misc_feature (48)..(388): Homolog of NCBI NO: 14029007 NR Description: Putative myosin heavy chain-like [Oryza sativa]
  misc_feature (179)..(521): Homolog of NCBI NO: 15230567 NR Description: putative protein; protein id: At3g51720.1, by cDNA: 99756., supported by cDNA: gi_17978990 [Arabidopsis
  misc_feature (179)..(521): Homolog of NCBI NO: 21618181 NR Description: unknown [Arabidopsis thaliana]
  misc_feature (73)..(400): Homolog of NCBI NO: 15234171 NR Description: putative protein; protein id: At4g33390.1
MAEFPEPGTVNPDSDLSNGRAEKPEIDTSAPFESVREAATRFGGFGFWRPSLNKLPDASQENIQEPDIMGLKAQAFELQRELIVKERETLEVLKELEATKATVLKLQQRNEAYEEDTLREEVDSHIKPAGVVLKDLSQAKMNLCKIASIRESVEQLKNKLNEERAALEKTRERLMEKSLKVFSLEEEEVRVRFAKEGQTGEKDLGMLNEVQRLSRQAQEVKKTGENAELEVVKAMAETESTRDKIRTAKIRLVAARKMKEAAREAEAVAIAEIEAVTGSMNVGKAEAVTISAEEYSVLARSARDAEEEARKRVEDAMSRVEEANVSKKDVLKKVDEAAQEIETSKRVLEEAVERVDAANASKIEAEEALRKWRSENGQRRRLSSSVNNTSKFKSRRETTTRLMDVNGLHLTYDVVDGSSSSSTVPVLKPTMSIGQILSKKLLLAEDSDMNVANERRKMSLGQMLAKNSSSDKTVSKRSEGKENEKRTKTRKRKSFGFAKISVLLNKESKNKKKKKKIALNLR

SEQ ID NO: 77048 - protein, 454 aa, Arabidopsis thaliana
  peptide (1)..(454): Ceres Seq. ID no. 12560040
  misc_feature (1)..(284): Pfam Name: Plant protein of unknown function (DUF827) Pfam Description: Plant protein of unknown function (DUF827)
  misc_feature (1)..(454): Homolog of NCBI NO: 15224495 NR Description: hypothetical protein; protein id: At2g38370.1
  misc_feature (39)..(400): Homolog of NCBI NO: 33146426 NR Description: myosin heavy chain-like [Oryza sativa (japonica
  misc_feature (1)..(443): Homolog of NCBI NO: 15226689 NR Description: hypothetical protein; protein id: At2g40480.1
  misc_feature (1)..(188): Homolog of NCBI NO: 15230567 NR Description: putative protein; protein id: At3g51720.1, by cDNA: 99756., supported by cDNA: gi_17978990 [Arabidopsis
  misc_feature (1)..(188): Homolog of NCBI NO: 21618181 NR Description: unknown [Arabidopsis thaliana]
  misc_feature (55)..(329): Homolog of NCBI NO: 15225334 NR Description: unknown protein; protein id: At2g26570.1
  misc_feature (1)..(320): Homolog of NCBI NO: 14029007 NR Description: Putative myosin heavy chain-like [Oryza sativa]
  misc_feature (111)..(453): Homolog of NCBI NO: 15230567 NR Description: putative protein; protein id: At3g51720.1, by cDNA: 99756., supported by cDNA: gi_17978990 [Arabidopsis
  misc_feature (111)..(453): Homolog of NCBI NO: 21618181 NR Description: unknown [Arabidopsis thaliana]
  misc_feature (5)..(332): Homolog of NCBI NO: 15234171 NR Description: putative protein; protein id: At4g33390.1
MGLKAQAFELQRELIVKERETLEVLKELEATKATVLKLQQRNEAYEEDTLREEVDSHIKPAGVVLKDLSQAKMNLCKIASIRESVEQLKNKLNEERAALEKTRERLMEKSLKVFSLEEEEVRVRFAKEGQTGEKDLGMLNEVQRLSRQAQEVKKTGENAELEVVKAMAETESTRDKIRTAKIRLVAARKMKEAAREAEAVAIAEIEAVTGSMNVGKAEAVTISAEEYSVLARSARDAEEEARKRVEDAMSRVEEANVSKKDVLKKVDEAAQEIETSKRVLEEAVERVDAANASKIEAEEALRKWRSENGQRRRLSSSVNNTSKFKSRRETTTRLMDVNGLHLTYDVVDGSSSSSTVPVLKPTMSIGQILSKKLLLAEDSDMNVANERRKMSLGQMLAKNSSSDKTVSKRSEGKENEKRTKTRKRKSFGFAKISVLLNKESKNKKKKKKIALNLR

SEQ ID NO: 77049 - DNA, 2366 bp, Arabidopsis thaliana
  misc_feature (1)..(2366): Ceres Seq. ID no. 12560246
  misc_feature: MA Experiment ID: 20000173 Result: Down-regulated in Transcription
  misc_feature: MA Experiment 20000173 PARAMETER Experiment Name: At_42deg_Heat_P Parameter: Age (day) Value: 14
  misc_feature: MA Experiment 20000173 PARAMETER Experiment Name: At_42deg_Heat_P Parameter: Organism Value: A. thaliana
  misc_feature: MA Experiment 20000173 PARAMETER Experiment Name: At_42deg_Heat_P Parameter: Plant Line Value: WS
  misc_feature: MA Experiment 20000173 PARAMETER Experiment Name: At_42deg_Heat_P Parameter: Temperature (deg C) Value: 42 vs. 22
  misc_feature: MA Experiment 20000173 PARAMETER Experiment Name: At_42deg_Heat_P Parameter: Timepoint (hr) Value: 6
  misc_feature: MA Experiment 20000173 PARAMETER Experiment Name: At_42deg_Heat_P Parameter: Tissue Value: Aerial
  misc_feature: MA Experiment ID: 20001905 Result: Down-regulated in Transcription
  misc_feature: MA Experiment 20001905 PARAMETER Experiment Name: At_Drought_Reproduction_P Parameter: Age (day) Value: 40
  misc_feature: MA Experiment 20001905 PARAMETER Experiment Name: At_Drought_Reproduction_P Parameter: Organism Value: A. thaliana
  misc_feature: MA Experiment 20001905 PARAMETER Experiment Name: At_Drought_Reproduction_P Parameter: Plant Line Value: WS
  misc_feature: MA Experiment 20001905 PARAMETER Experiment Name: At_Drought_Reproduction_P Parameter: Timepoint (day) Value: 10
  misc_feature: MA Experiment 20001905 PARAMETER Experiment Name: At_Drought_Reproduction_P Parameter: Tissue Value: Rosettes
  misc_feature: MA Experiment 20001905 PARAMETER Experiment Name: At_Drought_Reproduction_P Parameter: Treatment Value: Drought vs. No Drought
gattgattctgtaatttcagcgagtcgtctcgtctagctctcacttttgttcgtctcttctgcgtcaaacatttccaccattttcgtttcttaaacctttcttcagctcttctcttcgtcaatctgcgatagtggaattgaagtctcttcggtgagtttctttactaatggagaccgccgcttcgagcgtagctacaactcgtggcggttcccttcagaatccgtcgccgacggctccgtcaagaaaagagtggcgcgccgtttcggattcacaagacaccacagattatgtggatttggaacagttaaagctgaacaggacagatgagagaacgatttatgagaatggaagagaacaggatggttattcaaatagtgagatgttgcagcaacagattcttaatgtttctagaaagaaaggagaattacagcagttggagattgagcttcgagctcagatgattgcgagacatgagatcatggagatccagagcaactatgaatctcaattcacagagtatgctaatgctgctgctagaatgcaggagcaacttcatgagaatgagagatctattcgggaggcagagaggaagttagaagagaaagacagagagctacatgcgattaaactagataatgaagcggcttgggccaaagagggtatcctaagagaacaaaataaagaacttgccacattcagaagagagcgtgatcactctgaagctgagaggtcccagaatatacataaaatatctgaacttcaggagcatattcaagagaaagagagtcagctcagtgaattgcaggaacaaaataggattgctcaagaaactatcctgtacaaggatgagcaactaagagaagcacaaggttggattgctcgtgcccaagagattgatgctttacaatcatctacaaatcattcgttgcaggctgaattgcgagaacgtactgagcagtataaccagctctggcatggttgtcagaggcagtttgcagagatggagagattgcatgtgcacacagtgcaacagcttcagcaagagcttgctaatgtaagggaagctggtggttccaaaacaaactccggtggagcctcccagactattcagaacagcgggaaccaatttgatgctcatggaaacagcgcagaaagtgcaaacattagtgtccattcaaatggaaaaagcgcagataacatctcatcttttacttcaactgatgataaggctacccagaacaaccgtgttgatgggatatcagcttccaatcttgcgacacatgggttccttcaagctggtcagatgacccctctgcattcatttgtcatgcatcaacaagagatttctcagcttgttcagcctcaggtcccttcacaacatattgaacaatcagtgttgctacagcaaaaggctcaggctgtaccagatagttcacagatgcctatgcagaatcatgtgcatccatctcaaggtgttcatggcttggtacaatcctttggtcaagggtacggagatattcaaactagccaagtagcacaatacggaactacgacaacaccatcctctgtgaatgaacaggcagtggaatctggcaatggagattataatggatctaatcagtcagagaataactttcaagacatttcttcacagttccgtgatgccctaaggcttgattctcattcccagaatcagaaacctgaggaactcaatggtcaggtttcacctgatgaacacagtggtgctaaatccattgtccctgaaactctagtctcatccggaaaacctgagaggaactcagagtgcgctctgctcgatgaaaggtcgcttttgacatgcatcctccgtactataccagctggtgggagaatcagaatcagttcaacgcttccaaaccgtttgggcaaaatgctagcccctctacactggcatgattacaggaaaaagtacgggaagctggatgattttgttgctagccatcttgagttattttcgatagaggatgactacattcaagttagagacggtgcacagaaaatggtagcagcatcagcagcagcagccaaagtggcagcagcagctgcagcttcgtcatccccaaactccatctatgtggctatgactcctatggctcagtctcaagggttaaagaagaatgacaacagagttaggcagagctctgattttatggtgaagcagcaaagaaagctctgattttacaagtcaagcttttcaaagtaaaagcgtattagagtgaggctaaacaatctcctatcttgtttttcattttttggtgtatccccgaagctaagatatacattcataattacttttgccctttcaatagtatcaatgcttaaagtc

SEQ ID NO: 77050 - protein, 682 aa, Arabidopsis thaliana
  peptide (1)..(682): Ceres Seq. ID no. 12560247
  misc_feature (112)..(306): Pfam Name: Tropomyosin Pfam Description: Tropomyosin
  misc_feature (17)..(329): Homolog of NCBI NO: 13936996 NR Description: ORF73 [Human herpesvirus 8]
  misc_feature (16)..(329): Homolog of NCBI NO: 11037008 NR Description: latent nuclear antigen [Human herpesvirus 8]
  misc_feature (17)..(329): Homolog of NCBI NO: 2246532 NR Description: ORF 73, contains large complex repeat CR 73
  misc_feature (17)..(299): Homolog of NCBI NO: 2246532 NR Description: ORF 73, contains large complex repeat CR 73
  misc_feature (36)..(329): Homolog of NCBI NO: 5669894 NR Description: latent nuclear antigen [Human herpesvirus 8]
  misc_feature (34)..(293): Homolog of NCBI NO: 5669894 NR Description: latent nuclear antigen [Human herpesvirus 8]
  misc_feature (16)..(329): Homolog of NCBI NO: 9886896 NR Description: Orf73 [Human herpesvirus 8]
  misc_feature (17)..(299): Homolog of NCBI NO: 13936996 NR Description: ORF73 [Human herpesvirus 8]
  misc_feature (34)..(280): Homolog of NCBI NO: 5669894 NR Description: latent nuclear antigen [Human herpesvirus 8]
  misc_feature (27)..(519): Homolog of NCBI NO: 7489885 NR Description: interaptin - slime mold (Dictyostelium
METAASSVATTRGGSLQNPSPTAPSRKEWRAVSDSQDTTDYVDLEQLKLNRTDERTIYENGREQDGYSNSEMLQQQILNVSRKKGELQQLEIELRAQMIARHEIMEIQSNYESQFTEYANAAARMQEQLHENERSIREAERKLEEKDRELHAIKLDNEAAWAKEGILREQNKELATFRRERDHSEAERSQNIHKISELQEHIQEKESQLSELQEQNRIAQETILYKDEQLREAQGWIARAQEIDALQSSTNHSLQAELRERTEQYNQLWHGCQRQFAEMERLHVHTVQQLQQELANVREAGGSKTNSGGASQTIQNSGNQFDAHGNSAESANISVHSNGKSADNISSFTSTDDKATQNNRVDGISASNLATHGFLQAGQMTPLHSFVMHQQEISQLVQPQVPSQHIEQSVLLQQKAQAVPDSSQMPMQNHVHPSQGVHGLVQSFGQGYGDIQTSQVAQYGTTTTPSSVNEQAVESGNGDYNGSNQSENNFQDISSQFRDALRLDSHSQNQKPEELNGQVSPDEHSGAKSIVPETLVSSGKPERNSECALLDERSLLTCILRTIPAGGRIRISSTLPNRLGKMLAPLHWHDYRKKYGKLDDFVASHLELFSIEDDYIQVRDGAQKMVAASAAAAKVAAAAAASSSPNSIYVAMTPMAQSQGLKKNDNRVRQSSDFMVKQQRKL

SEQ ID NO: 77051 - protein, 611 aa, Arabidopsis thaliana
  peptide (1)..(611): Ceres Seq. ID no. 12560248
  misc_feature (41)..(235): Pfam Name: Tropomyosin Pfam Description: Tropomyosin
  misc_feature (1)..(258): Homolog of NCBI NO: 13936996 NR Description: ORF73 [Human herpesvirus 8]
  misc_feature (1)..(258): Homolog of NCBI NO: 11037008 NR Description: latent nuclear antigen [Human herpesvirus 8]
  misc_feature (1)..(258): Homolog of NCBI NO: 2246532 NR Description: ORF 73, contains large complex repeat CR 73
  misc_feature (1)..(228): Homolog of NCBI NO: 2246532 NR Description: ORF 73, contains large complex repeat CR 73
  misc_feature (1)..(258): Homolog of NCBI NO: 5669894 NR Description: latent nuclear antigen [Human herpesvirus 8]
  misc_feature (1)..(222): Homolog of NCBI NO: 5669894 NR Description: latent nuclear antigen [Human herpesvirus 8]
  misc_feature (1)..(258): Homolog of NCBI NO: 9886896 NR Description: Orf73 [Human herpesvirus 8]
  misc_feature (1)..(228): Homolog of NCBI NO: 13936996 NR Description: ORF73 [Human herpesvirus 8]
  misc_feature (1)..(209): Homolog of NCBI NO: 5669894 NR Description: latent nuclear antigen [Human herpesvirus 8]
  misc_feature (1)..(448): Homolog of NCBI NO: 7489885 NR Description: interaptin - slime mold (Dictyostelium
MLQQQILNVSRKKGELQQLEIELRAQMIARHEIMEIQSNYESQFTEYANAAARMQEQLHENERSIREAERKLEEKDRELHAIKLDNEAAWAKEGILREQNKELATFRRERDHSEAERSQNIHKISELQEHIQEKESQLSELQEQNRIAQETILYKDEQLREAQGWIARAQEIDALQSSTNHSLQAELRERTEQYNQLWHGCQRQFAEMERLHVHTVQQLQQELANVREAGGSKTNSGGASQTIQNSGNQFDAHGNSAESANISVHSNGKSADNISSFTSTDDKATQNNRVDGISASNLATHGFLQAGQMTPLHSFVMHQQEISQLVQPQVPSQHIEQSVLLQQKAQAVPDSSQMPMQNHVHPSQGVHGLVQSFGQGYGDIQTSQVAQYGTTTTPSSVNEQAVESGNGDYNGSNQSENNFQDISSQFRDALRLDSHSQNQKPEELNGQVSPDEHSGAKSIVPETLVSSGKPERNSECALLDERSLLTCILRTIPAGGRIRISSTLPNRLGKMLAPLHWHDYRKKYGKLDDFVASHLELFSIEDDYIQVRDGAQKMVAASAAAAKVAAAAAASSSPNSIYVAMTPMAQSQGLKKNDNRVRQSSDFMVKQQRKL

SEQ ID NO: 77052 - protein, 585 aa, Arabidopsis thaliana
  peptide (1)..(585): Ceres Seq. ID no. 12560249
  misc_feature (15)..(209): Pfam Name: Tropomyosin Pfam Description: Tropomyosin
  misc_feature (1)..(232): Homolog of NCBI NO: 13936996 NR Description: ORF73 [Human herpesvirus 8]
  misc_feature (1)..(232): Homolog of NCBI NO: 11037008 NR Description: latent nuclear antigen [Human herpesvirus 8]
  misc_feature (1)..(232): Homolog of NCBI NO: 2246532 NR Description: ORF 73, contains large complex repeat CR 73
  misc_feature (1)..(202): Homolog of NCBI NO: 2246532 NR Description: ORF 73, contains large complex repeat CR 73
  misc_feature (1)..(232): Homolog of NCBI NO: 5669894 NR Description: latent nuclear antigen [Human herpesvirus 8]
  misc_feature (1)..(196): Homolog of NCBI NO: 5669894 NR Description: latent nuclear antigen [Human herpesvirus 8]
  misc_feature (1)..(232): Homolog of NCBI NO: 9886896 NR Description: Orf73 [Human herpesvirus 8]
  misc_feature (1)..(202): Homolog of NCBI NO: 13936996 NR Description: ORF73 [Human herpesvirus 8]
  misc_feature (1)..(183): Homolog of NCBI NO: 5669894 NR Description: latent nuclear antigen [Human herpesvirus 8]
  misc_feature (1)..(422): Homolog of NCBI NO: 7489885 NR Description: interaptin - slime mold (Dictyostelium
MIARHEIMEIQSNYESQFTEYANAAARMQEQLHENERSIREAERKLEEKDRELHAIKLDNEAAWAKEGILREQNKELATFRRERDHSEAERSQNIHKISELQEHIQEKESQLSELQEQNRIAQETILYKDEQLREAQGWIARAQEIDALQSSTNHSLQAELRERTEQYNQLWHGCQRQFAEMERLHVHTVQQLQQELANVREAGGSKTNSGGASQTIQNSGNQFDAHGNSAESANISVHSNGKSADNISSFTSTDDKATQNNRVDGISASNLATHGFLQAGQMTPLHSFVMHQQEISQLVQPQVPSQHIEQSVLLQQKAQAVPDSSQMPMQNHVHPSQGVHGLVQSFGQGYGDIQTSQVAQYGTTTTPSSVNEQAVESGNGDYNGSNQSENNFQDISSQFRDALRLDSHSQNQKPEELNGQVSPDEHSGAKSIVPETLVSSGKPERNSECALLDERSLLTCILRTIPAGGRIRISSTLPNRLGKMLAPLHWHDYRKKYGKLDDFVASHLELFSIEDDYIQVRDGAQKMVAASAAAAKVAAAAAASSSPNSIYVAMTPMAQSQGLKKNDNRVRQSSDFMVKQQRKL

SEQ ID NO: 77053 - DNA, 1901 bp, Arabidopsis thaliana
  misc_feature (1)..(1901): Ceres Seq. ID no. 12560410
  misc_feature: MA Experiment ID: 20000438 Result: Down-regulated in Transcription
  misc_feature: MA Experiment 20000438 PARAMETER Experiment Name: At_Shoots__P Parameter: Age (day) Value: 14
  misc_feature: MA Experiment 20000438 PARAMETER Experiment Name: At_Shoots__P Parameter: Tissue Value: Shoots vs. Whole Plant
  misc_feature: MA Experiment ID: 20000794 Result: Up-regulated in Transcription
  misc_feature: MA Experiment 20000794 PARAMETER Experiment Name: At_Petals_P Parameter: Age (day) Value: 23-25 days
  misc_feature: MA Experiment 20000794 PARAMETER Experiment Name: At_Petals_P Parameter: Plant Line Value: WS
  misc_feature: MA Experiment 20000794 PARAMETER Experiment Name: At_Petals_P Parameter: Tissue Value: Petals vs. Whole plant
  misc_feature: MA Experiment ID: 20001450 Result: Up-regulated in Transcription
  misc_feature: MA Experiment 20001450 PARAMETER Experiment Name: At_Far-red-induction_P Parameter: Age (day) Value: 7
  misc_feature: MA Experiment 20001450 PARAMETER Experiment Name: At_Far-red-induction_P Parameter: Light Value: Far-red vs. White
  misc_feature: MA Experiment 20001450 PARAMETER Experiment Name: At_Far-red-induction_P Parameter: Organism Value: A. thaliana
  misc_feature: MA Experiment 20001450 PARAMETER Experiment Name: At_Far-red-induction_P Parameter: Plant Line Value: Columbia
  misc_feature: MA Experiment 20001450 PARAMETER Experiment Name: At_Far-red-induction_P Parameter: Timepoint (hr) Value: 8
  misc_feature: MA Experiment 20001450 PARAMETER Experiment Name: At_Far-red-induction_P Parameter: Tissue Value: Whole Plant
aaaagccctcgtttaaaaaaaaaaaaagagaagaaggaaatcaggaatgatctgattcttcgacgaaaggggaagaggttgttgaattcaaaatctctctctcttctctgtctctctcgcgtgagctagttgcagatttttccagatctcaacattgaaattcaaactcaaagctagagagggagagagatagatagatagagggagaagaagaagacgaacacggagctgaaacaatgattacgatcccataccttaccgctgtatcaacgtatttcagctacggcttgcttttcgcgtttggtcagcttcgcgattactctcgcctaatcttcgattggtggcgcaccaacaatctccagggatacgctccgatctgcttggcgcatgaggatttctacatccgacgattgtatcatcggattcaggactgttttggacgtcccatttcaagtgcacctgatgcttggattgatgtggttgagagagtctctgacgataacaacaagacgttaaagcgaactacaaagactagcaggtgccttaatttgggttcctacaattatcttggatttggttctttcgatgaatattgcacgcctcgtgtcattgagtctctgaagaaattttcagcaagtacatgtagctctcgcgttgatgcaggaactacatctgtgcatgcagaacttgaggattgtgttgctaaatatgtcggacaacctgctgctgttatttttggcatgggttatgcaacaaactcggctatcattcccgtcttgattggaaagggagggttgataataagcgattctttgaaccatacttcgattgtcaacggcgctcgaggttcaggagctactatccgtgttttccaacacaacacacctggtcatctggaaaaagtattgaaagaacaaatcgccgagggacaacccaggacgcatagaccgtggaagaaaattattgttgttgttgagggtatttacagcatggaaggggaaatttgtcatctgcccgagattgtttcaatatgcaagaagtataaggcatatgtttacttggacgaagctcacagcattggagcaattggcaagacaggaagaggtgtttgtgaactccttggagttgacacttctgatgtggacataatgatgggaactttcacgaaatcttttgggtcttgtggtggctatattgcgggatcaaaggacctcatccaatatttgaagcaccaatgcccggctcacctttacgccacatcaatttcaactccttccgcgacacaaatcatatcggcgataaaggttatccttggagaggatggttcaaacagaggggcacaaaagttagcaagaataagggagaacagcaactttttcagggctgagttgcagaagatggggtttgaagttcttggagacaatgattcaccagtcatgccaataatgctttacaatccagcaaaaattccagcattctcaagggaatgtttgcgagaaaacttggcggtggtggtcgtcggtttcccagctacacccctattgctagccagggctcgtatttgcatatccgcatctcactcaagagaagatcttataaaagccctacaggttataagcaaagcaggtgaccttaccgggatcaaatattttccggcagctccaaaaaagcaagaagtagagaaaaatggcatcaaattggattaaacccgtaaggcaacagtttctttccaagagatgtttggctagcaattagctgtagtgtacaattatctcgctgttcgtctttgtcttgtcgtgaaacatgtgattgttgtcattcttctctctttattatttttattgtttttgtcagagttaataattgtatagtgtccctctatatattgttgccccaaaatt

SEQ ID NO: 77054 - protein, 489 aa, Arabidopsis thaliana; identical to SEQ ID NO: 45845
  peptide (1)..(489): Ceres Seq. ID no. 12560411
  misc_feature (133)..(461): Pfam Name: Aminotransferase class I and II Pfam Description: Aminotransferase class I and II
  misc_feature (1)..(489): Homolog of NCBI NO: 15229023 NR Description: serine palmitoyltransferase-like protein; protein At3g48780.1, supported by cDNA: gi_15450817, supported by cDNA: supported by cDNA: gi_17221602 [Arabidopsis thaliana]
  misc_feature (1)..(489): Homolog of NCBI NO: 15237805 NR Description: serine palmitoyltransferase; protein id: supported by cDNA: gi_15292790, supported by cDNA: gi_9309379 thaliana] >gi|8809693|dbj|BAA97234.1| serine palmitoyltransferase
  misc_feature (1)..(489): Homolog of NCBI NO: 9309380 NR Description: serine palmitoyltransferase [Arabidopsis thaliana]
  misc_feature (1)..(489): Homolog of NCBI NO: 4995890 NR Description: serine palmitoyltransferase [Solanum tuberosum]
  misc_feature (1)..(489): Homolog of NCBI NO: 27753609 NR Description: serine palmitoyltransferase [Lotus japonicus]
  misc_feature (1)..(483): Homolog of NCBI NO: 34907092 NR Description: putative serine palmitoyltransferase [Oryza
  misc_feature (101)..(485): Homolog of NCBI NO: 11279408 NR Description: serine C-palmitoyltransferase (EC 2.3.1.50) - Arabidopsis thaliana (fragment) >gi|7576217|emb|CAB87907.1|
  misc_feature (142)..(485): Homolog of NCBI NO: 15229024 NR Description: serine palmitoyltransferase-like protein; protein
  misc_feature (5)..(471): Homolog of NCBI NO: 4758668 NR Description: serine palmitoyltransferase, long chain base SERINE PALMITOYLTRANSFERASE 2 (LONG CHAIN BASE BIOSYNTHESIS
  misc_feature (5)..(471): Homolog of NCBI NO: 2137762 NR Description: serine C-palmitoyltransferase (EC 2.3.1.50) Lcb2

SEQ ID NO: 77055 - protein, 321 aa, Arabidopsis thaliana; identical to SEQ ID NO: 45846
  peptide (1)..(321): Ceres Seq. ID no. 12560412
  misc_feature (1)..(293): Pfam Name: Aminotransferase class I and II Pfam Description: Aminotransferase class I and II
  misc_feature (1)..(321): Homolog of NCBI NO: 15229023 NR Description: serine palmitoyltransferase-like protein; protein At3g48780.1, supported by cDNA: gi_15450817, supported by cDNA: supported by cDNA: gi_17221602 [Arabidopsis thaliana]
  misc_feature (1)..(321): Homolog of NCBI NO: 15237805 NR Description: serine palmitoyltransferase; protein id: supported by cDNA: gi_15292790, supported by cDNA: gi_9309379 thaliana] >gi|8809693|dbj|BAA97234.1| serine palmitoyltransferase
  misc_feature (1)..(321): Homolog of NCBI NO: 9309380 NR Description: serine palmitoyltransferase [Arabidopsis thaliana]
  misc_feature (1)..(321): Homolog of NCBI NO: 4995890 NR Description: serine palmitoyltransferase [Solanum tuberosum]
  misc_feature (1)..(321): Homolog of NCBI NO: 27753609 NR Description: serine palmitoyltransferase [Lotus japonicus]
  misc_feature (1)..(315): Homolog of NCBI NO: 34907092 NR Description: putative serine palmitoyltransferase [Oryza
  misc_feature (1)..(317): Homolog of NCBI NO: 11279408 NR Description: serine C-palmitoyltransferase (EC 2.3.1.50) - Arabidopsis thaliana (fragment) >gi|7576217|emb|CAB87907.1|
  misc_feature (1)..(317): Homolog of NCBI NO: 15229024 NR Description: serine palmitoyltransferase-like protein; protein
  misc_feature (1)..(303): Homolog of NCBI NO: 4758668 NR Description: serine palmitoyltransferase, long chain base SERINE PALMITOYLTRANSFERASE 2 (LONG CHAIN BASE BIOSYNTHESIS
  misc_feature (1)..(303): Homolog of NCBI NO: 2137762 NR Description: serine C-palmitoyltransferase (EC 2.3.1.50) Lcb2

SEQ ID NO: 77056 - DNA, 3674 bp, Arabidopsis thaliana
  misc_feature (1)..(3674): Ceres Seq. ID no. 12560696
  misc_feature: MA Experiment ID: 20000171 Result: Down-regulated in Transcription
  misc_feature: MA Experiment 20000171 PARAMETER Experiment Name: At_42deg_Heat_P Parameter: Age (day) Value: 14
  misc_feature: MA Experiment 20000171 PARAMETER Experiment Name: At_42deg_Heat_P Parameter: Organism Value: A. thaliana
  misc_feature: MA Experiment 20000171 PARAMETER Experiment Name: At_42deg_Heat_P Parameter: Plant Line Value: WS
  misc_feature: MA Experiment 20000171 PARAMETER Experiment Name: At_42deg_Heat_P Parameter: Temperature (deg C) Value: 42 vs. 22
  misc_feature: MA Experiment 20000171 PARAMETER Experiment Name: At_42deg_Heat_P Parameter: Timepoint (hr) Value: 1
  misc_feature: MA Experiment 20000171 PARAMETER Experiment Name: At_42deg_Heat_P Parameter: Tissue Value: Aerial
  misc_feature: MA Experiment ID: 20000173 Result: Down-regulated in Transcription
  misc_feature: MA Experiment 20000173 PARAMETER Experiment Name: At_42deg_Heat_P Parameter: Age (day) Value: 14
  misc_feature: MA Experiment 20000173 PARAMETER Experiment Name: At_42deg_Heat_P Parameter: Organism Value: A. thaliana
  misc_feature: MA Experiment 20000173 PARAMETER Experiment Name: At_42deg_Heat_P Parameter: Plant Line Value: WS
  misc_feature: MA Experiment 20000173 PARAMETER Experiment Name: At_42deg_Heat_P Parameter: Temperature (deg C) Value: 42 vs. 22
  misc_feature: MA Experiment 20000173 PARAMETER Experiment Name: At_42deg_Heat_P Parameter: Timepoint (hr) Value: 6
  misc_feature: MA Experiment 20000173 PARAMETER Experiment Name: At_42deg_Heat_P Parameter: Tissue Value: Aerial
  misc_feature: MA Experiment ID: 20000184 Result: Up-regulated in Transcription
  misc_feature: MA Experiment 20000184 PARAMETER Experiment Name: At_Shoots__P Parameter: Age (day) Value: 7
  misc_feature: MA Experiment 20000184 PARAMETER Experiment Name: At_Shoots__P Parameter: Tissue Value: Shoots vs. Whole Plant
  misc_feature: MA Experiment ID: 20000234 Result: Up-regulated in Transcription
  misc_feature: MA Experiment 20000234 PARAMETER Experiment Name: At_Siliques_P Parameter: Age (day) Value: 21
  misc_feature: MA Experiment 20000234 PARAMETER Experiment Name: At_Siliques_P Parameter: Organism Value: A. thaliana
  misc_feature: MA Experiment 20000234 PARAMETER Experiment Name: At_Siliques_P Parameter: Plant Line Value: WS
  misc_feature: MA Experiment 20000234 PARAMETER Experiment Name: At_Siliques_P Parameter: Tissue Value: Less Than 5mm Siliques vs. Whole Plant
  misc_feature: MA Experiment ID: 20000235 Result: Up-regulated in Transcription
  misc_feature: MA Experiment 20000235 PARAMETER Experiment Name: At_Siliques_P Parameter: Age (day) Value: 21
  misc_feature: MA Experiment 20000235 PARAMETER Experiment Name: At_Siliques_P Parameter: Organism Value: A. thaliana
  misc_feature: MA Experiment 20000235 PARAMETER Experiment Name: At_Siliques_P Parameter: Plant Line Value: WS
  misc_feature: MA Experiment 20000235 PARAMETER Experiment Name: At_Siliques_P Parameter: Tissue Value: 5-10mm Siliques vs. Whole Plant
  misc_feature: MA Experiment ID: 20000264 Result: Up-regulated in Transcription
  misc_feature: MA Experiment 20000264 PARAMETER Experiment Name: At_Open_Flower_P Parameter: Age (day) Value: 21
  misc_feature: MA Experiment 20000264 PARAMETER Experiment Name: At_Open_Flower_P Parameter: Plant Line Value: WS
  misc_feature: MA Experiment 20000264 PARAMETER Experiment Name: At_Open_Flower_P Parameter: Tissue Value: Open Flower vs. Whole Plant
  misc_feature: MA Experiment ID: 20000265 Result: Up-regulated in Transcription
  misc_feature: MA Experiment 20000265 PARAMETER Experiment Name: At_Open_Flower_P Parameter: Age (day) Value: 21
  misc_feature: MA Experiment 20000265 PARAMETER Experiment Name: At_Open_Flower_P Parameter: Plant Line Value: WS
  misc_feature: MA Experiment 20000265 PARAMETER Experiment Name: At_Open_Flower_P Parameter: Tissue Value: Closed Flower vs. Whole Plant
  misc_feature: MA Experiment ID: 20000286 Result: Up-regulated in Transcription
  misc_feature: MA Experiment 20000286 PARAMETER Experiment Name: At_Open_Flower_P Parameter: Age (day) Value: 21
  misc_feature: MA Experiment 20000286 PARAMETER Experiment Name: At_Open_Flower_P Parameter: Plant Line Value: WS
  misc_feature: MA Experiment 20000286 PARAMETER Experiment Name: At_Open_Flower_P Parameter: Tissue Value: Half Open vs. Whole Plant
  misc_feature: MA Experiment ID: 20000438 Result: Up-regulated in Transcription
  misc_feature: MA Experiment 20000438 PARAMETER Experiment Name: At_Shoots__P Parameter: Age (day) Value: 14
  misc_feature: MA Experiment 20000438 PARAMETER Experiment Name: At_Shoots__P Parameter: Tissue Value: Shoots vs. Whole Plant
  misc_feature: MA Experiment ID: 20000439 Result: Up-regulated in Transcription
  misc_feature: MA Experiment 20000439 PARAMETER Experiment Name: At_Roots__P Parameter: Age (day) Value: 14 vs. 21
  misc_feature: MA Experiment 20000439 PARAMETER Experiment Name: At_Roots__P Parameter: Organism Value: A. thaliana
  misc_feature: MA Experiment 20000439 PARAMETER Experiment Name: At_Roots__P Parameter: Tissue Value: Roots vs. Whole Plant
  misc_feature: MA Experiment ID: 20000495 Result: Up-regulated in Transcription
  misc_feature: MA Experiment 20000495 PARAMETER Experiment Name: At_Guard_Cells_P Parameter: Harvest Date Value: 8/2/2002
  misc_feature: MA Experiment 20000495 PARAMETER Experiment Name: At_Guard_Cells_P Parameter: Organism Value: A. thaliana
  misc_feature: MA Experiment 20000495 PARAMETER Experiment Name: At_Guard_Cells_P Parameter: Tissue Value: Guard Cells vs. Leaves
  misc_feature: MA Experiment ID: 20000794 Result: Up-regulated in Transcription
  misc_feature: MA Experiment 20000794 PARAMETER Experiment Name: At_Petals_P Parameter: Age (day) Value: 23-25 days
  misc_feature: MA Experiment 20000794 PARAMETER Experiment Name: At_Petals_P Parameter: Plant Line Value: WS
  misc_feature: MA Experiment 20000794 PARAMETER Experiment Name: At_Petals_P Parameter: Tissue Value: Petals vs. Whole plant
  misc_feature: MA Experiment ID: 20001557 Result: Up-regulated in Transcription
  misc_feature: MA Experiment 20001557 PARAMETER Experiment Name: At_Drought_Soil_Dry_P Parameter: Age (day) Value: 27
  misc_feature: MA Experiment 20001557 PARAMETER Experiment Name: At_Drought_Soil_Dry_P Parameter: Organism Value: A. thaliana
  misc_feature: MA Experiment 20001557 PARAMETER Experiment Name: At_Drought_Soil_Dry_P Parameter: Plant Line Value: WS
  misc_feature: MA Experiment 20001557 PARAMETER Experiment Name: At_Drought_Soil_Dry_P Parameter: Post Timepoint (hr) Value: 3
  misc_feature: MA Experiment 20001557 PARAMETER Experiment Name: At_Drought_Soil_Dry_P Parameter: Post-Treatment Value: Re-Water vs. No Drought
  misc_feature: MA Experiment 20001557 PARAMETER Experiment Name: At_Drought_Soil_Dry_P Parameter: Timepoint (day) Value: 13
  misc_feature: MA Experiment 20001557 PARAMETER Experiment Name: At_Drought_Soil_Dry_P Parameter: Treatment Value: Drought vs. No Drought
aattcttctttgtcttcctcgtgatcatcgaggaagcttgatctcttctatggaatggagaatttgactctcctccttaggatctgtcttgtttcgtcggttttagttgctgcttcttcctcaggatcggaattgttatctccgttatcatcaccaccgtctccattacccgaaacttcaaaagggtttggtcaagcaccgagtaattcacctgaatctcacaaatccgacaatgtgccaccgtctaaagcttcttctcaaccgtctcttcctcctttagctgatttggcagctccaccaccgtcagattccgtcggaggtaaagcaccggccggtgtgcctgttgtctttgttcctaatgctccagctccagctacaatacccgttaaggatttgcccgtagcttcgcctccggttcttcaacccattacaccgattgcttcaccacctcgattcattccaggagatgcaccaaaggagcctcctttctcaggaagagttactccagccccggtttcatcacctgtttcggatattcctccaattccatcagtggctctgcctccgcctacaccgagcaatgtacctcctagaaatgcttctaacaatcacaagcctcctcctatcgaaaagtctattgctcctgttgcatcaccaccaacaatatcaattgacattgcaccaccagtacatcccgtcatacctaagttaacaccctcgagctcacctgtacctacctcgactccaactaagggatctccgagaagaaatccgccaactacccacccagttttccccatagaatctcctgctgtctcaccagatcatgctgcaaatccagtaaaacatccgccccccagcgataacggagatgatagtaaaagtccgggtgctgcaccggcaaatgaaactgctaaacccttacctgtcttcccacataaagcttctcctccttcgattgctccctcagccccaaaatttaacagacactctcatcatacatctccatctactactccaccgccagattctactcctagtaatgtacaccaccatccttcatcaccatctcctcctcctctatcttcacaccatcaacatcatcaagaacgaaagaaaatcgcagatagtccagctccttcaccactgccaccgcatctcatatctccaaagaagtcaaaccgtaaaggttcaatgactcctcctccacaatcgcaccatgctccttctcctcccattcctgattctttgatttctcctgctcacgctccagtctctttctctatgaaacgcatctccccggctctagcaccttctccaacccaagtgtttcctctcaggtcctcttcaagaccttcaaaatctcggaaattccctctaggtccacctcttcaagcatttcctcctcctccccctaattcagattgttcttcaactatttgtttggaaccgtacacaaacacacctccgggatctccatgtggctgtgtctggccaattcaagttgagctacgccttagcatggcgctctacgacttcttcccaatggtttcagaatttgctcgggaaatcagcgccggagttttcatgaaacagagccaagtccgtataatgggagctaacgcggccagcgaacaacctgagaaatccattgttctaatcgatttagtaccgcttggagataaattcgataacatgactgcaatgctgacttaccagagattctggagtaaaaaagtctatatagatgaaccaatctttggcggatacgacgtgatttacgtgcgttatcctggtttacccgcttccccgccaacttctggtatgaccattatagatcaaggaccgtactctggtaataataacggaagggcggtcaaaccgctcggagttgatgttccaaggaagccgcgcaagaaagagctcaatggtggaagtattgctgtgattgttttatccgcagctgcttttatcggtttatgtttcgttatcgtttggttcttggttttccggcgacaaagagatcgacgacgtctttcgaaaagaacaccacttgctcgcccttcactgccttccctctcgaaaccatcaggctcggcgagatctttaactggaagccgatttagctcaacttcattgtcatttgaatccagcattgctccgtttactctctctgcaaagactttcaccgcaagtgaaataatgaaagctacaaataactttgatgaatcgagggttcttggtgaaggcggatttggacgagtttacgaaggtgttttcgatgacggaactaaagtagcagttaaggtattgaagagagatgaccagcaaggtagcagggagttcttagccgaagtggaaatgcttagtcgtcttcatcacagaaacctcgtgaatttaattggtatttgtatcgaagatcgtaaccgttccctggtttatgaactcataccaaatggcagcgttgaatctcacctccacgggattgataaagcatcttcgcctttagattgggatgctcggttgaagatagctcttggtgcggcccgtggtttagcgtatttacacgaagactcgagcccgcgagttatacacagagacttcaagtccagcaacatcttgctggaaaacgatttcacacctaaagtatctgactttggattggctcgtaacgcccttgatgatgaagataacagacatatatcgacacgcgttatgggaacgtttgggtatgtggcaccggaatacgcaatgacagggcatcttttggtgaagagtgatgtgtatagttacggagttgtgcttctcgagctacttacagggcggaaaccagtggatatgtctcaaccgcccggacaagagaacttagtttcatggactcggccttttcttacgagtgcagaagggcttgcagctattatagatcagtctttaggacccgagatctcattcgatagcatagctaaagtcgcggcaatagcttctatgtgcgttcaaccagaagtatcacaccgtcctttcatgggagaagtagtgcaagctttgaaacttgtcagcaacgaatgtgatgaagctaaagaactcaattctttaacttctatctctaaagacgattttagagatgacactcaagctgagagctcttgtggtgacagctcagcaaggatggctcggtatccattgctaccaaattacgactctgagcctgatacagagagaggattatctacatcggaaatgtacacggggtcagggaggttcgagagacagtctaactcgggtcccttgacctcgggtcgaggcaagagtttctggcaaaagatgaggagattatcgaccggaagcttgagtgagcatggaacaccaacggtcatgttacgatccggttctcgctaaacaatcttttgcctacagaacactgaagagtttttgattgcccgtttaagttaagagactgaaaggaaagaaggtgccttctcctacaagcaaaactctttgcctcatggaaaccggttaagataaaaccaggagtgatcatttcccggttcaaaatttttagttgaatagatctgtttatctgagaagaagaaacaagagattctgttaaatctaatttgaatgtacatatcacgttttaaagtaacaggcttaagcattaagtatcatcatccttc

SEQ ID NO: 77057 - protein, 1113 aa, Arabidopsis thaliana
  peptide (1)..(1113): Ceres Seq. ID no. 12560697
  misc_feature (149)..(1113): Homolog of NCBI NO: 34903544 NR Description: putative protein kinase APK1AArabidopsis thaliana
  misc_feature (316)..(1103): Homolog of NCBI NO: 34910468 NR Description: putative protein kinase [Oryza sativa (japonica group)] >gi|13366186|dbj|BAB39409.1| putative protein kinase
  misc_feature (628)..(1105): Homolog of NCBI NO: 30680947 NR Description: protein kinase family [Arabidopsis thaliana] putative protein kinase [Arabidopsis thaliana]
  misc_feature (686)..(1105): Homolog of NCBI NO: 25287641 NR Description: probable protein kinase [imported] - Arabidopsis >gi|4512705|gb|AAD21758.1| putative protein kinase [Arabidopsis
  misc_feature (584)..(1003): Homolog of NCBI NO: 15221470 NR Description: protein kinase, putative; protein id: supported by cDNA: gi_21280864 [Arabidopsis thaliana]
  misc_feature (116)..(379): Homolog of NCBI NO: 15221470 NR Description: protein kinase, putative; protein id: supported by cDNA: gi_21280864 [Arabidopsis thaliana]
  misc_feature (625)..(1003): Homolog of NCBI NO: 15222649 NR Description: Pto kinase interactor, putative; protein id: [Arabidopsis thaliana] >gi|25403034|pir||F86387 probable Pto
  misc_feature (28)..(340): Homolog of NCBI NO: 15222649 NR Description: Pto kinase interactor, putative; protein id: [Arabidopsis thaliana] >gi|25403034|pir||F86387 probable Pto
  misc_feature (30)..(286): Homolog of NCBI NO: 15221470 NR Description: protein kinase, putative; protein id: supported by cDNA: gi_21280864 [Arabidopsis thaliana]
  misc_feature (47)..(333): Homolog of NCBI NO: 15221470 NR Description: protein kinase, putative; protein id: supported by cDNA: gi_21280864 [Arabidopsis thaliana]
MENLTLLLRICLVSSVLVAASSSGSELLSPLSSPPSPLPETSKGFGQAPSNSPESHKSDNVPPSKASSQPSLPPLADLAAPPPSDSVGGKAPAGVPVVFVPNAPAPATIPVKDLPVASPPVLQPITPIASPPRFIPGDAPKEPPFSGRVTPAPVSSPVSDIPPIPSVALPPPTPSNVPPRNASNNHKPPPIEKSIAPVASPPTISIDIAPPVHPVIPKLTPSSSPVPTSTPTKGSPRRNPPTTHPVFPIESPAVSPDHAANPVKHPPPSDNGDDSKSPGAAPANETAKPLPVFPHKASPPSIAPSAPKFNRHSHHTSPSTTPPPDSTPSNVHHHPSSPSPPPLSSHHQHHQERKKIADSPAPSPLPPHLISPKKSNRKGSMTPPPQSHHAPSPPIPDSLISPAHAPVSFSMKRISPALAPSPTQVFPLRSSSRPSKSRKFPLGPPLQAFPPPPPNSDCSSTICLEPYTNTPPGSPCGCVWPIQVELRLSMALYDFFPMVSEFAREISAGVFMKQSQVRIMGANAASEQPEKSIVLIDLVPLGDKFDNMTAMLTYQRFWSKKVYIDEPIFGGYDVIYVRYPGLPASPPTSGMTIIDQGPYSGNNNGRAVKPLGVDVPRKPRKKELNGGSIAVIVLSAAAFIGLCFVIVWFLVFRRQRDRRRLSKRTPLARPSLPSLSKPSGSARSLTGSRFSSTSLSFESSIAPFTLSAKTFTASEIMKATNNFDESRVLGEGGFGRVYEGVFDDGTKVAVKVLKRDDQQGSREFLAEVEMLSRLHHRNLVNLIGICIEDRNRSLVYELIPNGSVESHLHGIDKASSPLDWDARLKIALGAARGLAYLHEDSSPRVIHRDFKSSNILLENDFTPKVSDFGLARNALDDEDNRHISTRVMGTFGYVAPEYAMTGHLLVKSDVYSYGVVLLELLTGRKPVDMSQPPGQENLVSWTRPFLTSAEGLAAIIDQSLGPEISFDSIAKVAAIASMCVQPEVSHRPFMGEVVQALKLVSNECDEAKELNSLTSISKDDFRDDTQAESSCGDSSARMARYPLLPNYDSEPDTERGLSTSEMYTGSGRFERQSNSGPLTSGRGKSFWQKMRRLSTGSLSEHGTPTVMLRSGSR

SEQ ID NO: 77058 - protein, 733 aa, Arabidopsis thaliana
  peptide (1)..(733): Ceres Seq. ID no. 12560698
  misc_feature (1)..(733): Homolog of NCBI NO: 34903544 NR Description: putative protein kinase APK1AArabidopsis thaliana
  misc_feature (1)..(723): Homolog of NCBI NO: 34910468 NR Description: putative protein kinase [Oryza sativa (japonica group)] >gi|13366186|dbj|BAB39409.1| putative protein kinase
  misc_feature (248)..(725): Homolog of NCBI NO: 30680947 NR Description: protein kinase family [Arabidopsis thaliana] putative protein kinase [Arabidopsis thaliana]
  misc_feature (306)..(725): Homolog of NCBI NO: 25287641 NR Description: probable protein kinase [imported] - Arabidopsis >gi|4512705|gb|AAD21758.1| putative protein kinase [Arabidopsis
  misc_feature (204)..(623): Homolog of NCBI NO: 15221470 NR Description: protein kinase, putative; protein id: supported by cDNA: gi_21280864 [Arabidopsis thaliana]
  misc_feature (245)..(623): Homolog of NCBI NO: 15222649 NR Description: Pto kinase interactor, putative; protein id: [Arabidopsis thaliana] >gi|25403034|pir||F86387 probable Pto
  misc_feature (1)..(95): Homolog of NCBI NO: 15221470 NR Description: protein kinase, putative; protein id: supported by cDNA: gi_21280864 [Arabidopsis thaliana]
  misc_feature (203)..(617): Homolog of NCBI NO: 34894174 NR Description: putative protein kinase [Oryza sativa (japonica group)] >gi|13486635|dbj|BAB39873.1| putative protein kinase
  misc_feature (1)..(94): Homolog of NCBI NO: 15222649 NR Description: Pto kinase interactor, putative; protein id: [Arabidopsis thaliana] >gi|25403034|pir||F86387 probable Pto
  misc_feature (200)..(625): Homolog of NCBI NO: 15240947 NR Description: putative protein; protein id: At5g38560.1, by cDNA: gi_15983496, supported by cDNA: gi_18700152 [Arabidopsis >gi|10176824|dbj|BAB10146.1| contains similarity to protein
MTPPPQSHHAPSPPIPDSLISPAHAPVSFSMKRISPALAPSPTQVFPLRSSSRPSKSRKFPLGPPLQAFPPPPPNSDCSSTICLEPYTNTPPGSPCGCVWPIQVELRLSMALYDFFPMVSEFAREISAGVFMKQSQVRIMGANAASEQPEKSIVLIDLVPLGDKFDNMTAMLTYQRFWSKKVYIDEPIFGGYDVIYVRYPGLPASPPTSGMTIIDQGPYSGNNNGRAVKPLGVDVPRKPRKKELNGGSIAVIVLSAAAFIGLCFVIVWFLVFRRQRDRRRLSKRTPLARPSLPSLSKPSGSARSLTGSRFSSTSLSFESSIAPFTLSAKTFTASEIMKATNNFDESRVLGEGGFGRVYEGVFDDGTKVAVKVLKRDDQQGSREFLAEVEMLSRLHHRNLVNLIGICIEDRNRSLVYELIPNGSVESHLHGIDKASSPLDWDARLKIALGAARGLAYLHEDSSPRVIHRDFKSSNILLENDFTPKVSDFGLARNALDDEDNRHISTRVMGTFGYVAPEYAMTGHLLVKSDVYSYGVVLLELLTGRKPVDMSQPPGQENLVSWTRPFLTSAEGLAAIIDQSLGPEISFDSIAKVAAIASMCVQPEVSHRPFMGEVVQALKLVSNECDEAKELNSLTSISKDDFRDDTQAESSCGDSSARMARYPLLPNYDSEPDTERGLSTSEMYTGSGRFERQSNSGPLTSGRGKSFWQKMRRLSTGSLSEHGTPTVMLRSGSR

SEQ ID NO: 77059 - protein, 703 aa, Arabidopsis thaliana
  peptide (1)..(703): Ceres Seq. ID no. 12560699
  misc_feature (1)..(703): Homolog of NCBI NO: 34903544 NR Description: putative protein kinase APK1AArabidopsis thaliana
  misc_feature (1)..(693): Homolog of NCBI NO: 34910468 NR Description: putative protein kinase [Oryza sativa (japonica group)] >gi|13366186|dbj|BAB39409.1| putative protein kinase
  misc_feature (218)..(695): Homolog of NCBI NO: 30680947 NR Description: protein kinase family [Arabidopsis thaliana] putative protein kinase [Arabidopsis thaliana]
  misc_feature (276)..(695): Homolog of NCBI NO: 25287641 NR Description: probable protein kinase [imported] - Arabidopsis >gi|4512705|gb|AAD21758.1| putative protein kinase [Arabidopsis
  misc_feature (174)..(593): Homolog of NCBI NO: 15221470 NR Description: protein kinase, putative; protein id: supported by cDNA: gi_21280864 [Arabidopsis thaliana]
  misc_feature (215)..(593): Homolog of NCBI NO: 15222649 NR Description: Pto kinase interactor, putative; protein id: [Arabidopsis thaliana] >gi|25403034|pir||F86387 probable Pto
  misc_feature (1)..(65): Homolog of NCBI NO: 15221470 NR Description: protein kinase, putative; protein id: supported by cDNA: gi_21280864 [Arabidopsis thaliana]
  misc_feature (173)..(587): Homolog of NCBI NO: 34894174 NR Description: putative protein kinase [Oryza sativa (japonica group)] >gi|13486635|dbj|BAB39873.1| putative protein kinase
  misc_feature (1)..(64): Homolog of NCBI NO: 15222649 NR Description: Pto kinase interactor, putative; protein id: [Arabidopsis thaliana] >gi|25403034|pir||F86387 probable Pto
  misc_feature (170)..(595): Homolog of NCBI NO: 15240947 NR Description: putative protein; protein id: At5g38560.1, by cDNA: gi_15983496, supported by cDNA: gi_18700152 [Arabidopsis >gi|10176824|dbj|BAB10146.1| contains similarity to protein
MKRISPALAPSPTQVFPLRSSSRPSKSRKFPLGPPLQAFPPPPPNSDCSSTICLEPYTNTPPGSPCGCVWPIQVELRLSMALYDFFPMVSEFAREISAGVFMKQSQVRIMGANAASEQPEKSIVLIDLVPLGDKFDNMTAMLTYQRFWSKKVYIDEPIFGGYDVIYVRYPGLPASPPTSGMTIIDQGPYSGNNNGRAVKPLGVDVPRKPRKKELNGGSIAVIVLSAAAFIGLCFVIVWFLVFRRQRDRRRLSKRTPLARPSLPSLSKPSGSARSLTGSRFSSTSLSFESSIAPFTLSAKTFTASEIMKATNNFDESRVLGEGGFGRVYEGVFDDGTKVAVKVLKRDDQQGSREFLAEVEMLSRLHHRNLVNLIGICIEDRNRSLVYELIPNGSVESHLHGIDKASSPLDWDARLKIALGAARGLAYLHEDSSPRVIHRDFKSSNILLENDFTPKVSDFGLARNALDDEDNRHISTRVMGTFGYVAPEYAMTGHLLVKSDVYSYGVVLLELLTGRKPVDMSQPPGQENLVSWTRPFLTSAEGLAAIIDQSLGPEISFDSIAKVAAIASMCVQPEVSHRPFMGEVVQALKLVSNECDEAKELNSLTSISKDDFRDDTQAESSCGDSSARMARYPLLPNYDSEPDTERGLSTSEMYTGSGRFERQSNSGPLTSGRGKSFWQKMRRLSTGSLSEHGTPTVMLRSGSR

SEQ ID NO: 77060 - DNA, 1413 bp, Arabidopsis thaliana
  misc_feature (1)..(1413): Ceres Seq. ID no. 12560711
  misc_feature: MA Experiment ID: 20000355 Result: Down-regulated in Transcription
  misc_feature: MA Experiment 20000355 PARAMETER Experiment Name: At_Siliques_Sub_P Parameter: Age (day) Value: 21
  misc_feature: MA Experiment 20000355 PARAMETER Experiment Name: At_Siliques_Sub_P Parameter: Organism Value: A. thaliana
  misc_feature: MA Experiment 20000355 PARAMETER Experiment Name: At_Siliques_Sub_P Parameter: Plant Line Value: WS
  misc_feature: MA Experiment 20000355 PARAMETER Experiment Name: At_Siliques_Sub_P Parameter: Tissue Value: Less Than 5mm Siliques vs. Whole Plant
  misc_feature: MA Experiment ID: 20000440 Result: Down-regulated in Transcription
  misc_feature: MA Experiment 20000440 PARAMETER Experiment Name: At_Closed-Flower__Sub_P Parameter: Tissue Value: Closed Flower vs. Whole Plant
aaaagtctgcgtttcttcaccaaccctacacgaaccaagatagatagaaaccttctccttcttctgcttcttttatcatcggagaattcgaatcttcttttcctctttttgagattctctaattatccttttggaagagtttcgtgtgagagagaagcgtaatgggctgctttggttgttgtggtggtggtgaggatttccgtagagtttctgaaactggaccaaagccagtgcataacactggaggttacaatggaggtcaccatcaaagggcagatccacccaaaaaccttccagtcattcagatgcagcctatctctgttgcggccattccagctgatgaattgagggatataacggataactatggttcaaagtccttgattggtgagggttcatatggaagagtcttttatggtattcttaaaagtggtaaagcagctgccattaagaaactggattctagtaagcaaccagatcaagaatttctcgcccaggtatcaatggtttcgagattgcgacaagaaaatgttgttgcgcttctgggctattgtgttgatggcccactccgtgttcttgcttatgaatatgctcctaatggatctcttcatgatattcttcatggtcgaaaaggtgttaaaggggcacagccaggtcctgttctgtcgtggcaccagagagtcaaaattgctgttggtgcggctagaggactcgagtacttgcatgagaaggcaaaccctcatgttatccacagagacatcaaatccagcaatgtacttctgttcgatgatgatgttgccaagattgctgattttgatttgtccaaccaagcccctgacatggctgctcgccttcactcaacccgtgtgctcggaacctttggctatcacgctccagagtatgcaatgacggggacgttgagcacaaagagtgatgtctatagttttggcgttgttctgctggagctcctcacaggtcgtaaaccagttgatcataccttaccacgtggacagcagagtgtcgtgacatgggcaacccctaaattgagtgaagacaaggtgaagcagtgtgttgacgcaagactaaacggagaatatcctcccaaagctgttgctaagctggctgcggtagctgcactgtgtgtgcaatatgaggcagacttcaggcctaacatgagcatagtggtgaaggctcttcagccgttgctcaatcctcctcgttctgctccccagactccacacaggaacccgtattgatatgctctagtctgatatcaccctttatgatcatcactatttcatttgtttttgtttgaatccgatttgtgtaaatttgtgaaataggcgtttattctctcataaaccccctgccacttcactgaaaatcttacttggaaagacctgaatgttactg

SEQ ID NO: 77061 - protein, 364 aa, Arabidopsis thaliana; identical to SEQ ID NO: 46018
  peptide (1)..(364): Ceres Seq. ID no. 12560712
  misc_feature (1)..(364): Homolog of NCBI NO: 22331138 NR Description: putative protein kinase; protein id: At3g17410.1, by cDNA: gi_17979366, supported by cDNA: gi_20465524 [Arabidopsis
  misc_feature (1)..(364): Homolog of NCBI NO: 15221111 NR Description: Pto kinase interactor 1, putative; protein id: supported by cDNA: gi_15451195, supported by cDNA: gi_20148446
  misc_feature (1)..(364): Homolog of NCBI NO: 15451196 NR Description: similar to Pto kinase interactor 1 gb|AAC61805.1 thaliana] >gi|20148447|gb|AAM10114.1| similar to Pto kinase
  misc_feature (1)..(342): Homolog of NCBI NO: 25405922 NR Description: protein F21D18.6 [imported] - Arabidopsis >gi|8778533|gb|AAF79541.1|AC023673_29 F21D18.6 [Arabidopsis
  misc_feature (1)..(356): Homolog of NCBI NO: 3668069 NR Description: Pto kinase interactor 1 [Lycopersicon esculentum]
  misc_feature (1)..(356): Homolog of NCBI NO: 15226492 NR Description: putative protein kinase; protein id: At2g47060.1, by cDNA: gi_13272438, supported by cDNA: gi_19424107, supported cDNA: gi_21281065 [Arabidopsis thaliana] >gi|7434311|pir||T02181
  misc_feature (1)..(364): Homolog of NCBI NO: 8778965 NR Description: Similar to Pto kinase interactor 1 from esculentum gb|U28007. It contains a Eukaryotic protein kinase
  misc_feature (1)..(343): Homolog of NCBI NO: 1586940 NR Description: Ser/Thr kinase
  misc_feature (1)..(356): Homolog of NCBI NO: 15228711 NR Description: serine/threonine protein kinase-like protein; id: At3g62220.1 [Arabidopsis thaliana] >gi|11259788|pir||T48014
  misc_feature (1)..(350): Homolog of NCBI NO: 15221113 NR Description: Pto kinase interactor 1, putative; protein id:

SEQ ID NO: 77062 - protein, 316 aa, Arabidopsis thaliana; identical to SEQ ID NO: 46019
  peptide (1)..(316): Ceres Seq. ID no. 12560713
  misc_feature (1)..(316): Homolog of NCBI NO: 22331138 NR Description: putative protein kinase; protein id: At3g17410.1, by cDNA: gi_17979366, supported by cDNA: gi_20465524 [Arabidopsis
  misc_feature (1)..(316): Homolog of NCBI NO: 15221111 NR Description: Pto kinase interactor 1, putative; protein id: supported by cDNA: gi_15451195, supported by cDNA: gi_20148446
  misc_feature (1)..(316): Homolog of NCBI NO: 15451196 NR Description: similar to Pto kinase interactor 1 gb|AAC61805.1 thaliana] >gi|20148447|gb|AAM10114.1| similar to Pto kinase
  misc_feature (1)..(294): Homolog of NCBI NO: 25405922 NR Description: protein F21D18.6 [imported] - Arabidopsis >gi|8778533|gb|AAF79541.1|AC023673_29 F21D18.6 [Arabidopsis
  misc_feature (1)..(308): Homolog of NCBI NO: 3668069 NR Description: Pto kinase interactor 1 [Lycopersicon esculentum]
  misc_feature (1)..(308): Homolog of NCBI NO: 15226492 NR Description: putative protein kinase; protein id: At2g47060.1, by cDNA: gi_13272438, supported by cDNA: gi_19424107, supported cDNA: gi_21281065 [Arabidopsis thaliana] >gi|7434311|pir||T02181
  misc_feature (1)..(316): Homolog of NCBI NO: 8778965 NR Description: Similar to Pto kinase interactor 1 from esculentum gb|U28007. It contains a Eukaryotic protein kinase
  misc_feature (1)..(295): Homolog of NCBI NO: 1586940 NR Description: Ser/Thr kinase
  misc_feature (1)..(308): Homolog of NCBI NO: 15228711 NR Description: serine/threonine protein kinase-like protein; id: At3g62220.1 [Arabidopsis thaliana] >gi|11259788|pir||T48014
  misc_feature (1)..(302): Homolog of NCBI NO: 15221113 NR Description: Pto kinase interactor 1, putative; protein id:

SEQ ID NO: 77063 - protein, 250 aa, Arabidopsis thaliana; identical to SEQ ID NO: 46020
  peptide (1)..(250): Ceres Seq. ID no. 12560714
  misc_feature (1)..(250): Homolog of NCBI NO: 22331138 NR Description: putative protein kinase; protein id: At3g17410.1, by cDNA: gi_17979366, supported by cDNA: gi_20465524 [Arabidopsis
  misc_feature (1)..(250): Homolog of NCBI NO: 15221111 NR Description: Pto kinase interactor 1, putative; protein id: supported by cDNA: gi_15451195, supported by cDNA: gi_20148446
  misc_feature (1)..(250): Homolog of NCBI NO: 15451196 NR Description: similar to Pto kinase interactor 1 gb|AAC61805.1 thaliana] >gi|20148447|gb|AAM10114.1| similar to Pto kinase
  misc_feature (1)..(228): Homolog of NCBI NO: 25405922 NR Description: protein F21D18.6 [imported] - Arabidopsis >gi|8778533|gb|AAF79541.1|AC023673_29 F21D18.6 [Arabidopsis
  misc_feature (1)..(242): Homolog of NCBI NO: 3668069 NR Description: Pto kinase interactor 1 [Lycopersicon esculentum]
  misc_feature (1)..(242): Homolog of NCBI NO: 15226492 NR Description: putative protein kinase; protein id: At2g47060.1, by cDNA: gi_13272438, supported by cDNA: gi_19424107, supported cDNA: gi_21281065 [Arabidopsis thaliana] >gi|7434311|pir||T02181
  misc_feature (1)..(250): Homolog of NCBI NO: 8778965 NR Description: Similar to Pto kinase interactor 1 from esculentum gb|U28007. It contains a Eukaryotic protein kinase
  misc_feature (1)..(229): Homolog of NCBI NO: 1586940 NR Description: Ser/Thr kinase
  misc_feature (1)..(242): Homolog of NCBI NO: 15228711 NR Description: serine/threonine protein kinase-like protein; id: At3g62220.1 [Arabidopsis thaliana] >gi|11259788|pir||T48014
  misc_feature (1)..(236): Homolog of NCBI NO: 15221113 NR Description: Pto kinase interactor 1, putative; protein id:

SEQ ID NO: 77064 - DNA, 1861 bp, Arabidopsis thaliana
  misc_feature (1)..(1861): Ceres Seq. ID no. 12560789
  misc_feature: MA Experiment ID: 20000437 Result: Up-regulated in Transcription
  misc_feature: MA Experiment 20000437 PARAMETER Experiment Name: At_Drought_P Parameter: Age (day) Value: 8
  misc_feature: MA Experiment 20000437 PARAMETER Experiment Name: At_Drought_P Parameter: Organism Value: A. thaliana
  misc_feature: MA Experiment 20000437 PARAMETER Experiment Name: At_Drought_P Parameter: Plant Line Value: WS
  misc_feature: MA Experiment 20000437 PARAMETER Experiment Name: At_Drought_P Parameter: Timepoint (hr) Value: 24
  misc_feature: MA Experiment 20000437 PARAMETER Experiment Name: At_Drought_P Parameter: Tissue Value: Whole Plant
  misc_feature: MA Experiment 20000437 PARAMETER Experiment Name: At_Drought_P Parameter: Treatment Value: Drought vs. No Drought
  misc_feature: MA Experiment ID: 20000794 Result: Up-regulated in Transcription
  misc_feature: MA Experiment 20000794 PARAMETER Experiment Name: At_Petals_P Parameter: Age (day) Value: 23-25 days
  misc_feature: MA Experiment 20000794 PARAMETER Experiment Name: At_Petals_P Parameter: Plant Line Value: WS
  misc_feature: MA Experiment 20000794 PARAMETER Experiment Name: At_Petals_P Parameter: Tissue Value: Petals vs. Whole plant
  misc_feature: MA Experiment ID: 20001451 Result: Up-regulated in Transcription
  misc_feature: MA Experiment 20001451 PARAMETER Experiment Name: At_Far-red-induction_P Parameter: Age (day) Value: 7
  misc_feature: MA Experiment 20001451 PARAMETER Experiment Name: At_Far-red-induction_P Parameter: Light Value: Far-red vs. White
  misc_feature: MA Experiment 20001451 PARAMETER Experiment Name: At_Far-red-induction_P Parameter: Organism Value: A. thaliana
  misc_feature: MA Experiment 20001451 PARAMETER Experiment Name: At_Far-red-induction_P Parameter: Plant Line Value: Columbia
  misc_feature: MA Experiment 20001451 PARAMETER Experiment Name: At_Far-red-induction_P Parameter: Timepoint (hr) Value: 24
  misc_feature: MA Experiment 20001451 PARAMETER Experiment Name: At_Far-red-induction_P Parameter: Tissue Value: Whole Plant
ctctttctcttttcttccgcaaatctccgcaaaatcttccctcaaactcagatccgattcttctaattctttgtccccccagagattcttcttctttctccaagtaaaagaaaacaactttctttctcttttcttgcgaaagtcctcaactttcaccactaaatcagcttccttcaatcactgtgtttgctttggacccagtttctgatttagcgactagggttttgattggaaccgtattaagtatatgagaatcgggttttactggtgaatcggattatcatcggaattcggaaaaagatggatcggaatcaaaagatggatcacgttatcggcgggaagtttaagttgggtaggaagcttggaagtggatcattcggtgaactttatttagggatcaatattcaaactggagaagaagtcgcagttaagctggaacctgtgaagacgaggcatcctcaactgcagtatgaatcgaaaatatatatgtttcttcaaggaggaacgggtgttccccatctgaaatggtttggagttgagggtgaatacagttgcatggttatcgatcttcttgggccaagcttggaggacttattcaattactgcaagcgaatattttcattaaaatctgttttaatgcttgcagatcaattgatatgtagagttgagtatatgcattcgcggggttttcttcaccgcgatattaaaccagacaactttttgatgggtcttgggcgcagagcaaaccaggtgtatatcattgattatggccttgctaaaaaatacaaggatcttcagacacaaaagcatataccatacagggaaaacaagaatcttacaggaactgctcggtatgcaagtgtgaacacacaccttgggattgagcaaagtagaagagatgatctggagtcacttggttatgtgttgatgtattttctacgaggaagtcttccgtggcaaggtttaaaagctggtacgaagaagcagaaatatgacaagattagtgaaaagaagatgcttacttctgtagagactctttgcaagtcgtatccatcagagttcacatcgtacttccattactgtcgttcattgagatttgaggacaaaccggattattcatatctgagaagactttttagggatcttttcattcgtgaaggttatcagcttgattatgtgtttgattggacaatctcgaagtatcctcagattggctctagttcgagaccaaggccaactccaagaccagcgttggaccctccaggaccacctgcagaaagagctgaaaagcctacagtcggacaggacctgcgaggaagatttacaggtgcaattgaggcattcaccagacgaaatgtttcaagccaaggcgctcttggtgatcgctctagacacagatcttctgatgatataccctcttctgccaaggaagtgcacgagtctcgaaatggaagtacctcaaagagaggtgtgatatcaagcaccagacctggctcatcagctgaaccaagcgagaaccactcaagccgactattttcaagtggttcacgtcatgccacaacccaacgggttccacagagctatgaatctgcagctgcagcaaggcctgggcatgaggatgccattagaaacttcgagctccttaccatcggctctggaaagaagaggaaatgaagatagggaaggagaagtttgatgagagtgaaaagacaacattcggtgctgatggctctctcctctgaaaataggaaagacatgtcctcgaattgttttttaaccttgggaacaagatgagaaagtgagagagagaaagagagttaatgtaatctgcctctcccaatctctcagtctctgtttttaa

SEQ ID NO: 77065 - protein, 457 aa, Arabidopsis thaliana; identical to SEQ ID NO: 45986
  peptide (1)..(457): Ceres Seq. ID no. 12560790
  misc_feature (1)..(457): Homolog of NCBI NO: 15236471 NR Description: casein kinase I; protein id: At4g14340.1, by cDNA: gi_15450524, supported by cDNA: gi_16974430, supported cDNA: gi_9965744 [Arabidopsis thaliana] >gi|7488072|pir||C71405
  misc_feature (7)..(456): Homolog of NCBI NO: 15229427 NR Description: putative casein kinase I; protein id: supported by cDNA: gi_15809823, supported by cDNA: gi_18377818 thaliana] >gi|11994319|dbj|BAB02278.1| casein kinase [Arabidopsis
  misc_feature (32)..(456): Homolog of NCBI NO: 1197461 NR Description: casein kinase I [Arabidopsis thaliana]
  misc_feature (7)..(436): Homolog of NCBI NO: 15219733 NR Description: putative casein kinase I; protein id: At1g04440.1
  misc_feature (7)..(436): Homolog of NCBI NO: 27754653 NR Description: putative casein kinase I [Arabidopsis thaliana]
  misc_feature (7)..(435): Homolog of NCBI NO: 15239840 NR Description: casein kinase I; protein id: At5g43320.1, by cDNA: gi_13430689, supported by cDNA: gi_14532893 [Arabidopsis >gi|8843885|dbj|BAA97411.1| casein kinase I [Arabidopsis
  misc_feature (7)..(456): Homolog of NCBI NO: 32482941 NR Description: OSJNBb0072M01.6 [Oryza sativa (japonica
  misc_feature (6)..(439): Homolog of NCBI NO: 18417216 NR Description: protein kinase ADK1-like protein; protein id: supported by cDNA: 113439., supported by cDNA: gi_20466497
  misc_feature (7)..(439): Homolog of NCBI NO: 21536851 NR Description: protein kinase ADK1-like protein [Arabidopsis
  misc_feature (7)..(456): Homolog of NCBI NO: 25287643 NR Description: protein F19P19.10 [imported] - Arabidopsis

SEQ ID NO: 77066 - protein, 451 aa, Arabidopsis thaliana; identical to SEQ ID NO: 45987
  peptide (1)..(451): Ceres Seq. ID no. 12560791
  misc_feature (1)..(451): Homolog of NCBI NO: 15236471 NR Description: casein kinase I; protein id: At4g14340.1, by cDNA: gi_15450524, supported by cDNA: gi_16974430, supported cDNA: gi_9965744 [Arabidopsis thaliana] >gi|7488072|pir||C71405
  misc_feature (1)..(450): Homolog of NCBI NO: 15229427 NR Description: putative casein kinase I; protein id: supported by cDNA: gi_15809823, supported by cDNA: gi_18377818 thaliana] >gi|11994319|dbj|BAB02278.1| casein kinase [Arabidopsis
  misc_feature (26)..(450): Homolog of NCBI NO: 1197461 NR Description: casein kinase I [Arabidopsis thaliana]
  misc_feature (1)..(430): Homolog of NCBI NO: 15219733 NR Description: putative casein kinase I; protein id: At1g04440.1
  misc_feature (1)..(430): Homolog of NCBI NO: 27754653 NR Description: putative casein kinase I [Arabidopsis thaliana]
  misc_feature (1)..(429): Homolog of NCBI NO: 15239840 NR Description: casein kinase I; protein id: At5g43320.1, by cDNA: gi_13430689, supported by cDNA: gi_14532893 [Arabidopsis >gi|8843885|dbj|BAA97411.1| casein kinase I [Arabidopsis
  misc_feature (1)..(450): Homolog of NCBI NO: 32482941 NR Description: OSJNBb0072M01.6 [Oryza sativa (japonica
  misc_feature (1)..(433): Homolog of NCBI NO: 18417216 NR Description: protein kinase ADK1-like protein; protein id: supported by cDNA: 113439., supported by cDNA: gi_20466497
  misc_feature (1)..(433): Homolog of NCBI NO: 21536851 NR Description: protein kinase ADK1-like protein [Arabidopsis
  misc_feature (1)..(450): Homolog of NCBI NO: 25287643 NR Description: protein F19P19.10 [imported] - Arabidopsis

SEQ ID NO: 77067 - protein, 395 aa, Arabidopsis thaliana; identical to SEQ ID NO: 45988
  peptide (1)..(395): Ceres Seq. ID no. 12560792
  misc_feature (1)..(395): Homolog of NCBI NO: 15236471 NR Description: casein kinase I; protein id: At4g14340.1, by cDNA: gi_15450524, supported by cDNA: gi_16974430, supported cDNA: gi_9965744 [Arabidopsis thaliana] >gi|7488072|pir||C71405
  misc_feature (1)..(394): Homolog of NCBI NO: 15229427 NR Description: putative casein kinase I; protein id: supported by cDNA: gi_15809823, supported by cDNA: gi_18377818 thaliana] >gi|11994319|dbj|BAB02278.1| casein kinase [Arabidopsis
  misc_feature (1)..(394): Homolog of NCBI NO: 1197461 NR Description: casein kinase I [Arabidopsis thaliana]
  misc_feature (1)..(374): Homolog of NCBI NO: 15219733 NR Description: putative casein kinase I; protein id: At1g04440.1
  misc_feature (1)..(374): Homolog of NCBI NO: 27754653 NR Description: putative casein kinase I [Arabidopsis thaliana]
  misc_feature (1)..(373): Homolog of NCBI NO: 15239840 NR Description: casein kinase I; protein id: At5g43320.1, by cDNA: gi_13430689, supported by cDNA: gi_14532893 [Arabidopsis >gi|8843885|dbj|BAA97411.1| casein kinase I [Arabidopsis
  misc_feature (1)..(394): Homolog of NCBI NO: 32482941 NR Description: OSJNBb0072M01.6 [Oryza sativa (japonica
  misc_feature (1)..(377): Homolog of NCBI NO: 18417216 NR Description: protein kinase ADK1-like protein; protein id: supported by cDNA: 113439., supported by cDNA: gi_20466497
  misc_feature (1)..(377): Homolog of NCBI NO: 21536851 NR Description: protein kinase ADK1-like protein [Arabidopsis
  misc_feature (1)..(394): Homolog of NCBI NO: 25287643 NR Description: protein F19P19.10 [imported] - Arabidopsis

SEQ ID NO: 77068 - DNA, 821 bp, Arabidopsis thaliana
  misc_feature (1)..(821): Ceres Seq. ID no. 12560805
  misc_feature: MA Experiment ID: 20001451 Result: Down-regulated in Transcription
  misc_feature: MA Experiment 20001451 PARAMETER Experiment Name: At_Far-red-induction_P Parameter: Age (day) Value: 7
  misc_feature: MA Experiment 20001451 PARAMETER Experiment Name: At_Far-red-induction_P Parameter: Light Value: Far-red vs. White
  misc_feature: MA Experiment 20001451 PARAMETER Experiment Name: At_Far-red-induction_P Parameter: Organism Value: A. thaliana
  misc_feature: MA Experiment 20001451 PARAMETER Experiment Name: At_Far-red-induction_P Parameter: Plant Line Value: Columbia
  misc_feature: MA Experiment 20001451 PARAMETER Experiment Name: At_Far-red-induction_P Parameter: Timepoint (hr) Value: 24
  misc_feature: MA Experiment 20001451 PARAMETER Experiment Name: At_Far-red-induction_P Parameter: Tissue Value: Whole Plant
  misc_feature: MA Experiment ID: 20001560 Result: Down-regulated in Transcription
  misc_feature: MA Experiment 20001560 PARAMETER Experiment Name: At_Drought_Soil_Dry_P Parameter: Age (day) Value: 28
  misc_feature: MA Experiment 20001560 PARAMETER Experiment Name: At_Drought_Soil_Dry_P Parameter: Organism Value: A. thaliana
  misc_feature: MA Experiment 20001560 PARAMETER Experiment Name: At_Drought_Soil_Dry_P Parameter: Plant Line Value: WS
  misc_feature: MA Experiment 20001560 PARAMETER Experiment Name: At_Drought_Soil_Dry_P Parameter: Post Timepoint (hr) Value: None
  misc_feature: MA Experiment 20001560 PARAMETER Experiment Name: At_Drought_Soil_Dry_P Parameter: Post-Treatment Value: None
  misc_feature: MA Experiment 20001560 PARAMETER Experiment Name: At_Drought_Soil_Dry_P Parameter: Timepoint (day) Value: 14
  misc_feature: MA Experiment 20001560 PARAMETER Experiment Name: At_Drought_Soil_Dry_P Parameter: Treatment Value: Drought vs. No Drought
aaagaggcgacgtaccacccacctaaccacaaccagatccccaaaagacagagaactttctcgatacgaacgccaaagagaagaagacgaagacgaagatgatgggtgtgttgaagtcggcgattggggatatgttgatgaccttctcttgggttgtcctctccgctacctttggaattcagacggcggcgattatctccgccggtgattttcaggcaatcacttgggctccgttggtgattttgacgtcgttgattttcgtctacgtctcgatcttcaccgttatcttcggtagcgctagcttcaatcctaccggaagcgctgccttttatgtcgccggtgtccccggagatactcttttctccttggcgattagattacctgctcaggcaattggtgctgcaggaggtgcattggcgatcatggagttcataccagagaaatacaagcatatgattggaggtccttctcttcaggttgatgtgcacactggagctattgctgaaacgatcttaagttttggtattacctttgcggttttgctaattatcctcaggggtccacggagattgcttgctaagacgttcttgcttgctcttgcaaccatctcatttgttgtcgccggatctaaatacactggaccagccatgaatcctgccattgcgtttggatgggcatacatgtacagctcccacaacacatgggaccatatctacgtctactggatcagttctttcgtaggagcattatctgctgcattgcttttccgttctatcttcccgccacctcggccccagaagaagaaacaaaagaaagcctga

SEQ ID NO: 77069 - protein, 240 aa, Arabidopsis thaliana
  peptide (1)..(240): Ceres Seq. ID no. 12560806
  misc_feature (2)..(223): Pfam Name: Major intrinsic protein Pfam Description: Major intrinsic protein
  misc_feature (1)..(240): Homolog of NCBI NO: 15229225 NR Description: hypothetical protein; protein id: At3g04090.1 thaliana] >gi|6721176|gb|AAF26804.1|AC016829_28 hypothetical
  misc_feature (2)..(240): Homolog of NCBI NO: 15238785 NR Description: putative protein; protein id: At5g18290.1 thaliana] >gi|9758911|dbj|BAB09487.1| to unknown protein [Arabidopsis thaliana]
  misc_feature (2)..(236): Homolog of NCBI NO: 13447815 NR Description: small basic membrane integral protein ZmSIP1-2
  misc_feature (2)..(240): Homolog of NCBI NO: 34906220 NR Description: P0666G04.16 [Oryza sativa (japonica
  misc_feature (2)..(240): Homolog of NCBI NO: 13447813 NR Description: small basic membrane integral protein ZmSIP1-1
  misc_feature (2)..(238): Homolog of NCBI NO: 15230175 NR Description: putative protein; protein id: At3g56950.1, by cDNA: 32275., supported by cDNA: gi_14423565 [Arabidopsis
  misc_feature (9)..(239): Homolog of NCBI NO: 13447817 NR Description: small basic membrane integral protein ZmSIP2-1
  misc_feature (1)..(234): Homolog of NCBI NO: 15811692 NR Description: aquaporin [Pyrocoelia rufa]
  misc_feature (69)..(226): Homolog of NCBI NO: 23496461 NR Description: aquaporin [Oryzias latipes]
  misc_feature (1)..(220): Homolog of NCBI NO: 15227302 NR Description: putative plasma membrane intrinsic protein; id: At2g16850.1, supported by cDNA: 36296. [Arabidopsis thaliana] hypothetical protein At2g16850 [imported] membrane intrinsic
MMGVLKSAIGDMLMTFSWVVLSATFGIQTAAIISAGDFQAITWAPLVILTSLIFVYVSIFTVIFGSASFNPTGSAAFYVAGVPGDTLFSLAIRLPAQAIGAAGGALAIMEFIPEKYKHMIGGPSLQVDVHTGAIAETILSFGITFAVLLIILRGPRRLLAKTFLLALATISFVVAGSKYTGPAMNPAIAFGWAYMYSSHNTWDHIYVYWISSFVGALSAALLFRSIFPPPRPQKKKQKKA

SEQ ID NO: 77070 - protein, 239 aa, Arabidopsis thaliana
  peptide (1)..(239): Ceres Seq. ID no. 12560807
  misc_feature (1)..(222): Pfam Name: Major intrinsic protein Pfam Description: Major intrinsic protein
  misc_feature (1)..(239): Homolog of NCBI NO: 15229225 NR Description: hypothetical protein; protein id: At3g04090.1 thaliana] >gi|6721176|gb|AAF26804.1|AC016829_28 hypothetical
  misc_feature (1)..(239): Homolog of NCBI NO: 15238785 NR Description: putative protein; protein id: At5g18290.1 thaliana] >gi|9758911|dbj|BAB09487.1| to unknown protein [Arabidopsis thaliana]
  misc_feature (1)..(235): Homolog of NCBI NO: 13447815 NR Description: small basic membrane integral protein ZmSIP1-2
  misc_feature (1)..(239): Homolog of NCBI NO: 34906220 NR Description: P0666G04.16 [Oryza sativa (japonica
  misc_feature (1)..(239): Homolog of NCBI NO: 13447813 NR Description: small basic membrane integral protein ZmSIP1-1
  misc_feature (1)..(237): Homolog of NCBI NO: 15230175 NR Description: putative protein; protein id: At3g56950.1, by cDNA: 32275., supported by cDNA: gi_14423565 [Arabidopsis
  misc_feature (8)..(238): Homolog of NCBI NO: 13447817 NR Description: small basic membrane integral protein ZmSIP2-1
  misc_feature (1)..(233): Homolog of NCBI NO: 15811692 NR Description: aquaporin [Pyrocoelia rufa]
  misc_feature (68)..(225): Homolog of NCBI NO: 23496461 NR Description: aquaporin [Oryzias latipes]
  misc_feature (1)..(219): Homolog of NCBI NO: 15227302 NR Description: putative plasma membrane intrinsic protein; id: At2g16850.1, supported by cDNA: 36296. [Arabidopsis thaliana] hypothetical protein At2g16850 [imported] membrane intrinsic
MGVLKSAIGDMLMTFSWVVLSATFGIQTAAIISAGDFQAITWAPLVILTSLIFVYVSIFTVIFGSASFNPTGSAAFYVAGVPGDTLFSLAIRLPAQAIGAAGGALAIMEFIPEKYKHMIGGPSLQVDVHTGAIAETILSFGITFAVLLIILRGPRRLLAKTFLLALATISFVVAGSKYTGPAMNPAIAFGWAYMYSSHNTWDHIYVYWISSFVGALSAALLFRSIFPPPRPQKKKQKKA

SEQ ID NO: 77071 - protein, 229 aa, Arabidopsis thaliana
  peptide (1)..(229): Ceres Seq. ID no. 12560808
  misc_feature (1)..(212): Pfam Name: Major intrinsic protein Pfam Description: Major intrinsic protein
  misc_feature (1)..(229): Homolog of NCBI NO: 15229225 NR Description: hypothetical protein; protein id: At3g04090.1 thaliana] >gi|6721176|gb|AAF26804.1|AC016829_28 hypothetical
  misc_feature (1)..(229): Homolog of NCBI NO: 15238785 NR Description: putative protein; protein id: At5g18290.1 thaliana] >gi|9758911|dbj|BAB09487.1| to unknown protein [Arabidopsis thaliana]
  misc_feature (1)..(225): Homolog of NCBI NO: 13447815 NR Description: small basic membrane integral protein ZmSIP1-2
  misc_feature (1)..(229): Homolog of NCBI NO: 34906220 NR Description: P0666G04.16 [Oryza sativa (japonica
  misc_feature (1)..(229): Homolog of NCBI NO: 13447813 NR Description: small basic membrane integral protein ZmSIP1-1
  misc_feature (1)..(227): Homolog of NCBI NO: 15230175 NR Description: putative protein; protein id: At3g56950.1, by cDNA: 32275., supported by cDNA: gi_14423565 [Arabidopsis
  misc_feature (1)..(228): Homolog of NCBI NO: 13447817 NR Description: small basic membrane integral protein ZmSIP2-1
  misc_feature (1)..(223): Homolog of NCBI NO: 15811692 NR Description: aquaporin [Pyrocoelia rufa]
  misc_feature (58)..(215): Homolog of NCBI NO: 23496461 NR Description: aquaporin [Oryzias latipes]
  misc_feature (1)..(209): Homolog of NCBI NO: 15227302 NR Description: putative plasma membrane intrinsic protein; id: At2g16850.1, supported by cDNA: 36296. [Arabidopsis thaliana] hypothetical protein At2g16850 [imported] membrane intrinsic
MLMTFSWVVLSATFGIQTAAIISAGDFQAITWAPLVILTSLIFVYVSIFTVIFGSASFNPTGSAAFYVAGVPGDTLFSLAIRLPAQAIGAAGGALAIMEFIPEKYKHMIGGPSLQVDVHTGAIAETILSFGITFAVLLIILRGPRRLLAKTFLLALATISFVVAGSKYTGPAMNPAIAFGWAYMYSSHNTWDHIYVYWISSFVGALSAALLFRSIFPPPRPQKKKQKKA

SEQ ID NO: 77072 - DNA, 1644 bp, Arabidopsis thaliana
  misc_feature (1)..(1644): Ceres Seq. ID no. 12560845
  misc_feature: MA Experiment ID: 20000495 Result: Down-regulated in Transcription
  misc_feature: MA Experiment 20000495 PARAMETER Experiment Name: At_Guard_Cells_P Parameter: Harvest Date Value: 8/2/2002
  misc_feature: MA Experiment 20000495 PARAMETER Experiment Name: At_Guard_Cells_P Parameter: Organism Value: A. thaliana
  misc_feature: MA Experiment 20000495 PARAMETER Experiment Name: At_Guard_Cells_P Parameter: Tissue Value: Guard Cells vs. Leaves
cttggacgtgtaacgccgttaaaacgattctttcccattgtatccgcttttaacaactctcgtcgtcatctccaccgtccgttttctctcagctatattttaatggcgacaattcagaagcttgaagaagttgcaggcaaagatcaaactctaagagccgttgatctaaccatcatcaacggcgtcagaaacgtcgaaacttcaagacctttccaagtaaatcccacagtgagtctcgagcccaaggcggagccggtgatgccgtcgttttcaatgtctttagctccaccgtcttcgacaggaccaccattgaagagagcttcgactaaagaccgtcacacgaaggttgaaggaagagggagaaggatacggatgcctgccacgtgtgcggctaggatttttcaattaactcgagagttaggtcacaaatccgacggcgaaacgattcggtggttgttggagaacgctgagccggcgattatagccgccacgggtacgggaacggttcccgccatcgccatgtcggttaacggaaccttaaaaatcccgacgacgacgaacgctgattctgatatgggtgaaaatctgatgaagaagaaacgtaaacgaccttctaacagtgagtatatagacataagcgacgccgtttcagcttcctccggtttagctccaattgccacgacgacaacgatccaacctccgcaagctctggcatcatccactgtggctcagcaacttctgccgcaaggaatgtatccgatgtgggctattccatcaaacgcaatgattccgacggtcggagctttcttcttgattccacaaatcgctggtccgtcgaatcagcctcagttattagcttttcccgccgccgctgcttcgccgtcgtcttacgtcgccgctgttcaacaggcttccacgatggctagaccacctcctttacaagttgttccaagcagcggctttgtatccgtttcagacgttagcggttcgaatttatcaagagcgacgtcggttatggctccgagctcaagctcaggcgtaacaaccggtagttcatcgtcaattgcaacaacaacgacgcacacgctgagagacttctccctagagatatacgagaaacaagagcttcaccagttcatgagcaccacaacagcacggtcatcgaaccactgaagaaaagaaaggaaacggcggcgtattagtgatcggaaaaaaagcacgtgtgcacatgaagaagtgcacgtgttaagaagtgggcctcgattttaggcagaagtgggtcaacacgcaccaaaaagagagtggagggaggaggagaggggccacacggctcccaccttacgcatagcttccgaggcagccaggttgggtgtggtccccaaatggttagagctacgtggtccgtatgagtaggaccagcttaagcttaagcataattcgaaacgtttcgtttttttggtgggggctcaccactttgtcttgacttttttggtctttgtaattttacaaaataagatttattgaagccctctctaagtcatggtccactcaacaacaattgtgatattgatgttttgattttattaaaatctgtaacaaaataaatatttctatctaaaatgaaaatactaatgttgttttcct

SEQ ID NO: 77073 - protein, 390 aa, Arabidopsis thaliana
  peptide (1)..(390): Ceres Seq. ID no. 12560846
  misc_feature (93)..(314): Pfam Name: TCP family transcription factor Pfam Description: TCP family transcription factor
  misc_feature (35)..(390): Homolog of NCBI NO: 15225538 NR Description: putative PCF2-like DNA binding protein; protein At2g45680.1, supported by cDNA: gi_13877694, supported by cDNA:
  misc_feature (81)..(300): Homolog of NCBI NO: 15242216 NR Description: putative protein; protein id: At5g51910.1, by cDNA: 247645. [Arabidopsis thaliana] contains similarity to DNA binding protein PCF1~gene_id:MJM18.6
  misc_feature (97)..(300): Homolog of NCBI NO: 21592496 NR Description: unknown [Arabidopsis thaliana]
  misc_feature (79)..(346): Homolog of NCBI NO: 7489534 NR Description: probable DNA binding protein PCF2 - rice
  misc_feature (67)..(181): Homolog of NCBI NO: 5731257 NR Description: auxin-induced basic helix-loop-helix
  misc_feature (102)..(181): Homolog of NCBI NO: 18409345 NR Description: expressed protein; protein id: At1g69690.1, by cDNA: gi_15912212, supported by cDNA: gi_19547990 [Arabidopsis
  misc_feature (102)..(181): Homolog of NCBI NO: 11357581 NR Description: hypothetical protein F1P2.170 - Arabidopsis >gi|6522545|emb|CAB61988.1| putative protein [Arabidopsis
  misc_feature (102)..(181): Homolog of NCBI NO: 22331641 NR Description: putative protein; protein id: At3g47620.1, by cDNA: gi_16604510 [Arabidopsis thaliana] AT3g47620/F1P2_170 [Arabidopsis thaliana]
  misc_feature (73)..(186): Homolog of NCBI NO: 15217857 NR Description: auxin-induced basic helix-loop-helix factor, putative; protein id: At1g58100.1, supported by cDNA:
  misc_feature (101)..(175): Homolog of NCBI NO: 15232059 NR Description: unknown protein; protein id: At3g27010.1 thaliana] >gi|9279624|dbj|BAB01082.1| gene_id:MOJ10.8~unknown [Arabidopsis thaliana] >gi|11595501|emb|CAC18326.1| putative
LGRVTPLKRFFPIVSAFNNSRRHLHRPFSLSYILMATIQKLEEVAGKDQTLRAVDLTIINGVRNVETSRPFQVNPTVSLEPKAEPVMPSFSMSLAPPSSTGPPLKRASTKDRHTKVEGRGRRIRMPATCAARIFQLTRELGHKSDGETIRWLLENAEPAIIAATGTGTVPAIAMSVNGTLKIPTTTNADSDMGENLMKKKRKRPSNSEYIDISDAVSASSGLAPIATTTTIQPPQALASSTVAQQLLPQGMYPMWAIPSNAMIPTVGAFFLIPQIAGPSNQPQLLAFPAAAASPSSYVAAVQQASTMARPPPLQVVPSSGFVSVSDVSGSNLSRATSVMAPSSSSGVTTGSSSSIATTTTHTLRDFSLEIYEKQELHQFMSTTTARSSNH

SEQ ID NO: 77074 - protein, 356 aa, Arabidopsis thaliana; identical to SEQ ID NO: 45932
  peptide (1)..(356): Ceres Seq. ID no. 12560847
  misc_feature (59)..(280): Pfam Name: TCP family transcription factor Pfam Description: TCP family transcription factor
  misc_feature (1)..(356): Homolog of NCBI NO: 15225538 NR Description: putative PCF2-like DNA binding protein; protein At2g45680.1, supported by cDNA: gi_13877694, supported by cDNA:
  misc_feature (47)..(266): Homolog of NCBI NO: 15242216 NR Description: putative protein; protein id: At5g51910.1, by cDNA: 247645. [Arabidopsis thaliana] contains similarity to DNA binding protein PCF1~gene_id:MJM18.6
  misc_feature (63)..(266): Homolog of NCBI NO: 21592496 NR Description: unknown [Arabidopsis thaliana]
  misc_feature (45)..(312): Homolog of NCBI NO: 7489534 NR Description: probable DNA binding protein PCF2 - rice
  misc_feature (33)..(147): Homolog of NCBI NO: 5731257 NR Description: auxin-induced basic helix-loop-helix
  misc_feature (68)..(147): Homolog of NCBI NO: 18409345 NR Description: expressed protein; protein id: At1g69690.1, by cDNA: gi_15912212, supported by cDNA: gi_19547990 [Arabidopsis
  misc_feature (68)..(147): Homolog of NCBI NO: 11357581 NR Description: hypothetical protein F1P2.170 - Arabidopsis >gi|6522545|emb|CAB61988.1| putative protein [Arabidopsis
  misc_feature (68)..(147): Homolog of NCBI NO: 22331641 NR Description: putative protein; protein id: At3g47620.1, by cDNA: gi_16604510 [Arabidopsis thaliana] AT3g47620/F1P2_170 [Arabidopsis thaliana]
  misc_feature (39)..(152): Homolog of NCBI NO: 15217857 NR Description: auxin-induced basic helix-loop-helix factor, putative; protein id: At1g58100.1, supported by cDNA:
  misc_feature (67)..(141): Homolog of NCBI NO: 15232059 NR Description: unknown protein; protein id: At3g27010.1 thaliana] >gi|9279624|dbj|BAB01082.1| gene_id:MOJ10.8~unknown [Arabidopsis thaliana] >gi|11595501|emb|CAC18326.1| putative

SEQ ID NO: 77075 - protein, 304 aa, Arabidopsis thaliana; identical to SEQ ID NO: 45933
  peptide (1)..(304): Ceres Seq. ID no. 12560848
  misc_feature (7)..(228): Pfam Name: TCP family transcription factor Pfam Description: TCP family transcription factor
  misc_feature (1)..(304): Homolog of NCBI NO: 15225538 NR Description: putative PCF2-like DNA binding protein; protein At2g45680.1, supported by cDNA: gi_13877694, supported by cDNA:
  misc_feature (1)..(214): Homolog of NCBI NO: 15242216 NR Description: putative protein; protein id: At5g51910.1, by cDNA: 247645. [Arabidopsis thaliana] contains similarity to DNA binding protein PCF1~gene_id:MJM18.6
  misc_feature (11)..(214): Homolog of NCBI NO: 21592496 NR Description: unknown [Arabidopsis thaliana]
  misc_feature (1)..(260): Homolog of NCBI NO: 7489534 NR Description: probable DNA binding protein PCF2 - rice
  misc_feature (1)..(95): Homolog of NCBI NO: 5731257 NR Description: auxin-induced basic helix-loop-helix
  misc_feature (16)..(95): Homolog of NCBI NO: 18409345 NR Description: expressed protein; protein id: At1g69690.1, by cDNA: gi_15912212, supported by cDNA: gi_19547990 [Arabidopsis
  misc_feature (16)..(95): Homolog of NCBI NO: 11357581 NR Description: hypothetical protein F1P2.170 - Arabidopsis >gi|6522545|emb|CAB61988.1| putative protein [Arabidopsis
  misc_feature (16)..(95): Homolog of NCBI NO: 22331641 NR Description: putative protein; protein id: At3g47620.1, by cDNA: gi_16604510 [Arabidopsis thaliana] AT3g47620/F1P2_170 [Arabidopsis thaliana]
  misc_feature (1)..(100): Homolog of NCBI NO: 15217857 NR Description: auxin-induced basic helix-loop-helix factor, putative; protein id: At1g58100.1, supported by cDNA:
  misc_feature (15)..(89): Homolog of NCBI NO: 15232059 NR Description: unknown protein; protein id: At3g27010.1 thaliana] >gi|9279624|dbj|BAB01082.1| gene_id:MOJ10.8~unknown [Arabidopsis thaliana] >gi|11595501|emb|CAC18326.1| putative

SEQ ID NO: 77076 - DNA, 1875 bp, Arabidopsis thaliana
  misc_feature (1)..(1875): Ceres Seq. ID no. 12560891
  misc_feature: MA Experiment ID: 20000171 Result: Down-regulated in Transcription
  misc_feature: MA Experiment 20000171 PARAMETER Experiment Name: At_42deg_Heat_P Parameter: Age (day) Value: 14
  misc_feature: MA Experiment 20000171 PARAMETER Experiment Name: At_42deg_Heat_P Parameter: Organism Value: A. thaliana
  misc_feature: MA Experiment 20000171 PARAMETER Experiment Name: At_42deg_Heat_P Parameter: Plant Line Value: WS
  misc_feature: MA Experiment 20000171 PARAMETER Experiment Name: At_42deg_Heat_P Parameter: Temperature (deg C) Value: 42 vs. 22
  misc_feature: MA Experiment 20000171 PARAMETER Experiment Name: At_42deg_Heat_P Parameter: Timepoint (hr) Value: 1
  misc_feature: MA Experiment 20000171 PARAMETER Experiment Name: At_42deg_Heat_P Parameter: Tissue Value: Aerial
  misc_feature: MA Experiment ID: 20000173 Result: Down-regulated in Transcription
  misc_feature: MA Experiment 20000173 PARAMETER Experiment Name: At_42deg_Heat_P Parameter: Age (day) Value: 14
  misc_feature: MA Experiment 20000173 PARAMETER Experiment Name: At_42deg_Heat_P Parameter: Organism Value: A. thaliana
  misc_feature: MA Experiment 20000173 PARAMETER Experiment Name: At_42deg_Heat_P Parameter: Plant Line Value: WS
  misc_feature: MA Experiment 20000173 PARAMETER Experiment Name: At_42deg_Heat_P Parameter: Temperature (deg C) Value: 42 vs. 22
  misc_feature: MA Experiment 20000173 PARAMETER Experiment Name: At_42deg_Heat_P Parameter: Timepoint (hr) Value: 6
  misc_feature: MA Experiment 20000173 PARAMETER Experiment Name: At_42deg_Heat_P Parameter: Tissue Value: Aerial
  misc_feature: MA Experiment ID: 20000234 Result: Up-regulated in Transcription
  misc_feature: MA Experiment 20000234 PARAMETER Experiment Name: At_Siliques_P Parameter: Age (day) Value: 21
  misc_feature: MA Experiment 20000234 PARAMETER Experiment Name: At_Siliques_P Parameter: Organism Value: A. thaliana
  misc_feature: MA Experiment 20000234 PARAMETER Experiment Name: At_Siliques_P Parameter: Plant Line Value: WS
  misc_feature: MA Experiment 20000234 PARAMETER Experiment Name: At_Siliques_P Parameter: Tissue Value: Less Than 5mm Siliques vs. Whole Plant
  misc_feature: MA Experiment ID: 20000264 Result: Up-regulated in Transcription
  misc_feature: MA Experiment 20000264 PARAMETER Experiment Name: At_Open_Flower_P Parameter: Age (day) Value: 21
  misc_feature: MA Experiment 20000264 PARAMETER Experiment Name: At_Open_Flower_P Parameter: Plant Line Value: WS
  misc_feature: MA Experiment 20000264 PARAMETER Experiment Name: At_Open_Flower_P Parameter: Tissue Value: Open Flower vs. Whole Plant
  misc_feature: MA Experiment ID: 20000265 Result: Up-regulated in Transcription
  misc_feature: MA Experiment 20000265 PARAMETER Experiment Name: At_Open_Flower_P Parameter: Age (day) Value: 21
  misc_feature: MA Experiment 20000265 PARAMETER Experiment Name: At_Open_Flower_P Parameter: Plant Line Value: WS
  misc_feature: MA Experiment 20000265 PARAMETER Experiment Name: At_Open_Flower_P Parameter: Tissue Value: Closed Flower vs. Whole Plant
  misc_feature: MA Experiment ID: 20000436 Result: Down-regulated in Transcription
  misc_feature: MA Experiment 20000436 PARAMETER Experiment Name: At_Drought_P Parameter: Age (day) Value: 7
  misc_feature: MA Experiment 20000436 PARAMETER Experiment Name: At_Drought_P Parameter: Organism Value: A. thaliana
  misc_feature: MA Experiment 20000436 PARAMETER Experiment Name: At_Drought_P Parameter: Plant Line Value: WS
  misc_feature: MA Experiment 20000436 PARAMETER Experiment Name: At_Drought_P Parameter: Timepoint (hr) Value: 12
  misc_feature: MA Experiment 20000436 PARAMETER Experiment Name: At_Drought_P Parameter: Tissue Value: Whole Plant
  misc_feature: MA Experiment 20000436 PARAMETER Experiment Name: At_Drought_P Parameter: Treatment Value: Drought vs. No Drought
  misc_feature: MA Experiment ID: 20000437 Result: Down-regulated in Transcription
  misc_feature: MA Experiment 20000437 PARAMETER Experiment Name: At_Drought_P Parameter: Age (day) Value: 8
  misc_feature: MA Experiment 20000437 PARAMETER Experiment Name: At_Drought_P Parameter: Organism Value: A. thaliana
  misc_feature: MA Experiment 20000437 PARAMETER Experiment Name: At_Drought_P Parameter: Plant Line Value: WS
  misc_feature: MA Experiment 20000437 PARAMETER Experiment Name: At_Drought_P Parameter: Timepoint (hr) Value: 24
  misc_feature: MA Experiment 20000437 PARAMETER Experiment Name: At_Drought_P Parameter: Tissue Value: Whole Plant
  misc_feature: MA Experiment 20000437 PARAMETER Experiment Name: At_Drought_P Parameter: Treatment Value: Drought vs. No Drought
  misc_feature: MA Experiment ID: 20001247 Result: Down-regulated in Transcription
  misc_feature: MA Experiment 20001247 PARAMETER Experiment Name: At_Far-red-induction_P Parameter: Age (day) Value: 7
  misc_feature: MA Experiment 20001247 PARAMETER Experiment Name: At_Far-red-induction_P Parameter: Light Value: Far-red vs. White
  misc_feature: MA Experiment 20001247 PARAMETER Experiment Name: At_Far-red-induction_P Parameter: Organism Value: A. thaliana
  misc_feature: MA Experiment 20001247 PARAMETER Experiment Name: At_Far-red-induction_P Parameter: Plant Line Value: Columbia
  misc_feature: MA Experiment 20001247 PARAMETER Experiment Name: At_Far-red-induction_P Parameter: Timepoint (hr) Value: 1
  misc_feature: MA Experiment 20001247 PARAMETER Experiment Name: At_Far-red-induction_P Parameter: Tissue Value: Whole Plant
  misc_feature: MA Experiment ID: 20001451 Result: Down-regulated in Transcription
  misc_feature: MA Experiment 20001451 PARAMETER Experiment Name: At_Far-red-induction_P Parameter: Age (day) Value: 7
  misc_feature: MA Experiment 20001451 PARAMETER Experiment Name: At_Far-red-induction_P Parameter: Light Value: Far-red vs. White
  misc_feature: MA Experiment 20001451 PARAMETER Experiment Name: At_Far-red-induction_P Parameter: Organism Value: A. thaliana
  misc_feature: MA Experiment 20001451 PARAMETER Experiment Name: At_Far-red-induction_P Parameter: Plant Line Value: Columbia
  misc_feature: MA Experiment 20001451 PARAMETER Experiment Name: At_Far-red-induction_P Parameter: Timepoint (hr) Value: 24
  misc_feature: MA Experiment 20001451 PARAMETER Experiment Name: At_Far-red-induction_P Parameter: Tissue Value: Whole Plant
agaaccctaaaaagaagaagataagaaatcggaaatgggcatcaaggaccttctcagattcatgaaaccttatatccttcccattcacatccagaaatacgccgggaaacgagtgggaatcgatgcttattcatggctacacaaaggagcatactcatgtagtatggagttgtgtttagacactgatgggaagaagaagctgaggtacattgattactttatgcatagagtcaaccttcttcaacactatgagatcattcctgtcgttgttctcgatggtggtaatatgccctgcaaggctgccactggtgatgaacgtcataggaagcgaaaggctaactttgacgctgcaatggtgaagctgaaggaagggaatgtcgcagcagctactgagctttttcagagagcagttagtgtaacatcatccatggctcatcaattgattcaggttctgaaatcagaaaacgtcgaatttattgtagctccctatgaggctgatgctcagctagcatacctatccagcctcgaactggaacaaggcgggattgctgctgttataaccgaagacagcgatttacttgcatatggctgcaaagctgttatctttaagatggaccgctatggtaaaggagaggaactagttctagataatgtttttcaagctgttgatcaaaagccttccttccagaattttgatcaagagctattcactgcaatgtgcgtattggcgggctgtgattttctcccctcggttcctggtgttggtatttcaagagctcatgcattcatctccaagtaccagagtgtagaactcgttttgtcatttctcaagacaaaaaaaggcaaactagttcctgatgattattccagctctttcacggaagcagtttcagtttttcagcacgcacgtgtatatgactttgacgctaagaagctcaagcacttgaaacccctctcccacaacctcctgaatttaccagttgaacaacttgagttcctgggaccagatctgtcgccatctgttgctgttgcaattgctgaaggtaatgttgatcccataaccatgaaagcttttaaccacttctcggtttctaggaaaccgttgaagacgcctgttcgatcattcaaggaacaggaaaagggaagctcctttttggtatgttctttgtctaaaagtgaggaaataatagagctcaaaaggactgcagatgaagctatgattgatccagaagctattgtgaagaagaagatgtactctaaacaagattcagatctatacaaactgcttgcgcagcctaacagggatcaagtggttacccgacccagcaatccctcacttattccggacaacaacccgttcaagattagaaaaaccgatgaaatcaatctggaaatcgcagaatacggtgtgcaagaactcgctgattcgtttgtgaccaaaagcaaagcagtggacgtggcttcttcttcaccaaactctcacgaacacgaggatcaaaaagagtgtgttacaatcgatctgtccaaacttgatgccgctggaatcaaacaggacagtgagaagaacagagtgaaagaaacatttgaaacaacagaagtagatctagctgaagttcaagatcatgtgaacatgacgacaaagagagtgcgtggaacaaaacctagaaccgagaatttcaaagtgaaaacaagctgtaaaagttcagagaacaacaagactataatcaagaagaaacacagtatattagatttcttccagcgattgtaatctctttaattttggtatgtaatcttttcttagcttctttataactcttaatttatgattatttggagaatatagagacgaacaccatatattattacaaacaactc

SEQ ID NO: 77077 - protein, 577 aa, Arabidopsis thaliana
  peptide (1)..(577): Ceres Seq. ID no. 12560892
  misc_feature (1)..(102): Pfam Name: XPG N-terminal domain Pfam Description: XPG N-terminal domain
  misc_feature (1)..(577): Homolog of NCBI NO: 18394573 NR Description: expressed protein; protein id: At1g18090.1, by cDNA: gi_15215781 [Arabidopsis thaliana] At1g18090/T10F20_6 [Arabidopsis thaliana]
  misc_feature (1)..(577): Homolog of NCBI NO: 30685678 NR Description: expressed protein [Arabidopsis thaliana]
  misc_feature (1)..(577): Homolog of NCBI NO: 9719724 NR Description: Contains similarity to exonuclease ExoI from
  misc_feature (219)..(577): Homolog of NCBI NO: 25402838 NR Description: protein T10O22.7 [imported] - Arabidopsis >gi|8671764|gb|AAF78370.1|AC069551_3 T10O22.7 [Arabidopsis
  misc_feature (87)..(188): Homolog of NCBI NO: 25402838 NR Description: protein T10O22.7 [imported] - Arabidopsis >gi|8671764|gb|AAF78370.1|AC069551_3 T10O22.7 [Arabidopsis
  misc_feature (1)..(57): Homolog of NCBI NO: 25402838 NR Description: protein T10O22.7 [imported] - Arabidopsis >gi|8671764|gb|AAF78370.1|AC069551_3 T10O22.7 [Arabidopsis
  misc_feature (1)..(324): Homolog of NCBI NO: 15220506 NR Description: exonuclease, putative; protein id: At1g29630.1
  misc_feature (1)..(332): Homolog of NCBI NO: 34910036 NR Description: putative exonuclease [Oryza sativa (japonica group)] >gi|22202704|dbj|BAC07362.1| putative exonuclease [Oryza
  misc_feature (1)..(351): Homolog of NCBI NO: 4884906 NR Description: exonuclease ExoI [Xenopus laevis]
  misc_feature (1)..(345): Homolog of NCBI NO: 40744430 NR Description: hypothetical protein AN3035.2 [Aspergillus
MGIKDLLRFMKPYILPIHIQKYAGKRVGIDAYSWLHKGAYSCSMELCLDTDGKKKLRYIDYFMHRVNLLQHYEIIPVVVLDGGNMPCKAATGDERHRKRKANFDAAMVKLKEGNVAAATELFQRAVSVTSSMAHQLIQVLKSENVEFIVAPYEADAQLAYLSSLELEQGGIAAVITEDSDLLAYGCKAVIFKMDRYGKGEELVLDNVFQAVDQKPSFQNFDQELFTAMCVLAGCDFLPSVPGVGISRAHAFISKYQSVELVLSFLKTKKGKLVPDDYSSSFTEAVSVFQHARVYDFDAKKLKHLKPLSHNLLNLPVEQLEFLGPDLSPSVAVAIAEGNVDPITMKAFNHFSVSRKPLKTPVRSFKEQEKGSSFLVCSLSKSEEIIELKRTADEAMIDPEAIVKKKMYSKQDSDLYKLLAQPNRDQVVTRPSNPSLIPDNNPFKIRKTDEINLEIAEYGVQELADSFVTKSKAVDVASSSPNSHEHEDQKECVTIDLSKLDAAGIKQDSEKNRVKETFETTEVDLAEVQDHVNMTTKRVRGTKPRTENFKVKTSCKSSENNKTIIKKKHSILDFFQRL

SEQ ID NO: 77078 - protein, 568 aa, Arabidopsis thaliana
  peptide (1)..(568): Ceres Seq. ID no. 12560893
  misc_feature (1)..(93): Pfam Name: XPG N-terminal domain Pfam Description: XPG N-terminal domain
  misc_feature (1)..(568): Homolog of NCBI NO: 18394573 NR Description: expressed protein; protein id: At1g18090.1, by cDNA: gi_15215781 [Arabidopsis thaliana] At1g18090/T10F20_6 [Arabidopsis thaliana]
  misc_feature (1)..(568): Homolog of NCBI NO: 30685678 NR Description: expressed protein [Arabidopsis thaliana]
  misc_feature (1)..(568): Homolog of NCBI NO: 9719724 NR Description: Contains similarity to exonuclease ExoI from
  misc_feature (210)..(568): Homolog of NCBI NO: 25402838 NR Description: protein T10O22.7 [imported] - Arabidopsis >gi|8671764|gb|AAF78370.1|AC069551_3 T10O22.7 [Arabidopsis
  misc_feature (78)..(179): Homolog of NCBI NO: 25402838 NR Description: protein T10O22.7 [imported] - Arabidopsis >gi|8671764|gb|AAF78370.1|AC069551_3 T10O22.7 [Arabidopsis
  misc_feature (1)..(48): Homolog of NCBI NO: 25402838 NR Description: protein T10O22.7 [imported] - Arabidopsis >gi|8671764|gb|AAF78370.1|AC069551_3 T10O22.7 [Arabidopsis
  misc_feature (1)..(315): Homolog of NCBI NO: 15220506 NR Description: exonuclease, putative; protein id: At1g29630.1
  misc_feature (1)..(323): Homolog of NCBI NO: 34910036 NR Description: putative exonuclease [Oryza sativa (japonica group)] >gi|22202704|dbj|BAC07362.1| putative exonuclease [Oryza
  misc_feature (1)..(342): Homolog of NCBI NO: 4884906 NR Description: exonuclease ExoI [Xenopus laevis]
  misc_feature (1)..(336): Homolog of NCBI NO: 40744430 NR Description: hypothetical protein AN3035.2 [Aspergillus
MKPYILPIHIQKYAGKRVGIDAYSWLHKGAYSCSMELCLDTDGKKKLRYIDYFMHRVNLLQHYEIIPVVVLDGGNMPCKAATGDERHRKRKANFDAAMVKLKEGNVAAATELFQRAVSVTSSMAHQLIQVLKSENVEFIVAPYEADAQLAYLSSLELEQGGIAAVITEDSDLLAYGCKAVIFKMDRYGKGEELVLDNVFQAVDQKPSFQNFDQELFTAMCVLAGCDFLPSVPGVGISRAHAFISKYQSVELVLSFLKTKKGKLVPDDYSSSFTEAVSVFQHARVYDFDAKKLKHLKPLSHNLLNLPVEQLEFLGPDLSPSVAVAIAEGNVDPITMKAFNHFSVSRKPLKTPVRSFKEQEKGSSFLVCSLSKSEEIIELKRTADEAMIDPEAIVKKKMYSKQDSDLYKLLAQPNRDQVVTRPSNPSLIPDNNPFKIRKTDEINLEIAEYGVQELADSFVTKSKAVDVASSSPNSHEHEDQKECVTIDLSKLDAAGIKQDSEKNRVKETFETTEVDLAEVQDHVNMTTKRVRGTKPRTENFKVKTSCKSSENNKTIIKKKHSILDFFQRL
